United States Patent Application Publication US 2026/0058010 A1 - sequence listing, part 22

SEQ ID NO: 241 - DNA, 421612 bp, Homo sapiens
  source 1..421612: mol_type = genomic DNA
aggtactgacagaggaaatatggtgccaccagcctgtctttgtgtggaatgtggtaacctagggtctacctagaagataggagtcagacctggggtttgcttagagccaaattgaaccctatgtaaaaccctggccaaagtgcatgaacatttctcacaaaccagtaagaagactggttttctgggggggatggacacaattactttcccctggctttttcaccatagtggcctccatgagcattcgctttttccagacaccctgaagcaaaaaagccatacaaaacaattcccccaatgggaaatgaaaacccataacaaaacactttttccctctcattcccatcaccaccccactccctccagcccaacaccctgaatactcacaagagaacactttatctatacaaaattagaaaacaaaatatttacatatgaaataaacaccatcttgatttctgttgccagcggagactgaaagagctcccttggttctagattgctgttcgctaggttagttggtttggtttttttgtttgaaaggggtgaggtaagaggaagatgaggggatgagtccctgacccctggacagagtcagggcgaagcagtgtttacgtggcccttcgccttcttcctcctggaggtgcctcatgccctctgtcctctctcagtcttttctgttatctaaggtaaagcactccgtgctcctctcaccaaatctgtgagaggttcagccccttgcccccatgttcattttagaaagaaaacaaagctttacaaggccttcagttggctttaaaatgaaagatactgaggtaaaaatcaaggaggagggttggggacagcagtcaagggcgggatgaggaagggtcacgagtgagggcaaacaggggcgaagagcagccctggagggagtgacttgaagagacatggcagcttccttccagaggaggatgagcacctttctggtttatgtgtcctgtgtgcaacatggcgatcctgcagtcaagcttccacacagacctggggctctctggatgccaccctgtgtaggggaggatggcaggacagtggaactgacccatagaataaatagccctaccgcaagtttcaggaccggcagtgatacatattcatttcccttctcaattttccaatgttaagtgaagggagcatcagttctgctggtaccctcatccctggagttttatacatgtatatctttttttattcctcaatggtacaatctgagagggaaacaaggtgttgcaggaaggtagaagggcttctaccaagagtgttcactctgggctcaagtcacattcccagggagccaggcccaaagaggtggtggagggtccctctctgcccccgtctcccatttccaagtctcttcccctcttttcgtacctccagagctgcactcatggagtgcagctcatttctcttaaaggtcaagctcatttctcttaactgtctgctctgtagcagttgtaatcagttttggggggaagaagcctgctcgtctagcttcaggttaagtaagaagggatcaaagcattggaaacatccccctctctcacttaccctaccatacacgactccttacttcttcaaaggtggcttcgttcttccccaaaccttggccagtcgagagtctaaatgctcaaaagagctttgtagaatcttttgctcccaagtgtgggcaaaagaatcatggctgtgaaaattcggtttccctttagccttcctggaaagttcttggttcaaactggttgaaacaattgccaaccactgaggacttgtttatgtaccttgttcttgcaggattgctcaccgcctttttttgtttagaccacagaatcttctttatcaagaattttcattctccttattccagaaggatgaagggagacacagccaaaattcaggtaatacatggccatctctgtctgtatataagccaaacaatcacactgcttggggatattgaaagaaacaatagaaagagtcaaggttgccttctcttgaggcacctgactacacatgggtgcaagtgtgcatgaacacacatgcacgcacaatccacctgctcttgtccccaaggcaccgtgggacactatcataacgtactttccagtttgttcaagaatccactctgccaccaatgaccttttgttctgttcaccaccactatcgagtctcatggggttgaagcaagcattttttggcttatatataaacacaaatggcctcccaacctctgcttggcacatgattcctagacagatgtcatctaagcagcatgaatttagccagagcctctttcctttcacaagcagtgtgctaaatggtctcacatagatgcttttgcttcctcacctaaatgaaaagatcagtttgggaaaagctacctttgtgctcacatagcctctttttggttctcccagcttcactcaaagaggatatcaaggagctcttccacaccaggaggaagcccgcatgcagcccttcctttctccgctctaccctcccctgctgagagggcccatggcatcatctcatgggaacaggaatggctgacagcggggggaagaaggagagaactgtgaaaaggaggagagatggtgctggtcaccagggttgcccccagtaggaaccagaactccaggatcccataaataaattaaaacaagaaaggagcaaatgggaaccaagttcacccccgtcaccctccgtgacatgcgcatcacgcgacccacagccttaccctcccgtacccaccttaacctctctgttccctcactcagacatcagactcaatactagaaagtttctcataaacatgcccattgctggagccattgaaagccctggggtttttgttgttaggcacacaggggttggactggttccctatacagatgtccttctggaaacgggctggcacggccccatgaagggccgagaccaccggcttgttggtgacaagggcccggaagtccggcctggctttcgacgcccccgccaccgtgggctgcctgaagaagtaggatttgctgccatggagcaagcactggtcgtccccaaaagtggggatgaaagggttttgcgtgacccggtcagggtagagcgacttgctgagcatgtacccgccgccggggttgttgtggtggtgatgtccggcagtgggcactgaggacttgttgttggcaaaggtgctctcgccagctgacatctcaaacatgtgggcgtaggggctcccatccatgaatcggcccttgtctttcaggcttacgctgcgcggggccagggcggcttcttccttctgcaggtccacgaaggtgtcgtaggagtgctgccggcgcagtttgttccggttcttcttctgggccttggaattagtcgggctctgagggtacttagtggtggaggcgtttgacgtcaccgccactggggcagccggctggtccagttcctgcagggagttgtcctcactgatgtcatacaggttgcctgctttcttgcaagcctcacaccggatgcacgcctgcctgcccgagttctgacccgtcaccgtcgtggagtagttgtgcagcttggagggacagctgcggcagaagttgcccccggaccggtcctcccactccacgttggtcaggttcttctcccaaggtgcaggtaccccgctgaccacgccgtgtttgtcgcccgtcccgtgcttgatgtgagacctgttggtacagggccctcctccgctgacggagtcgcgcttaaagtcatcactccgctccttgtagatgtcggtcaggtctacgtgctcccagtggggtgagttctcctttgttcggaactggtccaggtagaagtcccgtagcccttccttgtccctgaagtagcgcttgtggtcaggggagcggggcggtcggcgacggtaggccagctcgatctcgtcaaactccctgcgggacttggccgaggcaggccgcttcttcaggctgtccttatattgctgcttacgcctcttggcggcattgccctcgatgttcccataggtgacggtgtgggttgagatgtcagagacatcggagcggatcaagtcgtcgtggccactgtagcggtcgctcttgaaggagaatttgccgtacaggtcactgagctggctgtgcttggaggaggggaggccgatgtccaggggcttcttgctgatggacctggactgggtggtgaagggtgggttgtcacagtcgtagagcccatcgatggagctggcactgccaatactatggggccggtggtgatggtggtagtgatcttggtacacgttgctgtccttcagctgcaggttcccgaacgttctctctacctcactgatgtagtcactgaagaggttctcctcacagggcgggttgttgtaggatttgcagtcagaatgcgtgaagctgcggcggtgctctgagatgtcatagacggatgactcccgtcggatgaagtccagggcgctctgcggtgagccattcacaccagacaggttagccatgttcttggccgtgcgcagcaggcgcaggatgttggagtgtgtgttgttcatggttgcggtgggggagttcattacagactggcgctcctcgatcgccaccccatggatgcagctgtagataccctgaagcaagaatggagggacaggttagatctccagagaggctagaaatgaccacaaaaaacactctcccaccaataattgctccaactggataagaaaaagggaaagcatgaagcgaatagtctaatatactattagatgtggctagaagtttgcctaatttatacccctaaatttggtgactgtcatgtggtgagctgaggtcagtgacctggccatcagaggggggggcatggccccacccagtaacttgagcaaagggactggaatcataagatatggcatttttgcctcagcttcactgttgacttaccgtggttttctatgcctagattttcacatcttaaaaatgaggccatgatatcaacccatagcaaaaaatatcatcagcctcctggaaataaacggccatgttctatggacactgaggttgctctgctgtggctgggccacacctggctgacagtaaagcacaggggagctcagtagcttacaactgtcactcttttctagctctgacaaattttaagcaggtttagaattttggtcaccaaataacagctgagcaattctcttcttgagccaagcatgaacaaaattcacagaaagagagaattagcaagccctggggtcaaagaaggatttttctcctgctgtgttctacactgtgggagggaagaattgggaaaaacagccagtactaaataggaataaataactcccttgttgaattctctcatttattctctctttagctcctgttttccttcttatactttctcactcacttaatattatcatcaataattaacatcttaacaaattagtattgatcgagagctccctgtgtacagctctttgtacagggctttgaaggacaccgtgcaggagaggcaacgggctgggttcctggagggctcagtatgtttgattctaaagtcaagccaacctccttctcacatcttgttccctgcctggaaaggtggacaaacttggaacttttctccctggctagggaaagcatatgagaagaggttgtttgaattgtgtcattataatgaacgggactaatttggaaagggaagttgtctccgtggatgggaatgagaggggagagggttagaagaatcgtagcgaaatgggaaagaagaaaggtttagacaaggtaagtctcattgtctcacagggcatcagcaagatggaagatcttcaaggtaaggttattccactttcccagttcttctaacccttcctgattaagctcaagagaaaattccaagccttttttcctctatagaggcattgatcatgtcaaaggattataaatggggtttttattacacatcaccagctcccatggcttctggtgttcccctatctgagatcttagggaagggctaccaaggaagcaacatggctcagggatcatcaccaccccaagttccagcctcctgttctgagctcacctgatggcctgaattaactcacagccagaaaggacacggagaaattgttctctatcagtaaaatactataggaaaatgatgaaaagatgaaataatttaacgagaaatcaattttctcattaatacaaaactccatttgagtcaaagttggttggccatatctggaacctagaccttcattctaaaaggacatttgagttcacctctcatgacttagtctctccactttattaacaaaaccaaaagaagctcactttttaaaaaaacttctccctgtgacctgttcatacataaaactgtcttcctagtgtctcattttagactaggaatgaagaggagacctaaataaagaatgacctaagagttttactcttgctccaactagggaagtttctggaatgtaaatttcttatgagtcagagcttatttctaaaggttctgttaagctcttcaactctccataaccaacacatggttaaaacatagagtgaaacaactaataatatacctttgtatgttaaaataagagagatatgttacatatgattatttaaatagaaatgtacatttttaaaggattagacagttaatacaatttatacagaaccaactaatggtgatgaaagacatttggtaaaaagccaaattttccattttgacagatctgtcagttcttacagagaaccaactgcccaaatcccacacagaaagctgtttcttgaaggaaatatagtatcacccacttttctgagccacttgcaatcatatcacacaaactcctaagaaaacatacatgatgtggtttcttgcttgagcaacatgggggtggagatagtgtcctcttggttctctctgctttgcacagtgctaggctaagctgtccctaacaagctttaggcatttaaatcaaaacacttactctgctgatggagaagaccatgccaggcttgccagaacagacacccataaagcaatgtcggaactgccaatagaaaaggtgttcgcagatgaaggtgatgaggctgagagccatggccgcccccaacatgtagaagacccctgccatgttgtcaatgtccagctggctgctcatgacctcattcttctcattgtgacaaatgccagtgagccagagagcttccagttcttccatctcccctggggaaaggacagagaaggaaaatggataaaaagaggagacaggaaaggagcagagaaaagggagaaagaggagtattgagcaagaaagagaaagatacgtgacagaaaaagagacaaggagacaaaaagaaaggaaatgaataaagttaacagtaatcttattaatgccattacatattaattcatcaacgtacttagtaagcattcaataaaaatttcacatgagtaccgcaggcgatatgaacacatgagacgttgctcccgctctccattatctagcctgtataaattggcatataaataatcacaatgacaagctgtctgcaggtaacaagagtccaaattggtgacagtaattctgtggatggcatggccagtgggttttcgtgaagtaagtaggagttggaagtgggcatgctggatggatgaattttaatttacattgtacaaaaaggcactccaggcagcaggaatagtatggtcggtgggaacacacaaggcttgtttaagtaaaggcatgcagaacagttcaaacagaaaaaggtatagtaggcaaaagaagctgaataaaaaagagtgatgtaagagtgctgaagatctgagtatcagattaagcattctgtactttatattatagacagtggggaataacataatcaaacgagtgattcagaaaattgcccttaaaattgtgcaaagcagattgggtagggagaagacaagcagagagagatgggcagagagattgattgattccctagggcccctcagatttactgatctcttgttgaagaaaataaagagcaaagaggagtaagcttggataaaataagacccccaaattcagacttgccttctttacacattgtttaacggtgctttgatcactttaactcatgtcagatttcaatgacctttttccacttcaccagatgctaggaagtaggaggaagtaggaagaggtcccagacaaaaggaaagtaaaagaaaccatgtgccctagaatgcatctaattctagacaagcaaaattctgaaaaatctcatggagaaaattgcctattcccatagttctactttggctaaaaaattgaactttgcttgcataatctgactaaagttttggcaacttttgcaaatcatctctttctcatggatacagtctccattattgcctttgagtgacagctacactaaaattacagaagctcttataccaaaatggcttggtaacactccagctaaaacatcctcctgtttccaatgttaatcaaatcacttttcccttatttttttgatcaaactatgattctcctaactagtggagcagacaacttcacctggattctaaaaatccacctgtggtcttctgcttctgatctcatccttaacagcaaagctgcagacataattgagatagccacttggctgatggctggtgaagccaacaagggtctggctgctcatccacaactgagttagtttctgtaatgctaacagaaacagtagtttctttgtacaataaagtgaagagggatgcagaagacaggaatataatgaaacagaagatgagatttttttcaactcaagttggtggttcagtctgctgccaggatgatactggggagtggctgatggtgtctgcctctgaggaccctaaccctgccttctgcctcttccagctgaaagagcaagatgggagagcaggaagaatgaagagatggccgcaagtttatttctccgccctacctctgggcacataaagagcagagaccttccacagttccatctattattttggccacatgtgagatgactggatgaaacatctaatatcagttctcctactttatccctgaaggtttgattatagcctgcaacccagaaaaagacctccttgacaaactgcttcaatcctctccctgccatctttcagcttgttatgggttgaaagatgttatagaatccccctaaaatatatatgttgaagtcctaacccccaataccttgggatgtgactttatttggaaatagagtcattgcaaacataattaagctgagatcatcccagagtatggtgaacccctaatctaatatgactggcattcttaagaaaaagggaaattcagacacagacatgtgcagagggaaaacatgcacactggtaaaacaccatgtgaacatgaatcagaggtcaggggtatgcttctacaagataaggaatgccaaaattatcagcaaaccaccagatactataggagaggcatgaaacagattctcccttgcagaccccggaagagattgaccctgctggcactgtgatttcagacgtctagtctctggaaatgtgagacaagacatttctgttgtttaaggcactcagtgcatggcactttgttatggcagcaataggaaacaaatatatacccgaaaactacacaatatactgtgaaatgcttttccggaaatgcacaggttaaagaaatggaagaaaaggaaaggttgatgttttggactggccatcagtagaggacaaatgggcactttccctttcttgaactcaccatctccaaagagctgcaggatagcaaggtccacctggcgcttccacccagaatctttttggatggcaatgccatagccagtggaagcaaagaccttcccactgccaatggtcaccagcttgcagccttcatctctgcctgccatatagttcagcactgctgcatcatagatgaaggcatccagtttcctgtacaggaaaaaagcaaacaaatccaatggaggaattttagaacaaaactacctgtggggccattaatatgaagcagtagggttccagaaaactatgtggagaattggttcaaagtaaggtttaagttggaactctgccagaatctaaagcctaaatcccaggctgttctttatgtgcttttgggttgaaaggaggagttcttttcttcccactgggaatgatgagaatgtaagttgggcctgaagccaactcataaactgtgtctgaaaggaagaaggagtaaaaagggatcaataaaaataataacagaaataatgaaaagtaaccactgcaacgagcaacaaatagcatggggttagatttatataacatttttcatttctcagtttattacagtctggagtggggataagtgtaggtgtttgtgtttcaatagatgtgcaatgctatttttgtggtcaggaaggttccagtattctgttgtgcaacacaaggatagaggtgaggggttgaggtggtggcagtacaggcttgtgtaagagcagatgagtgaaactacaagagaaagcaaaatacagaagaattcagatctctcaaatacataaattacagcatatagttcctaaacatataagaacttcattttatgtattgtgctttgcaaggcagaaatacataaaaaagggaataagaccaggcgtaggggcaggaaggcatgaatcaatatttaaaaccaacatttaaacatatcaaaggtagaggaagaaatttagatatagccttacaggcaatagagaggtctgcaagaaagaaaagcaacaccattattcccttcatttttattagttaagtcaccttgttaggtacccgatagaaaggggaacaccaaaaaaccaaatccctgatatgaatgagaacagtgggtgtagcagtggtcagactacccaaagtggccctaccttcaagctcaaattccatcttctgaaatcttctgtgactgtatttatggtgataaaatagaatctaacagtattttaagtaaccatttatctaggtgccttttccagacctggagctacaagggtattgagacaaggtccaagtgctgttagtcatcatacaacaaagaaaatcagctacgagaccccttgacctccaaatcccaacatctataatgctctgttatccattatcttccatagctgtggcttgtggaggccaaatgaacaaagggaccagtgtggctgggactgtgcaagccaacacatgtgtaggtcatgaactcctatgaatggacaaacactccctagaggacagagtatgttaacacaagctggcactggagatcagtcaacgcattcttactgttaattatctaaaaacatttacactttcccccttttatttctcccttgtccataagacaccagaaccataattttcacctcttggacaacaggtctttacatacacggcacaaataccttatccttcactctgccctcctacttctacatttatttcactcttatttcatggttacattagtgcaactagaaaataatttgtaaaaaaaatacatagaagtaatagcataggaatcgttgtacactggtctaaatgatacgatcaaatttaacttggaaatccataaagagcaaatgaagtcttctttaacattttatgataccaagcatggtatacctagtgcatgtgattcaatagtatgcttaataaatgtgagaaacagatcaaggactctgagcttggaagcagttcttaccctgttttcagggagagcaatgcatcatctacacccctctggttgaactttcccatgtaggcatgcatttctgcatagttattgcgaatatttctctctgtgctgccgttgggcacggtcccaaagcggaaagggggtgagaagtcattaggtctctggaactggagagagaaagacagatagagacagagcgggagatggagggagagagagagagaaaagtcattttagaaaatgtgaagagacattaagtaagttagcattagtggatttataatggaagggacccaactataattcaccgaatacattagccctcactcaagagcagcaattgctatctgaaagcagacttcaattcaattcaatttagtacatattgctgagagatttctatttgcccaaccctgactttaatctataacccttctatgttccttttatgtacactacacaataccagtgttgatgggccaaaggaatgtgctggtggcttaattgcagtgggctagtcacctttctttctaaaaaaatatgtaaaatctgtattcaggcctcttaaaggcctaaatacacagtcattgcactattttgtccatagggccttagtgaggtgagctatgtggtactcctgaagataatttgttgagtatcaaatatgttttgctaagaaattttcttttgaccttccctgatgcactgaaagctcatatttatcccacatgagttgtaggataaactgtacaatcaaagacaattttaattatgttccctttcttgcttgagactgagagtacatctccagtgcccattataataaagagaaacctcttggattttcatccctatgacatcagctttatttctggctatcaccctgcaatgcgtaagtctttatgttgcttcctgaacacaaaatttgttcatttgtatcttcacagcctcatatagtccatctcctcagtgccaactcatctgtctctctaggccaatttatatccgtttcaaaataaaactcaaaacaatttcttcaagaaatcttctgtgaattctttcttccatcaagtctaccccaaagtgacccatcagaacctgttattctttgtttagatcactgtaatcctacacatgcaattactctctaaatgtgctagctcgtctctgatgtcatcattaagagtttaaactctagattgaaacagatacggattgaagaccagctccgccacttaccactgtgtaaccttgggcaagtagcataaacgctctgtgcatcctgtcctcatttgtaagaaggagatgataatgcctaattttcaagaatgttgtgaggattaactaatataatgcataagaagtgcttggcggtcgggcacggtggctcacgcctgtaatcccagcactttgggaggccgaggcgggcggatcacgaggtcaggagatcgagaccatcctggctaacatggtgaaaccccgtctctactaaaaatacaaaaaactagccgagcgtggtggcaggcacctgtagtcccagctactccggaggctgaggcaggagaatggcatgaacccaggaggcagagcaggcagtgagctgagatcatgccattgcactccagcctgggctacacagagagactccgtctcaaaaataaagtgcttggcacagcacctggcacacagtaggtgcccaataaatgttctcttatattatttttaatttgtgtctctattctgcatttcctagtaaacccactctctaagcttcttattctattagtacagcaatgatcattgtagctgtgctgtgctttggcatcggaacgacaatgaagatatttgaagtcctcttggtttcaagtaatagtaccatttactttggagaaacatttgaaaatctaacctgccaactcaggagaactctgaagccttgggattgcctgggattagaagtaattcttttccttcttagaatatgggagttccatgggccacaaaatatctcagcaccaggagccataaatgccatcttaattgctcagtgctggccatggttaaaactagagtcatgccgtggtgttaggcaatctgtgatgcaccaaacaactactacttcctgactgagaaagctccctctctgactcatcacagggctttttgacattagaagttttcgtttgattattttgaaaggggttataatttttaagtggataaagacactacaaaagagtaagaaaaatctacagccaaatgggccactcagggttaactagcccaaacctttcatttgacaaatgatgaaacccaaagagggtaagtaatttgctccacatcacacagtggcattgatagctaacagatcagagctcaattcgcctaattaatagtcactcctcactgtctccagcagatagcaagcttaaagtaaatagggatatgctttattggaagagacagacaccagaatgctttgcataccactatcaaatacaacacttcagatgtttgaagaaagatattcctcaaatcaaaagtagagtaaataactatggtagatagcaatacaactaattaactccttttaatcagtaattccccacaatactaggacaatgacaactgatgtttataatgactaagatactctagggcccaaggtattttctgaaacatcagtgaaaattgcaatcatgtccaatacaattctggtataaattattacactttaatttttctgaaaaaaatggcaatccatgcaaggtatctgcaactaaattttatggtaactaaatggaatccagtgcccagagggcctcacttcctgatgaagctacattataggtagttttcatacagctctttatatagtaatttttaattttaaattatttttagatttctaaatcctgttttgtaattgtatccctgaataaataaaagctaaagaaatgataaagggtctagaatagccaagataactttgaaaaaggaaaaaaaagttaaaggatttacactacctgactttaagattcattataaagctacagtaatcacgagagtgtggcattagcgtacagtcagatcattggaacaggatagagtgcccactaacagagccccacatatatggtgcaagggccattcagtggagataggatggcctttaacaaatggtgttggaataattagacatctgtttgataaaaaggaacttcatttcacacctcataagatacacagaacttaaagtggatcatatatctaaaatgtaaatactagaattataaaacttatagaaaatataggagaaaatatttgtaatcttgagttagacagagatttcttagctacaacaccaaaagcacaatccaccaaaaaaggtaaacgataaattggagttcataaaaataagaactttttgaaagatgcagttaaaatcataaaaaagataagccaccgactgggaagaagtatttgaaaataaattaaagctattaaaacactaaaggaattagataataacatagcaagacttatatagttaaggcatccttcaaatgaaaataatcgggccgggtgcagtggctcacgcctgtaatcccagcactttggaaagccaaagtgggtggattgcttgagctcaggagtttgaggccagcctgggaaacatggtgaaatcccatctctaccaaaaatataaaaattagccgtgcgtggtggcatgcgcttctagtcccagctacctgggaggctgaggtgtgaggattgcttgagcccaggaggtggaggttgcagtaagtcaagattgtgccactgcacttcagcctgggtgacagagcaagaccctgtctccaaaatgataacaacaataataataataataataataatcaaaataatcagaaaaaccaagcagtcagtactgggaagaagggaagtgctggtttggaggcagagaatttggatttggatttcagctttgtctcaggccagctgcatgaacatgggcaagttccttaaatttatggacctaccctcttttctggaagtattattttaatgaataagataatatgtaaaaaaaatacttaatacctggcacatgatggagtcttaaaattcttagttgcttctatggagatgaagttctaacatttaaaattgtcctatgtaaggcaatgttccctaagtttgaaaattcttattctctaatttgttccttaaactaggccagtctggaggccaacagggagagaacattgcctcagaattagccaaagcagtgagtttgccttttcttttgaaaattcttgtcccagcctggtgagatctgtgaagtttacataaaacagagattttttatactgtcattggaacttgaactgtactaaaattcacattcatggagaactgtttagggaggcccgtggggaagaaggaaaaataatttccaaatatcctgatgcttccagaaaatgcccttgtaataaaacttaccccaagctgtaagacattatatggcacttgcttagcctgagtggcaatttgggaacgagaaaaatttagcgctgtcaagaaccagaatgtcttaacattaatagaacagtgaggaccctgaaaaaataatttttaaacaaatttaaaagcctaatatatcagggagctcagtaattgaattaaaaaactcagtctgatttcaaagtagggaaatgtgtatagtactctttattttcttttttcttttttctttttttttttgaaacagagtctcactctgtcacccaggctggagtgcagtgttgcgatcttggctcactgaaacctcaacttcaacctcccaggctcaggtgatcctcccacttcagcctcccaggtaactgagactacacatgtgagcaaccacacctggctaatttttgtacttttagtagagacagggtttcgccatgttggccaggctggtttctaattcctggcctcaagcgatccgctctgctcggcctcccaaggtgctagggttacaggcgagagccaccatgctgggctcagtactctttattaatcacctttggtcatagagcttccttgaatgtggaatctttttctaggagtcacccagattggaattatcaacacatagatttggataggaaaataacacagacaggacaggccccatttcatagatgaggaaaccgaagtcctgaagagatcaagtcgttccagtagacacagtgtagagggaggacaagctgagacttgacccctgagtatggccttccttttgccagctgaaatgctagctgaacagtcctactgctgcctactagggagtgaagccacacactgtaagtggggccacatagagtatcttccttttgtggcaaatcaaatgccaattcccatccttcccaccgcatttaacacagggcttccagcaattgcttgtgagcacacacttgcacaagggcaaaacaatgccagaatgttaaaagagctgtaatctcatttgatcctcctggagagcagcagggaatcagaattcagccctctgagctgttcagatcatctcagcctccatcttaatgacctcaaagtgaattagtctcagcagccatgcaaggagaaaggtgctcaagggccaggagtcaaggcccccacccagagatgagcagacactagggtcctgggctgttttggctgccacctccccgctagagagcttcttatacagcctgctggagaaagaaaggaagaggggagcaagtaagggaagtacggatctggtccatttttaatatataaattgattttcctatgtattaggcattgtaagtcattaataattgccactcttattcaatacctatgtatgtactgggtataagttacattatctcctttaactatgataattaaaatacatccattcatttggcaaatatttgcccagcatctattagggcaggagactgtattaggaacagagatacaaagatgaaaaaaatcagacccagttttcaaggagtttgcattacagagagtcagaaacataaacattcattcagtttttcatccatttactttttcatttcatgtatttattgatttcattcatttatataagcattcagcaagtatttgttggtgtttattgtgtacagaggagatgcctgtgctgaagatgcagtattgcagaagagtatgatcttgccttcaaagagttcacattataaagaagagaggcaaacagtaagcctgttttttatttttaaaatttctaaacaatcttttgtagagataaggtatctccatgttgtaaaagttggtattaaactcccagcctcaagcaatcctcctacctcagcctcccattcggttgactaaagtctgccagaaattatttgccactctatgacaaacaggtccatgtcccctccctaccttgattcttagctgacctaggtgacctgcttaaccagtagaagttgacagaagtaacattgtgggattgctgagacaagggcataagaagatttgcagcttccaccttggcctttggaaacctcgctctgagagaatcggtgcaccatgtcagaagtccaaaaaccctgaggccaccatgccggagattccacctataggtgctcccatctccagtcctaactgagccctggacttctacccattccagtcagagccaggcattagagtaaagccattatggactctccagcccagcctcccactgaatatcagtcatgctacatgaagtagaagaatcactcaggcaagccctacccaaatatctgacccacaaaccagtaaaatataataaaatattcttgctttaagccactaagtgttgggctagtttgctgtgtagcaataggtgacggaaacacagataatttcaaatagtgaaaaagaagtgctaggaagaaattgaaacagcataataggataaagagtgattggtaggagaacaagtttagactggctgtcctgaaaaggcctctctgagaaggtggcatctgaaccgagacctgaataataagaaagaaccagacatacaaagacaagggggaaaatgtatcaggctcaggaaacagcaaatgcaaaggttctgacatgggggaacaagcttggtgtgaccaggggctataaataatgtggcgggtgctatgagcagctgtgcccatgcagcagtgagagaacagaacaagggggctgtctcgatggtgtcccagagcctgtgcactggggctaagacttaaccatttaaacaagaggagcaaaatggtttctagatagagacgagtgtctgttcaaagacacaaggtggtgagaaagattgggcatgatcagagaccacgagcagcttattgttgccagagcctagcaggtatggccatggtgacaggaggttgacacagctgaagaaggaagcagggcctggatcacaaagaaagttgaattctgtgcaaaggagtttagagttcataatataagggatgagaaacagcagagcttctggagttaagctgcctgattcagatcccagctatgccacttgatagctgtgtgaccttgatcaactcacttaacttatctgtgccccagtttctacatttgtacaatgggctgctaatagcacctacctcataaagtttaagtattcaaccagtcaatctgggcaaagtattggcacagtgcctggctgataaatacactatgttagctattgttactatcattattactatcatcatcattgtcatcatcatcttcatcatcgccattggaagcaactgaagaactctgccagaatgacaagattgggtttttgtgttagaaaaagtcaccaggtgctggtgtgcagaacaggttgaaaggagtaagatggagagacaagagctgaagaggccctgagctctggtgagggtatgggtgctacagtcggataagaaggaacagacgcattgtcagatatttccctacactactagctaacatacaagaccacagaggtgcacgccattgacatataaatttcctgaaaggcttctagaaggaggctgaattgaagctggcagggaggatggattggctttggaagggtggcgatggggcgttaacatcaatttacaccagaggaactctctgctttaagactcctccaacctggttagcttccagggtgagaatgaagaaacatacttgttgagaagtctttaaggtcctggcaccaggagaggagcagattctgaaaacaaaaccaagaatgtcctaaatactgatggtgtcaaagcagtggtcgttctgaccaccagtcaaggccatctcctgatcagctgtcacccagtcccaaggacaataatcagagtcagatccggtgaataacagcacataaatgaaagcagctctgttaaaatgaagaggatggtgaggaactgccttcttgggtagttggcttccctgaaaaatggctctactcattcagtctgtgtccaatcagcatatgcagattaggacaaaccagtgctgtgaccttgcagaggcggatattgcacatcctatttgcagggatccatccatatgagatatagaatctgggggcttttgtcttcaaagcttgacaatcctacacataaatattcattccattacttctgattttacatttgcatcacaaaaagaatcaatgcccaaatgccactcagcccttccaggcacccaagagaaaaagtgggaaaggcttaggagatgtgaatggctttgggcctgggctaattatgaggaggtggcagcacatcagaattctgaagacaccacatttttacctactcagcaccctcctgttattattgtcattaccctattttatattttaatagtacttttaaattattgacttttattgtcatgaattttaaccaggtatggaatcttgcagtcaccgccacaatcaagacacaaaacaattccatttctcaaaaagctccctggtgccactcctttcaagtcacacactccctttgctcttaacctccagccactctatcccatagttttgccttttctaaaacgtcatataaatggaatcctgtagtacataaccttttgagactggcttttttacttatgataatgcctttgagattcatctccaggcctttgcatgtatctgtaggtcattccttcttattgctgagtagtattccattatgtgaatgcaccagttgatccatttatctattgaaggacatttgagttactttcagataattatgaatagagcagctgtaaacattcatgtacaggtttttgagtgaacatgttttcatttttctaaggtaaatattcaggggtgggagggatgagtcatatgccccatgctcccaaagttttttacagctcttctatcttttgatcttctcagtttttccaggaactatcaagcaagtacagaaactgacattatcttccttagcccaggggtgttgcaccaaaccatgttttccatcactaaatcttccataataataccctatggcccaattagggtgaagggatatgtatgtgtgattccagactctgggcagcatctggagaggggaggaagtggctgcaggaagcaccctctctcctcttctaccataatcccttgtcgggcccagtgggagaagaagaaggtcaggtgaccacacaaggagtagactttctgagagcatgagctccttcactgttccatggcccataagtgcttgggacagatgtgaaaaggaggtaatctgtgcttacagtgaaaagacaattttagccaggcatggtggctcacacctataatcccaacactttgggaagctgaggtaggtggatcacctgaagtcaggagtttgagaccagcctggacaacatggcaaaatcctatctttactaaaaatacaaaaattagccaggtgtggtggcgcatgcctgtagtcccagctactcgggaggctgaggcaggaggattgcttgaactcaagaggcagaggttgcagtgagccaaaatcgtgtcactgcactccaccctgggtgacagagtgagactttgtctcaaaaaaaaaaaaaaaaagacaatttattgataaaacgtaagtaaacacatgggttatgggctcaaagatctaagttcaaatctgagctctactacttattaactgtgtgactcaataaacaagccacttagctttgaaactgaattttaacaatgttccaaaaggagaaataaggtatagcatctcactacaaatcctccatctcaaaacatggggcctggagtggccccccaagaccctacccctaaaacaaactggctgtggatatggtgacagattagaaagttaaacccttcacctccatgaaagaatctggaatggaggtaagaggaataaataattattgttatatttcattataaagtgttcattggagagaatattgttcaaattcattcaaaaggcatggctgaattatggaaacaataatattgcagaatgtagttagaagctaccggtatataggaaaattgcccaaattaactctgttctcttcctgggcccctgatgaatctgacgacattttgctactgccaaaaagggagttggcatataataagcattcaacaccttaattgtttctgcttgttttcctcttattattaacattagtgctataattgcctacagtggcaaacacccttaagtttacatatgaagagacctgcacttggatgtgagaaggctggtaagtggcctttctcctgcctctggctgtgctgtcattcgaggctgtatcttcacagctctggatgctgtgctgctggggaaggaattttgtgcctctctgaactcaacgtggagctggggttctataataggtcttagaagggtgggggtggtgaggactggaacttattctcctgtcatcaccctcctgctggagccgaaacaaaagcttgcagcaaataaaacaccagttcttcagattcctggaatttagttaattaccagttttcctcgcaacgatggttttaatgcaataaggcagtcacttcttttgtattttataaaatttggatacataagccttaatatttcctgaaatatttcataaaatcagataatggcatgttagctagctgaggcttggtccctgagttagcagagccaagaaagtgggtttattcctatattaactatattaactttaacatatcataacctgcaccttgaggttttaagtgtttggcaaagtcttgtgtctggccataaaatatcacatcagtagcacacatttaaagggcataaaccacatataagccactgagctctgaaataaaatgaggcaacagatacaatccctaccattacagtttagctggaaataatgatgatgataattatataattccagcagcagctaatgcttctacagcactcaccatgtgtcacataatttacgtatagtaactcattgatcctctcattgatgctatgaggtaggcattattatctccatttaatggacagggaaactaatgcacagacagtaagtaatttgaataaggccatacagctagaaactatcagagcaaggattcaaatgcaggatactcatatttaactgtaaaacacaccacagggctctatgcaaatagaatggatgctcagaaaatgtacagattaaggaatccagtgcctgaattagtatgcctatccaatgggaggtaaggaaaggaagggctacggaagtttagagggagtgaaaatcattacaaaaggatatggttggggaggctgcacagagcaggcagagatggagccaactcctccagattggccaagtttatccaggcaaagaggtctggggagggtgatggggcaagcgaaatagcatgagaaaagaagcactgggacgtgagcatggcatctgcactgacgttgggaggaatgtttggcgcctagatagaaaccatcccatggagcacaccgaatggtcagactgaggaaggacactgtgaaccccacagtgctcaggtgtagctattgttcagctaaagcagcatggctcgaagaacagagaggttagagaagggacgtttactggaaaactactaagagcctggactattttcagagggaaaataatgggagggataaatgaaaaagaaagacatcagagtggaagccttgactgaatccaagtctgcctatacattcagaagaacgaaggagaggaagcggcagagtcagcctcatccccaccaccttctctcccactctcctccctcacccactcctcaggagccacactggcttcctcgcagtttctaaaactcaccaggcaagctcctaccctcacatgctcttctctgccccaaaagccctggatatccacatatattgatccctcactaactttgggccagacttaattgcctttttattttctgccctttcctccttagaatgtaatataatggacacagttttggtctgttttgatcactgctgtatctctagtgcctagaaaagcatccaacacttagtaagctctcaatatgaatgaatgagtgatttaaagaatgaatgaattgaatcgcacatgtggatatatttattatatgaaaaactccattcaaagtgcactatttagctgttgatacattatcatgcaacacacagttgagcattaacattcctcagatctagggcaagcctagcatctctggtgaataaggagttaatgtgtcctaatgccagtcaaggacatctttcctggcactttctccatttttccttcacaaaatatatcagatctgaaatcccgcaagagcctgtcagacttaggacttgacaatgcatatgaatatttctttggcaccaaaaatgtgacagagttagagatgattatgataacatggagatgaagtgaaacagaggcataaggacagaggcatttgagttttatccttaagtcatcctgtgtgtgacaggtggccttcgttgagctccttcaacctattcttacacaagattgttacaaagaggtgttattactgtccactgcactctacctcacagaccaacttgggagggtacaagggattgttccagatattttataaaagctgtgggtgctagcaaagagaaatggcctttaaagaagctttcaagtaaagaagacagatggattcaccatggaaactgggattctgaagttgtaccaggagcttcagcagctcataaaattttggaggagataaagaagataaagaagactaccaagatttccacatgcaagattcccaatgaatttagggttctccagttattagcacaatcacctgaggttctaatacggtatcagcatcttcagagtcatgaagctggggtggggcggaaatgtcaaagacctccgccaggcggaggccagggtgagtgaggatccagtgacaggcaaggcagggggacaggtgtgtctctgccctcctggcaatcaatcagatctgtcagttccaaattgaggcacggaaatgccagcatgtgtacttactgtcacattgtgacccacttacagcccagcagagcttcttcctttggtcaataaagtcagccctatgcgagggacactccggtttatggaatgttagtattgggatgcagcctggcgatcccaccacgcacactgcatgcccctcggggttcacaacggaccatcacaggagaggactcgaacaatcctttggtaaagaaacttatgtaaccctgacacagcatttccccaaacttattttcccatggatttctttttctcaagaatagccattatgtttcccagaacactcataggctatgaaacagtttgagaaatgccagttgagcaactttctgcctgtacagaggaggaaacagaggcctgggaaattcattacctatcgaagaccaaacagccattgtctgcttctgtctccatctcttttgtttttaatttagtctccacacatgtattgagtacctactctgcaccaggagctgccctgaacagtcgacagcaagatacggcagacatttccatgtctcaggcttttaggactaatgggatgccagtgtacttcagttgtccttaatggacctccaattataatgcaaacataattattataaggtgactgctacaaaagtgaaatatcaataaccatgttggtagaaaaatgaagttcaatttttccagttgactaagggttaagccaaaaaacttactttcaacccttttgatgaaaatcattctaaactatagtcattcaaacatattcagtgagcatctgctatgtgtcatgatacagggaggtaaatgatatacagaaattaagacacaaaagaccatacatggtttaggacattatgtttactatgtacttattccaggaatatcctagaaactgtcattacttttaataatttctttatataagctttctttgttatcattatatcttttcccctctaaaagtggcaaggggacatagttattttagggttggttactttttgttacagaagcgatattttcctatgaaaatagaaagttctcagcaaacacttggctgactgggaagccgatgcctcaccattcaaagaacagggcaggcttaacacatgcatacaaggaggggactcctgtgcctgtctcacacaggagccgaggaataatcaggggctttgaagaagtcattgccaaataggtcctgaaagaactttataatttaagatccgacaagccacatagcagcacagttggagacctcacttactcagttctcttctgaaatacctgcccgatttagatggtgtgacaggcatagaaaccacaaggtgagaaaattctatctgggattctaaatgtcaaatatttcttatctacattaccctctcttccttccccctcaaccattggtcatgaaactatctttcactgttctcaaattcacatggctaataaagagtgaaaagtactgccttatgctgtggacactatatgaattacataactgtcttcttattcattcattcattgactagttggttaattaattcatctattaatatgtgagcacctatatgtacgagaccctattttaattactgcagatccattagtgaacaaaacagacaaattcttgccttcattgagtttacagtctagtatgaagagacaattaaatattataaatatgttaaatattaatatatcacaccatacaacatataaattctattaacatataaaaagatggaaggacagagaagagtaaactttctttagatcctcttccaaattttagatcagatactcatctggtggcctgaacttagactggtcattccctggaaacccttgtctttaacaatataccactcgtaagcatcttcctctctgagtctagccccactagcctgatgtacattttcttttcttttctttttatttcttttttttttttttgtattgtttttgtttttgagatagggtcttgctctgttgcccaggctggagtgcagtggcacaatcacagctcactgaagccttaacctgggctcaagcgatcttcccacctcagcctcccaagtagctgggactacaggtgctttccaccatgcccagctaatttttaatttttttgtaaagacagatatttgtcttgttgcccagcctggtctcaaactcctgggctcaagtgatcttctcacctcaacctcccaaagtgctgggattataggcatgagccaccacacccagctgaattttcagaagaacaacttcgagtttatgtcggaaaaacatattaacatttattttttccacttaaaatcagaagtcctgtttcatcccaggcttggagcagacactttttctagagtaagcaaatgggctgaagaaatagtattactggtataatagcttgcctttgatttgtaacagatatttggggaaatattctcgatgagtcaatttcacacctgtttggttggtgcaaaagtaattgtggtttttgccattaaaagtaattattttttaatgacaaaaccgaatggcaaaaaccgcgattacttttgcaccagccttaatatagtttaaacatgcaaattagagggaaacagactcactaattgggatacttcctcacctacctagtgggaagttactcacaaatggtcttattgaactccatgataattctatcatgagaccaggccactgaatccttttcatggtctgaaatgtgcatctcatgttctctttgtcaatggattacagagaaggtagcctacttcaaaattcttgaaattccaaggcaggagctaattaacaaatggaaaatgtttctaacctacagcaaagaatgctgtaaaataaaacgtttctctttcaaataagaggctccatcactaggcaggtgagatacttagtgaaaggatagacatgaccagttgttgggagtgtggggcaacttattaaacacacagggaagggtcttgttttctttaataacttaagtgacaggatgaaaaaacctgctctttaaacctgctgtaggcatcaaattggattggatggatggctacttgagaaatagaattaaacatcaaaacagtaagtctggcctgacaaaagaagatattaaaaggatgaagttaaattaggaagcatacaaaataattcttacaggatgtaaaaccacactgcactagaactagaagggacaggaacaggctttgtcaaatgcatgctcaagaaaaatcatgcagttctacctgaccacatactgcatgcatacataatgcagtgctgcttttttaaaataaagagcctgtcactggacgctaaagagcaatatgtggaatggatgtggtcaggctgcgttatacaccagtaggagggcttctgaccaccgtgtgttctcttccataactcacagcagaaggttcagaaatgattaaaagtgaggggagcaagtcttcttgtaaaagattaagactatatttagccttgaaaggagcaaaagaggaaattcctctgttgtatttaccatcctattttttaagaacgaagtgtctgcctccctcactagactctgagagtagggctgtttcagcatatctccaacgtctcacaaggtagggtttccatgacattttgggacatacttatactaaaatcatattcacaatttacctgaaattcacatttaactcggtgtcctgtattcttatttgctaaatctgttagctctattcaaagattaactagtaactattcaataacgattaagctaattgttgttatatactaggtattattttaaatgcagaggatatagtaacttttaaaagccaggtagatgatacaacagaggctttagttaattcaaagaaatgaggacaggagcaggattttggtaacaggtagaatccaagttgaacaaggggcttacaaggtgattgagggtggcagtttctagagactttgagataacaaaacagagctactgatcttttctattctgagggcctctaggccttagctataggcagtctggcagatgctaaggactcctgagatagactaggtggttggacactaaccttagtaccaacaaaaagatcagagattatgtttatgcagagctgttctgattttcctgtactctattccagtaagtgctatgtagtatttagaatctatctgatgaatgaataaatgaaaagtaggcggtgagactgaaaagcaatgaaactgacttgtatccctcatttagagaacatcattacattctacttgcaactaacagatacacaggataagtcacattaatagctagtatgctttaagaatgaatttgccaggaaaaaccctatgtggtatagaggttggaagacaagctctctgggctgggaatggagaagaggagcttcaggaactaaaaccactgggactcggcctctcccaaactcacatctaacttgaaattactatgaattttccaaatggcaaggggccttcagagagagtatttcctttaatagtggacagattatgatagactatcaactatggcaataaaaacaactttattgctaaacacagtagtcaaaatgggtattaattaaaaacttagaaatgttataaattatctggctgcatcaataatttgcaatgaaactaaggctcttctctaagtctctgagagagcttgaagtagaataaattaggtttactttttctgagtgtctgaaggaacagaaaattctttggcaatatatgccatgcaagcagggaaggccttaagaaagacctagtttttaaatttttatttatttattttattttaagttctgggatacatgtgtagaacgtgcaggtttgttacataggtatacacgtaccacggtggtttgctccacctatcaattccccatctaggttttaagccccgcatgcattaggtatttttcctaatgctctccctcccctagccccccactcccgacaggtgctggtgtgtgatgttcccctccctgtgtccatgtgttctcattgcttaattcctacttatgaatgagaacacgtggtgtttggttttctgttcctgtgttagtttctcactagtttgttgagaatgatggcttccagctttatccatgtccctgcaaaggacatgaactcattttttttatggctgcatagtattccatggtgtgtaagtgccacattttctttatccagtctatcattgatgggcatttaggttggttccaagtctttgctattgtaaatagtgctgcaataaacatatgtgtgcatgtgtctttatagtagaatgatttataatcctttgggcatatacccggcaatggaattgctggggaaagaccagttttataatttgcccactcctgtgagaaaccatttccttggggtagagcccagtagtcaggtggaatcatagttgaagctcactcttgaagtcattgttttctaccacagagatgggcaaaagacacagattcagaaatgctcactgagcccttactatgtgcctaggaggatgctgggagcatgctttcaaaagacccacaaggttggctgcaaagaggtactaggcacctcttgtctgagagggccatgaagatgctcttcatccaggcatcctcggagccagagctagtttcaaggggtctaagcactgcaactcgcctgctgccccttccacatcttttttagccctgacgtttgaccttccctccaccagccctcctactcccacctcaaaatctcactgaaacaagtgagtgcctggggcaagcagggtggaaggagggctgagtggtgggctcttgggtgtatttgtagcagtttgtggctttcagggcacatgttaatcatctgctagaaacagcgtgggctttgtgagctgggtttaggagcgaaccctgggtggatgtaggacgtgaccactaatatttattgaggatttagcatgcttgaggcactcttctaagctttacaaagagtaactctttcatcagcacagcagctataaagtaggtaacattttaatccccattctacacattaggaaactgaggcatgagaagggtttaggaacctagccagatcacatagcttcttgtcttagttttctctactgcacagtagaggtagcatctacctaaaagtgggagatggcaaatgagtcaaagaatgtaaagcatctagcctggagaatgccacccagcagtcactaatgacaggtatgctctctgagactgtaactattgatgtggtttcatgtgattaccatgaatgagggccatggttgctaatattgcaaaagaacacataatacaaaggttaatatatttttggctttggactgcaattttcaataggcagactccaacctatgaacacattgtcctcaatagttcatttataaatcagctgctcacaaacagaaatatgctgcccccaagaaacaatactataagtggttggctcattaaagccaatttaatccaaaagagagcagaacttttgtgttaatattattagcttatgttcttggaacatttactcatttaataaacttctacaatgtaccaggtactgtctcaggagctggaaagacataattattgaaagcatgtctcttgcctcaaggagcttatgattcagtgaaggaaatgagcacttgctcaatgattctagtggagggtgacgggtgtgtttgggccattgtaggaggacaggggtgggtgtctggggtgtggagtcttgataagttgatagaaacaagaaagaggccctcgctggcaggaacaggaatgagggtagaagagagccattgttctaagaagtggctaacaagctattgttgtaagaaatggctaaccacaaacatcctgttcccaaatacctccttccaaacagccccagcagcatgaacctatctgcagtagcctttccagcatgaccctataaaactcccctccatcccctgcatcttggcagacaggcttctctctgctgtactgcctgttgcactcttgcaatgcacctttcttagtttctctaataaatctgcctttctttacccacaactgtcttggtaaattcttttaccacctgtgatgtagccctagccagttgcacccatgacatgggggtgacaaaggccagaaatgggtaatgaagtattggaggaaaggaaaatgaattgcatttgcttgggttcagagctggcccccatacttcatttatctatacctgtactccacttgctgagctctggtgctttcctaacctccttttggggcatccaagcctgacaccccctattttcacatccacaaaatcaaaagccctgttctttcggtctaagtgatgacatctaggtgttaaaaggaagataatttgaaaacaatgtcttactgatgtgtgattaaacaagcattcaacttccccaaaattgtttttgttgtttatataaagggttaaactggaagtttaaatacataaaagcatgctaaaaaaatgtagtggtcatgaaggccactttacatgggtcatgaaggcccagtttacagattgccttgggaactattttaagtcattcctccttctttactgaaccactaatttttcagatgctgtaaggataatgtggataggaagaatcaatatcatcagaacggccattctgtccaaagtaatttatacattcagtgctatcccgatcaagctaccattgactttcttcacagaattggaaaaaactactttaaatttcatgtggaaccaaaagagcccacatagccaaaacaatcctaagcaaaaagaacaaagctggaggcatcatgctacctgacttcaaactatactacaagcctacagtaacaaaaacagcatggtactggtaccaaaacagatatatagaccaatggaacagaacagaggcctcagaaataacaccacacatctacaaccatctgatatttgacaaacctgacaaaaatcaagcaatggggaaaggattccctatttaataaatggtgttgggaaaagtggctagccatatgcagaaagctgaaactggatcccttccttacaccttatataaaaattaactcaagatggcttaatgacttaaatgtaagaccaaaaaccataaaaaccctagaagaaaacctaggcaataccactcagaacataggcatgggcaaagacttcatgactaaaacaccaaaagccaaaattgacaaatgggatctgattaaactaaagagcttctgcacagcaaaataaactatcatcagagtgaactggcaacctacagaatggggaaaattttggcaatctgtccatctgacaaaggcctaatatccagaatctacaaagcacttaaatttacaagaaaacaaacaacaccatcaaaaagtgggtgaaggatatgaacagacacttattaaaagaagacatttatgcagccaacaaacttatgaaaaaaagctcatcatcactggtcattagagaaatgcaaatcaaaaccacaatgagataccatctcatgccagttagaatggtgattattaaaaagtcaggaaacaacagatgctggagaggatgtggagaaataggaaggcttttacactgttggtgggagtgtaaattagttcaaccactgtggaagacagtgtggcaattcctcaaggatctagaactagaaataccatttgacccagcaatcccattactgggtatatacccaaaggattataaatctttctactataaagacacatgcacacctatgtttattgtggcactgttcacaatagcaaagacttggaactgacccaaatgcccatcaatgatagactggattaagaacatgtggcacatatataccatggaatactatgcagccataaaaaaggatcagttcatgtcctttgcagggacatggaagaagctggaaaccatcattcgcagcaaactaacacaagcacagaaaaccaaatatcacatgttctcattcataagtgggagttgagcaatgagaacacacggacacagggaggggaacatcacacactggggcctgtaagggggtggggggctaggggaaggatagcattaggagaaatacctaatgtagatgacaggttgatgggtgcagcaaaccaccatggcatgtgtatatctatgtaacaaacccgcacattctgcacatgtaccctagaacttaaagtattaaaaaaaaaaaaagccgctcacatggaggtgccagtagtgccaagtggaagggcagaagtggagtggctgcttgtctaggccatctgtaacctggggaaactcatcttggagcatgggtgtattggataacgtgtgatttcagggcatttccaactgagagttgaagttgcattataaagactttcttcaaaaggagctggagaactgctgtgcttcccaataccaaattcctttttgccccattccaaggcaatgctaccacagctgcctagcggaaatgccccttactactgcataaactgtctggctcacacagagtcccagcatgacaattacataattgtgttaaaagcccctttttgattacctgggtttgagaggtgagattgaaattccaagaggagattctgaaatgttggggcaaggtaacagggtgaagcagtcaagagagaaataagtcctgacaactgtgattactggagaatgaaataattcttgctccacatagagcaggtcctgaatgaatgaatggctgaatggtacaggtctttttcaaactaatctcatgatgtgaggtcttagtgtccattgatttcttcctgtgtgtgtgtgttgatcgttctcatgccctttgcctggtggatcctgcctgcccttgactacaggtattctgaggatcgatacatttgtgaccatgccagaccctgtgcttgcagatgtccaccataacctgaaaaatgtacttatggttgtcagaccacagggatatttaagaaatcaagctattctgcccatactgtttggactccaaattatcccaaattatgtcagacccgggggtgaccttctatatcaggggccaagttgcaccaggtaatggtgctctgggagcaccctgtctggtgctgagaactggcattgactttgactctgcctccatctccacttgatgccttctcagccttcttgcctcagcatcagagggttaaaacaattcctctagcagcagcctctcctcattagcaacctggaatcattgcagtgctgaaggctgcattgttcttcagcacttgaatacaatttgcataacgaggcaggtgagagcgcctcttgcctgttcaggcagccctgattggcagagagaaagggatttataggtagttggccacaattaatttggtgtgcttttaaaaggataaaaagaaaagcagaaaattgctcagtgctccaagtcaaaaccacatctgtaccctatgtggtgtatgtgctggtgtgtttgcagggatgggtgggtgtgtcatgtaaaggcatgtgagttaataaccttgtgtgttcaagtgcattttttttctgtaagaaaaaaaaaaaaggctcacttcccagaggttcctgaaccccagaggtcctcagctgcagagtccttcatgacacaatgctgttagccatcttgttcaatttgtatttgaggccactcacagacatcattagaaatcacagtattctttcttcagtaccaggataacacccagctcaacatctcttttgtacccagtccaaaaaaggtggagtcccagctgcctcagggtctgttggcaatcagttcttgcaagaaacacagctggctaatactttactcagaaaactgtggtgctagtgataagctgggagatgtgtagaggagtttcacagaattaagcatttaggaaattaataccaaggtggtttatagccttaagctactcatggtcttcttgtcacaagtacttcagaaactaaacactgctcttgctctatttcccttctgagatgaggatggaggggtgaagtagggtgtccttccctccactccatttcttccctctctgccttttctacttttcccataaagggaaggttgctgagagtgggatcttttcctttgtagctggattaagtaaacacactggttactgcctagcagagagaaaacatgacacccaataatattcgatgtctttttgattcattcatccagtcaactctcattatataagtggttcttaaatgtgcaaggggctgtatgtgcacaaatgaagaaaacaaacttcgctggaaatactgttggttagaatgaacaaggtctcttcaaggttcctgtgcactcacagctggataatgagtggtctctggctggagtcccattatcactcctttgagaatccaagaagccaggccagagaaggtccccaggacagaggctttattagattctgttgcctcaggccaatgcctctagaagcatgccctactttcctgtgtccacacaaagaagacacagggctctggtaggcagtatcacaggggcagatgcaggctgtggggtcagctctctggatcaaatcctggaaccctcactttctagttgtgtgacttaggtgaatttgcttaatccttagatgactctcctcatctgtaaaacgatgttaataatggtgatctcaaagggtggacataaagattaaaagtagtgaggcaggagaatagggtctggaggaagggaacttaaggctgaatcaaggaaaaacatcaaggtctggaggcacggaatctaaggccaatttgcactgacttcccaaagctggatcaaaaagaaaaaacctgggcctgggggcagggaacctaaagccaattaacgcaaacttcctgaagctaaaccgaaaggaaaaaccccatctcccattcccagtagcaaaggatcaaaggctattctccctaccaacctcctccttccaccaagtctcagatggaaaagggagagtgccttggattggccctgggccaagcggggaccatccctttatctgcatagggcaccaattcacctcagtctttagttagccacagaccaaatccttcatccagacaaggggtagccaataggaacctcaaatggggtgcttaaaacccagaaaactttgtaaccaggcccttgagccacttgcttgggcccactcccaccaggcagagtgctttctcgctttcataaattcctgcttttgctgcttggttcctgtgtttcattactcggttactttgtgtgctttgttcagttctttgttcaaaataccaaggacctggacaacttctggtcaagaccctccatcggtaacagtagaaccatatgtgaagagtttaatagtaggcttggcacataatatatgttcattacatagttcaataataagggcagagagaaataggcaggtttggccccaggaatcccagtggctatcatctagccaagaaataaaactcaacgtgatgccagctcttacagatcctgcattcattctagttgttctcctcccactctagggtggggtggaaggcagtggtgtcagggaaaagaggagatgcagaggcaggaaagcacttccttggctggcaccgcagtggtctggcattgccactccctaggcatggcagatgtcctccttgccaggcaagttctgggctccccagagatgctctcaggaagaacattggaccaacctcagtgcagctggtcactcacatcagtccctccagcttttccactggacagcacccctcctgactctatctgttgcagttgccttatcttgggaagaaaggcctttgggcagggagccttgaaaaacacctccctcgacctcaggcccagactgactccctccttcccatatggcctcatctggtcttgagaaacagatctatctggccattgtggggagtatggcccaccagccagggaccagttctcaccaagacctgtcaccttcagtcttctcaggtatgggtcaaatgccagcccttctccattctaactgcagggggtggataccaagctctctagatgacaccctcaaagcagcttcagtaggttaaaaagtacagaaaaaagaattccacagccttccaacagctaccccaccccctccaccaccccaaagtagttttctctcacaatccttttcttacttttgatttcctggctacctccttggcagagtagtgccacacaggtgggagcttttggcacctgtacttttatttccagctggttggagagagtcctacttggtttgaaagggttctccagataattttgatatcaatgaactgttctaccccaccacttccctggcagctactccttcctgtgcactcccaaacagaaacaacttctggtactgactagccatgtgctttttaaagtgaggacccgaggtcttgagcctcctcctcctgacttcctcctggagtgatggctgacaatccaagctgctccgtgctgagggagtcggcttgcctgctcgttttcttctctccactctggccattctcaggatcatgttggcctgaagccaatgctcctgatgctctcgatcaaagccatcacctgagtggcactggagtaaaataggagaggaaacatccgagactatagtgttttcagagtgtcagccacttggtctttaaatggctctctgtgacccatgctggacaggaaatctcgatgtggaatcgtaaactaaatggttgggcttccctagcctcagggagtctcaggcccccatcagccctagcatatgcccagctaggccgaaaggttccaaaaatatagcaggctgcacaccttttccactcttgccaccattacagctggaggcaacaaggctgaaacacaaaagcccagagcagccctggccacaatttcattgtgaatataattctgacatctttaaaacctgactcattctaggcttgatgcttttggccacatataaatttccatgctgcattaatttgtctcaaaggactcgaacttagttgttcagaagtgaaacattaattcttaataaattctcaacccacaacccacaatttagtgaacttataaaagattagccctccccgtactaaaacattgataatttttttgttattaatcagaaaagaatgttggggaactctcctattttatgtaactaaactttcgaacaaagcaactgccttcaacagttagctaaatagaatagctctcttatagaaacagagactaggctgtaaatagatttgaaatttggtgggaatcctcagagccacctgctcctccccacctgggagagtcagtctgactgggagaggccacatagggaagctatagacaaattcaatgattccaacagttaaaagaagtgctcactagcctctcccacatccagaacattccaaatctgaaaggacaacatcccatgctgtgtactttgatttttgttaattaaaattgtttgttgcctatttttggctttaattttgggcctagttcaattcaatgcaggtgacaaaactgtgaattcagactcatgctagtttgcatagttgcattaaaaagtcgtagttccaggaagcctctggtcctctaatatcttgcatagggatacctttctaagaagggtaatacagagcagatccaggacagcgttggcttctgattacctccctccctcccttccttccttcctctttcccctcatactctctccatctgtctccttccttctccttccttcatttcatttttgtgtttcacaaaaagatgagtctactaatatcagcagaatgagacaaagccaaattctttacccaggtaagaaagacaaactttctgatatctatttagtaagtcttctacgcacatgggaaacctgtgttccttgtgcagctttgtgagtgctaagttactatttatccagttatcttggtacctttatgtagtcttggagggtagggatgtgtgtgtgcatgtgtgtgtgtgtgtgtgtacatttctgtgtaacaaggaggataaggctacaagaagagagaggacacctgtttgcttttgatgagaaaagagttccctgtgcctgatgatcaaataaagtatcttccagttctctgatttaaacaacatggcacagtctagaatatgagaagagtgcattagtgtttttctgcacaaaggaattgtgaaaatgatacatctcacagaaacatgtcctcaattcccttcgataaggacatcactactaaaaggcctcgtagaaggtagtggggaagtgtgcacataagcagtgtagtacgtattgtgagaaactaacattaatccggctcaaggacacagcaaaagggagcacacaatgacactcaggttttgtattgtctccctaaaattaaccagcaaggagaagactgcctataaagcatgtctctgcaaagcttcagtgcaaactggatccattcttccaggcaaaggagaggggaactgaatctgatcccactgcaagaaatactcactttgaaaggatggggctgggagactgacaatgcaaatcgggacaaagaggagaagcactgaagtctaaaggatgcaatgagctcaaagtgcagattacagaagaagttgtgaaggccttgtattaggtccctgtggcagccataaaaaatagccacgaacagaagcttattctcacatagttctgaaggccagaagttccaaaacaaggtgttagctgggcagtgcttcttccaaaggttctaggggagaatccatatcttgcctctttcggcttctggtggctccatgtcttcctgtggctgcatcactcctgtgtctgcttccatcttcatatggtcttctcatctgtgtgttttctccccttctgtgtcaaatctgtgtctgcctttttcttataagaacaattgtctttggatttagtgtctacctggatagtccaggatgatctcattttgagatctttaacttaattacatttgcaaagattttttttttttttctaaacaaggtcaatgtttgtaggttctaggggttaggatgtggctatatctttgggaggatacaattcaacccacttcaggccccaacaaggtagtagagcttagaggtgaggaatacagtgttagaagtcataggaaggcaagaagcaggtggtcgttcaagggaaagagggtcgttcaaggggaaggggaccacaaaaggggaaggagtaaaaggcaactgtgaagccttgctaggaacccagtcatcaactccgggtcatctgcccctcaggacttggagggtgacccactactaagccacaggatgttgaactgaagttaaggatctcttgtctcagtaaagatggattcaggaattaggacttgggggatacctgttggggcatatagcagacccattcttaaataatgccagataagaagtgggggtagccaaccctgatggacagacctggggctagccaagccccagggatctgttctggacccatttggatggaggtcaccctggcaggaatgaaggaggctcagcgcttgggacagcagtccatggaaagggccagactggctctgccaattaagagaacaaaaggcaagtgtcctcccccctctcatgtgcattctgtacctcagacactcccaggatttggggagttttacatttttcagatctgctcttgatcagtagctccaagaagaatagttgcctgacaggccaagaggactcccatgcatgaatcatacccttacattttgctcagctacctagaggtccaacccaggccctcattactagctccctggctagttggtcatgactgctactttctcaattaagttatttttagcccagtattccatggtctgagcgagatgttctgggccaggaaaagggtgtgacagatcgggctggaggttggctgtctcctgctggcttccagcctaaagttaatagggcaggaaaataaatttgtgcagtggaaagcatggccccatttcctcacacatgctcaacaaccactcaacatttcagggtagttgtggagtaaatttgcttatcaccaggctgatttgttccagaacgcatatttatttacttgcctgcatattgatttaaaagtcatgcccttcctatatcccaaaagaatatgaagtgacttccagacccccatgggacttcttggaaacccagaagactcattattcatttaggtgttacgtggccatcctgattgtacctccagtgttgcaggcaaagatagctaccctcattaagcagatgagcacatttttgacatttgaaagttaatcaaactcctctacttccttgaggagaagagctgcaaaatatatttcaggcatgtgtcacaatggtggtaggaacgtgtgaaatcgtttgcagccagataccctggagagcccaatggtcaaacagcaaacttctgtgactttagcagcctccacctccctgtgggcttcctccaatctgaccccagaccccactgaccccctaactgtcccttctcactcctggtgccaccattctccaccatccaacagtagcttaaagctaagggtcactctatacacaggctaaagtcaatttgagggccattagcctgcccaagtactggaaatcaccattcttctctatttaaaataatgtctctaaaaggcttattaaataaagtgcaaatgttacaatactatctatctaattattatggctcaattaattagatagctacatgttagtagggggaaaggatctaacttgttaggctttgattgataaggtagataggaatgtaggaagaaaagtgaataactggaaagagcatcaaatagcatcagggtctaaacagggtggcacactgttcaggggctatagtgagccaggaacaccataagggcaaattatttaacctcaccaagcttcagttgcctcatctacaaataaagatattaatagcaccattatataagataatctatgaaatatatttggcatgatgcctggcttgtaagagctgaaaaaaatcttacctgggaagttatcgctgaagttatattattattaataataataacaatgataatcattattagtagtagtaatagtagtggtggtgttaatgtgccctgttaagtggaatcaaggcattacattaaaggatagggaattaaataggaaagtgggggcaggggtgtcaattccagtccttatctatgtcacagctttccctgagattagctacaggagaagcaccctggcagagtgattttggagccaaatacacagggactcaaattttggctctgtcacttgataatgtataactttggggaagttactagttttccagagtctcggtgttcctatttgtaaaatgagaataatcatacctgtgtgaagactatccaaatagcatacacagagcatacaaaatgtacctagtgcccagcaaatatgtccccctccctcactggccaagctctttttccttcatactatggttggcagactgcaaaatgagaaatccatctggatgggtgagaaatatgagaatgcattgtgggctctttgttaagagaagaaagatgtcactagctcccttacaccctcctcccactgggggagctgatggaacgtacagtcgggttgctgaatgttcgaacttgcacccatatttaggtacagcatgtagtggaataattctgaattcactgtaatgtgctaccgcaaaatggaagccttccagtataaaggagtacaaaaataggttttcatggaaatttaactctcgttttctaccttaacacaaatgaaatctgagtacatttttttctgcaataaagctgaagataactttttaaaaagctataaatcgaatggctacaaatatctttccatcatcgctccaagatatttatcacttgatgtgagttatatggaagatacatcatctgtaatagtcaaaacaagtttaggaacccttctccattttaaatgttacttccttgatgaaaatctaatcacattggaaaataatcttcaaaatcatctcatttcttttctcaacattattgtttgaatgtctttattctttttctaaattcacagaatatacttcctctcatgcattaccataccctgtcccaataatttgttttctttaggtgttagactgtaagtaagtaagactataagaattttaacattttaagtatattttcaggaaactctctttctgatttatataactgtccatgacactgatatgcagtcattagttacttaaatgttttttataattatgtaaatcatgttgacagattctggtagggtgcttacactttactgttttgtcatctgcaaagttctgaaatgtatcagaaaaccatttacaaagtaaacagctgttaaggggcacttgctgacttgttgctttctttgcctgtgattctgggtccgttgtttttgccaggggctcttaagtaaatacaacctctcttcctctctccccacagactcttttttttttttgtcttaatgatgaacaacttatggtcattgactttgtggagttcagggtcagacagaggaataggtggtcaggtattggcctatagattattgtaatagaatgcggaagatacgtgttataataaagatttgaatagttgccataatagagcactaatttcccagatgagctagggaaatgactaatttcccagatgagctagggaaagctccacaaataaagggatctctaatctaggttttgaagtttcagtaggagtttgatgagtgaaaaagtggggaaaaaagcctcccgggcagatgcatagatagaggtatggttgaaaaagatgaacagttgtggatacccaggatatcagatgcaggaacccaagcattggccaatgagactgcagagctggggtcacagtggaaattatttgcaaaggtcttgaaagtctctctctctctctctctctctctctctctgacacacacacacacacacacacacacacacacctgtcttcattctataaaacaaactgatgggatccaacttttagaacataatgaacacggtatggaggacagacatgtgcatatcctgtccgctttaagaagcctagaaatggtacttatttcaaaatcatggaaaagaaaactatcttcctccatctcagttatgcttagttcaaacagaaaaacattcagttgttactgcgtggcccatgagggtaagagaaagataagtgcagtatgccaagtaatttttgagacatttgaaggaagcattttgatacccatgcagatcctccacttaacagccaagaaggtctgtgacccacctcatctctgccatattgatgcacggtgacatgatctcaccatacagtgctataaccatgcataggacatgatacactacacccctgccatgtcatgcatggtgacatggccctgctatactctgtgtggtacatagtctactacctctctgccacagcctcatgtgaagacatggtctgccatacctctgacaagtctacacatggggcatggcccatcaagtttctgcaacatccatgttttagggtggtgcgttagtgcattttatgttgctatagaggaatacctgagactaggtaatttataaagaaaaagaaagattcagttggctcacaattctgatgtctggaaaagttgaagtttgggcatatggtgacatcctcaggctgcttccactcatggtggaaggggcaggggagccagcatgtgcggagatcgtatggcaagagaggaagcaagagagaggggaggtgccagactctttttaacaatcagctgttgggggaattctcatgggaactaaaaaagcaaaaactcactcagtcccacccctcccaagggagccactaatctgttcatgagagatccacccccgtgacccaaacactggccattaggccccaccttcaacactggggatcaaatttcaacatgagatttaaagggatcagacatccaaacaataggaggtgggcgtggtccaccttaccctaagccacaaccaagtattgagctctgaggttgttcttcaccctattactgtccaggttacagaaacagtcaccaaaaggcgattgtggtagcggctgcaaatggggggaaaaggaggtgtgcaactcagattttagttagggtcgtgatgaaagatgttgatgaaggaacaataagagaggggtttaaaaatgggttaatacatggatgatatataaataaatgtatcataaatcatgagatgagagaagtaaataaaagcttccaaataagagagaaaaaaatacaagagagagaatttttttttaaataaggaagaagaataaagcaaaaaggaagacaaatcagagaaacagataacacaaaggggtaaacacagtggagtatatattttccatgggccatgatgtgcccatctcctcagtgtgggtacacagcagcggccctctagtaacaccccacactggcagccctgtgcatttaggccacccaaccacatctaacaggaggtaccatgcactcaaaaaaaatatatatatatataaaaaatatatataataaatatataaaaaatatatataatatataaaatatatataaaatatataatatatattatataaaaaatatatattatatataatatataaaatatataatatatattatataaaaatatatattatatataatataaaatatataatatatattatatataatatataaaatatataatatatattatatattatatatataatatatattatatataatatataaaatatataatatatattatatataatatatattatatataataaatatataaaatatatataataaatatatatagtatcttttctcaagatactatttatcttctccacatgcttttgaatgttcttgataagtagagatgtagaaggaaaaatgagaatctgagcccctgaagagaatatctcctccttttcattcttctcagaccatttgcttaagtgtgtagggttttaggttgggcaaatctaacccatgtgcaaagtactatttggtctgaagacacacctatctgcagctcatggcttcatcctgggggggtgggggtgggagtggaaaaatatcacattttctaaatcttaaggaaatagagtagaaaatttgttgtaagcgcaagtctccaaaattattttggccataagctttatgggacactccatgaaagtgtctcccatccctagtcctggttacatagtttcaggagacagatctcccatggaaaatgtgatgcttcaggcagactggagggtcagatgtatttagaatgggttttgtacatcctcatccagcagtgatggaaaacagcagacactttcccttctctctcaattgcataggcccgcagaggcctgcaattagtaagggggcagcccattcatcagcaccacacaggggcaatcatccaaatcatccagttaaacagcagttacttctcttcaagacacaatgcttcttcctgctcagccccagaaacacgagtgtgcaccggaaccaagggagagcccacagccaaacaccactgggaagaaaaggaggccatcatgcgcccatctcctcggtgtgggtacacggcggcggtcctctaataacaccccacatgggcagccctgtgcagataggccacccaaccacatccaacaagaggtaccatgcactcagaaagccgctaacataccaagccccttattttcagcctagggtgtactagtgataacttttcacgaatcaggaggccaacatgaagtcatattatttcagtagggaaactgacttctactcccatgttccaatacaagaaaacataagaaagaacggtcaattccaaaaatttagaagacaagcaggtacatgagaactttgagtatggctgagaacaggattgagggaaagacgggagatttcaaatgagtctcttacctttttgtcgctcaggccagaaacctggtccacatattcctcttggatcatgaaggcagctaagttggcagtgtagctggccaggaagatgacagcaaagaaggcccacactgacaccatgatcttggaggtggtcccctttgggttctgcacaggtacggagttgttaaacaccagaccccagagcaaccaaatagctttgccgatggtgaaagagggtccaccaggctctggcatgacaaaaagacaaggacgaaagttaagccattgtggctggttctgttgaaacctacaaatacacagggtgagtccctgctcagagcaggaaacccttccgctaaaaccaagcccttttatagacggcttttaaatttgagagtgtgtatctctcttttccagggactctcaggagggctgcagagggttccttaggagaaaaaccagaagcccggagtgtgtgtaggatggtctttcttgaactaacagtcatgactcccctctggaggagccatcaacctgcccccatatacaagaccctctcaagattacatcaaaactgagtaaaacaggccaactatgtcactatggtcacacttgggtcatgtctgtcattttttcctaaattttatatttgtatctaccaagaatgcattttaacttccaaaaacatcagcaagaactgggtaagattgttttctgccattcataaaccctctccaagtctgtttatactgatgctagatggcttagaatgcactttttcctgatttttctttagcttctagcacttagcactcaatgtttcaaagacaaccctgatcctactccgatgccaacacttcccaactggtttcctgtcatagaagcttgcgtgtaaaagaatatcagaggccaggcatggtggctcacgcctgtaatcccagcactttgggaggccgaggtgggcggatcacgaggtcaggagatcgagaccatcctggctaacacggtgaaaccccgtctctactaaaaagacaaaaaattagctgggcgtggtggcgggcgcctgtagtcccagctattcgggagcctgaggcaggagaatggtgtgaacccgggaggcggagcttgcagtgagctgagatcgcgccactgcactccagcctgggcaacagagcaagactctgtctcaaaaaaaaaaaaaaaagaatatcaggaaggccaaaggggaagtcatagaatcctggcctggctacctgcatctaaggggagaaaggaagctgcttttgactttgatttccccccacctaacctttgcatagacagtgcttgggcttctgcccatgtatgtattgtgacctcactgcaatctctatttgctgatggtaaaatcttgcctgttgtctgaatctccatgtagcccctccactgcagaaatgaacatctgcctgcacagttttacaacatatttgcacaggtcttatgatgtaatctgtgatcctgatagcatctgctcagccaaataaatcatcagggacaactcatgttgaacctgatatgtaactgtgcacacacatctgtgcgtgtggaccttatttcatgcaacagatgtgtaactaaaacgttgtttataaatcaaagctttataaattgtaaaatgctctaaggagacttgatatttaaagtggccccatgttgaattcctctgtgaagacaaacatcctttggtaaagtgagtaattgtaagccctcgctctgagctttctttgcaaatctggattttcggctcctgttattttttcaagggagagaggcaatgcacactgactttagctcttgacattgccaacctaagtatatactcatgtgattcccagatgttccacttctcactggtgccacacaggctgggatataggtcatggcttctggatgaagcacaggtggaaggcccctgattgtaccatgccatggagacaccccaactcccacctcagaatacacaaaccaaattaaaaggtaggtctgcacttggaaatacttcagtaaagtgttgtttcacagcttagactgtgaatccaacagaagcatgaggaagattttataaaatactgctgcctgaaaccctatactcagagattcttattaaattggtgtagggtggggctggttattttaacatgcaaccaacgtagagaaacactattttgaaacatacagtggtctaagccccaacctagacttagtgaatcagaaaatgaggtccaagcacctgtgtcttttagatgccccatagatcattcttatgtgtagccaggtttaagaatcttccctcttggaggtttaattctaggatagagctcacattctggaatggagaagactcagagaaggcagaatatttcttaatcctggggttctcaggaagttttagaggagttatttacaaggatcccatggtcccctttagaaatcatgtgaacttttaaaaactgtcataaatgcctcaaacacatgggcagccctcacatctctaggtctacctacccaggaaattggaccatacccaataatagctatgagtgagaattggtctttcccattcattttatttccaacacccaacttttatactctcgggcaagggggttgaaccaggggcatatgctttggagatctggtacctcagttgtgatcctttggcactggggaactcaaccagccacaaccacctgcatatatcctggggcaatccatttcttcttgttcttaacatgtgtgtacaatctgccttgttagcgacatctgttccaacagactgcccacagcctaaggttatcaaaatagtttcctgtgacatgtttatgctatacccatatctaccaatagtttttcctctcctttacttgggagtgaaactaggcttggggccaggcataaagcagacctatagattcaaactaacatcttaactggggtatttctaaagagacgccaagctggtgacttagaaatgttcacctgagggttccttttcagaaatggatatgctagggaaaatgcagataacaaatgaggagtccagagatttgaaaataaggagaaaaaaactggggaagtgcagcggttccagccggccttacctctgccatcagcgaggcacctgttataacccacagggctgaagtactcaaagacaaagacagccacggctgagacgatgagcagcatcacaaacatcatcacccatacgtcagcgctgaatggctctgaggaagggaaaaaagcagtgctcagggttagaacagagagcaaaagaattcgaattaattcacatattcatttcatattttagggggtggggaacaaaccacaatgtgttgtctgccttcaggaagccagggcctaggttagattgtactgaaccatttccttaaaggtcaaggattgccttccttcaaatacatgagaaggacagcttcatgcccgtgagcctcttaggttgtagaggcagcttctgccattattggaccaatatctgggtatttcagtaaatggtgcaattggaagaagcactagctatgaagtgagtgagttgtattggactgactcaatttatgttctcatctatatggccacaccatgtaatggaggcctggaaatgccttctccaatgcttctgaaccttgcagatacagtctttctcaacagacctacctactattttagagttgaatttgttcaggaataattatgtacaataaataaccagcccccttttccccttgtatcatttctcttaaacttcctagcctagattcactttttcaacctactttgatgtattgtatgttatcagacatcattagggtatgagaatataagtcaatgttaaagtatccttccacgttaaatattattatctgcaacagtgggaatttaacaagtgacaagggaacatgtctaagctgtaattcacaaaccaactacaatctatcccccattatgaagtgatagggttgatgggacaagactgggcaaggtagcaagaatgttccacatatgctttctttaatatctttaatcatgtgtgctgaatcctttccaattgagctaaatatctctctggcttggaggtgtccagaaactagatactatattccagaagccatctctgtaaaggcctataaaaagggacaatcactattctgtcccatgatacaatgctccctcaattgtgtctcaaaatagttctggcctttttagctgtcacagcacattgtaaactcataactaagtgaattaacatgctgttttctccatcttccaaatcattaataaagatgaagtttaaaaaggggaaaaattggctgaaaattagaaaatatatttcttactctgaaacctactttgttattgaactcccaaaggaattgtaaaagcctggtcacttaatcaatttttaaaagatcttgataaagccccagtgcttaacacaccaactgtgaaatgcaaaacctttcaatggcagctagagatgcgagcgtaagaggtacaattcaaaggctctctccagaggtgtggagaaaacctctgcacacttgactctaattgattgcaattctaccctgatttcccttttgtctaagattggggaataactgagtaaaagcaccacctctgtggtcttttcctcccattaggcccagggaaactttctatacacaaaatacatcgtctgttttggtctttacaatttagaaactacttttaccacatactatatatataatccttctaatggccctttcattagggattaccttatctattttatggaggagtaaactaggactgagaggtcaaggttctttccaattcatactcagaaagtgtcagggtcagcttacaaactgagccaaaaagtctgtgttttttcattgtattacattgctctttgtccccccatgctggttcctgggttaggggctgaactctgaaacggccttatttgtactagaacacaggttctgaaggctaccatagctggattttaatcctagagctgccagttatcagctaagagacggctggaaaatggcttaataggtctaagattcagtttcctaagctataaaatgggtataataacattttatgagttaatataaccaaaggatgtacaatgatgcctggcacattatatagtaggtgctcaataaatgttggcttctcttatccctataactaactgctcctcctctgaatacagacgtaaacacaccctgcctgacatttctatgctattccagggatatattaatgtaccactggctctgccagttcagaagttaaggtagtgctatactgacaaggttagaattagaatgtggttttgtttatatctcttaatgttccaactatccttgcacagcaaaaaaaaaaaaaaaaaaaaaagcaaataaaatatgtatagaagctatgagaattactggatacagtgtgtactatctaatcacatttcacataaaattggcaaggctggaatttgcttcactctgagtaagaagattagctaagaaatttgagtaatttatagaaaaattctatggagcctataactccactttgcaatgcattaattgaattaattccctatggttagagcttaaagaaatgttagtcactgtctactgtaatagccccatttaaaaaatgttgatgtgccttagagagacggtgactcgtccaggggcttacagcttgtttatgccaaacccagtctcctttctgctagcccagtgttctgttttcaaggtgacgttttattttccaacccctcattccatggcccctgcaaaaaatatggggtatgagctcacaaaagacctcatctaattgaaatcttggcctcatctcacccagtcttatatcacgtctgagatttttgacatttaagtgatgctggagagaatggtatggggaggggtgcagtggggtgggaggaagaatcagatcagctctatctggcaaagcctcagaaaatttgcgtggaaacaaaaaatcttttttggtagctctgagcgcaattcttgcagataattaaaaataaatagatatttcaatgatatccagaattagaaattattatggcaagaagcagtctcagagatcagcctggttgaaatgacttctcctatggatgaggaaaccaagtccccagatacagcaaatttgctcaaggtcacatgctgactaaatggcaggaatgggactacagtaagccctctgaggaccagcccagtactactttcttagatggcattatgctttcctatttttctgggtgttcatcagctttcatgtttgagagtaattgattttgaagtcccctaagtgaagtccctggctgagttgagctcctagcaaaccaccttctagctggaacagcctggccatgtgctccttttttccttatttcacttccccatccatacgtccatttccttccaccagcaaacccatcatttacctaagaaggcagaaggtgagacagtcccattgctgcgtgacaccatgacactgatgcctgtctctatgaagggcacagagaagtcgaccacctccgatcgttcctcattgatggtgagtgagcccactgccatgtaggccctcttcatgaccacctaaaagaaaggcgcgatgctccaattaaaacattcaggagggcaagggaccaccacaaggaaaatacagcctatcagtggttttctttgtatagtgggaacaatacatcttatttgccattttatattttctgaaatgcataaagtgagcacgttttaaacttatatttagaagaaggaaaataaatgaaaatggaaatggaaacagcccttgtggacactcacctctccaatcataccattccaggttccattgattttcttcccatgcttgccattggtaaccaggtaaaggtcataggtgaacttcacagatttagaaattttcttaaggatgtcaatacagaaccccttgcagcattttttgatgtaacccggctcctcgtctgttttattcctagccaattaaagaaacaaaaacaaacaaacaaaaaagtctttgtacaaaaagccaacatttattaccctttgccattaaaaaacctccaatcccaaagcaggcccccttcacagctcagcacaatttatactagactcgagtgaagaaataaagcaggcaacagacctgcaatattctcattatctcgtcatattgagatatgtttcctcttaattttaattctcctttgaagtacaaaatacataagaaaagggtgcatatttgaaggcttcagttcaatgacttttcagactgaactcttattaatcagcacccggatccagatacagaaaagttaccagtaccagagaggcctcttgtttcccactctaggcacttcacaccaaggagaaccattatcctgacttttaaaagcatagattagttttatatttttcaaaaaatggttctaaatctcaagattctgggacatgctggcccaagaaaacatatttgaacaccagaagtaaacttaaatctccataaacttgaggtcctaatcattaaggccaagcaagaccgaagaaactttagcgtgggaagttggccatcattttcccaggtcaccagctggacagaacgagacatcagaccagagggctgccagtaatcccacagctcaaaagcaactagaaatcagacacagtgcccaattctcatgcctcaggtctcaggccagccaagtgctaacaggtgcatcaaagctgactctcccatgccacccaaagtcattgagaggatgccatactcagtgactatgcgtttttggcaggggactgtgttcctcatgcaggttccactcagagggtccacactttccacaatgacaaatggtgcctcctccagggtcacaatgctcagatggtcatcctcctgctcttcagtctctggacacattcggggccacacatagtacttcatctgcagggacttgtctttccacttccccacctgcacaaggatgaacacaagaatcagaaaccactggccacaacataacaaacagcctgtcccagtattgtctgaacaatcccaggaagcagttgaacaaaagccaacaagtgccaacattgtacatactagagataggaatactttttaaatcatgtgccccaaatgagactactgtgtccaaatgtaagaaaggcaatacattcatttatcactcacttaccaaacattaaatgaggacctactatgtgctggcaccctgttaagacccatggctcaaagaagcatcattctatccttcatgaagctcacagtgagtggagtcagatatgtaaacaaatatcttgcagcgctgtgtagtaagtgaggatgctggagttcccgcattatgtgtggctgccagttttttctatttaactgtaacaaggagcatgatggtgagagcagcagatagctttggaaatgtcaacagaacaatgggagcaaatgagccaaaatgatgtgttttggctgtagaagagatccagtggggagagctaggtggatctaaattggaataaaattacaaattgggattaaagaatactaacactgtttgggaagggagcacagttaggctggggatgaacatgggtcaatgcagatgtgcacctcctgggctgggtggaagccctgggatgaatcagatatgtctctctgtgagccaccacctatggccacacaggctgagtgccccaacaccatggagcaccatccacatgggctccaatgtgaaaggccagtgtccctgaatcatgaacatggcggcctgctggcaaccatcctgagaaatgtatgggttccattatttttcagaagagccactcattcctatttataagggaatcaacatggctttgttggggggttctcattctctctgtctcattgagtttaatggagaaagagggaacacttgcttattttctataactgagcatcttcaattatcgtaaggaattatggattgcaagcacctgcattttctcaatctatgatttcctccatgcagcaatgcaaattagtagaacaggtgaggcaccaggaactacagcaccacttaatttattaactacagaaatcaataagaagcaacaagttggtaggacttcataaattttcaagcaaatcggcttggatttccatattaatgcaaaacccagactccctccttcttggtttctttgtccagtagcctgcatagccactgcccttgtgttactgcatcattataatgcaggcagtggcttggtggcataggctatcttatttggtacctacacagtccttgtttggctgatgctggttggttttctttcaagggtataaatgatgttttgcttctttgttcagaatcatgcactgaaccaaacgtttgctttccttcatgtgtataggcttctctgaactgttgatcctgattttagaacaagtccgttttttctcatattgctaagactacttatttctaaaacagaaatttccaaatggctctccagccagtggagatactaatgtcctctgccagtttggccaggtaggaattgggagaggagagactcagtcctgggggtccaggacattggtcaccccctccccaaataggcctatttaccctagtggccaaactggtttatattctgcaccttcaataatgtgtaaaaagttgagaagccctaaagtacttatttatttatttatttcctatcatcttccctcaacagtcccttttgattttttttctcttaaatccaaatttattcttttccatctttattgctactagcctggcctattatagcccagcggcccattctgacattattgcaggaaatttcaaacctcactaagggtccccccagagtccattgtggacactgctgccagatggctttcttaaaacacaattttgtcatataatcctgattcaaaaatttcaacaatctctcactgtcctcagaattgtgcccaaatttctcacctagatagtcaaggtctgtacattgagtctagcctaccttgatacagttaacttcactattttacatcatgaatccttagttcaacttggaaaaggaagttgttggtattaagagctaacatggattaatcaggaacactttgcaacgaactagctgcattttcttttctaatagacttactatatctgtgggaaaaaatgctacagacataacattttggcagagtttctcagatactattgtgaacaataaggatattgcacactttgatagatttgaaaggagtttaaaatctgtacccaaaaaggaaaaaaaagagattgtttaatgaatgactgccaacatagaaaaaagtcactagtgtcatatcaggggactctgttcttagaagcggcctgggtagtcttttagaaaacaaaatacaagtcatgcttacaaaattgcagacaacagaaaactagataggaggaaagataaactgcattgcagaatcaagtttggaggagatatgaattagttggaatgatgaactgaaccaaactgaatgaaatgtaacagtatttgtactcaaaatctagcattttgatgttttaaaaagcaattgcacagtatcaaaaatgagatatttcaatcagcagtctacaaaagctattgcaataacaatggtatatttatagacatacatcatctagcatatggggtgaagggaaggtacgaatgatcctaccttgctctgtgttcatcataccacagctggaaaactgggttctgatcctataattctataatctactgatttttattaaatatatcattctcatttccccaacagtagtttgttcacgcagttccctctatcacaccctttcccaacttctaccaagttagctgggtaatatccttacttcaagtccattcatttcaaccaccaaccactgcaaaccgattctgtgccaggcactgggctatgtgctagaggtaacaataccaggtagcatttgttgagggtatagatgtgctaggcactgaccatatctagtaatctcattatatcacagtgagcctgtgagattgaagctcacatttaatgtttcattttacagatggctacagaggagtttgatgacttgcccaagctcccacggtaagtgacttgaagctgagcagtctgactccagagcttggactcctacccaccactctgcactgcttctctgacaatgaaggagtaagacatgttccttttcctccaaggacagtctagagggaaaagacactatccatcgacaataataggctttggtaattactctaatatccactatccattgacaagttaggctttggtaattactgtaataaaagatataaataaagtactccggcattcagagtagaagtgatgttttctaaaagaatcagaagaaatctcacagagaccctcattttgagctgtggcttgaaacgtaaatgatagctgaggaggtaagagttatttatctgccaaggaaagggcaagagtgagggaacagagtggtgcagaggctaaatgaaaatggcttatttttcacacctgtaaggtctgaggcatggggagcaattgtctagcacagttctcttccttacgggcctgctcactgtagccggatgatctctgccaatcttgagagctgactggattgtgctcatctcttcccaactccttgttcaagggtgtcaggctggtagcttgaaactggcatgggcaccgtgaagttggcaaacactatcaatcaggctccctctgtccagccctggcccctgttgttaaacgtcaaccagctcaccactgcccagaacccaatcattcatcatttcatggtatctaccaccttctttaatgattttttaaatgttccaagtgattgtcttaattaaaataattctaaacatgtctctgagtatttctgagactgtaaacacatttctaaaacactgtgagcctcagtttctgcatctgtaaaaataggtgtgtggcattctgaggtgccttccacataatttcatgatcataatttctttaggacaggggctttctacatcctacaaattaaagcacgatgaagaggtgcttttagaggttactttttgaaggggtggcagtatctgatttgtttctacaaaatacgagcttgccttaaagtcgttatttttttttttcgtttcttcaaggaaatgaaaaaaaaataagagggaaagttaaattccttgagtactgaaaggtgaaacttttttgaaaaaaaaaatctgaatatcagattcccaattccaacaaacagggttcatgttaaagaacatgtttagatagtcactgccaattctttatggagcaaaggcaggttacaaatgagtaaacaactaaaattaacaaaaaaggaaacaaaaattatgtagaagaacaaggtgtatttcaagcaatctttctctcaagggggagaaagtatggtgaaaaatataaatggaaaagtttgaaagagcaatgaaaaatagtaaatagagaaagagaagccggagacaccaagcaaacatcttgaaagtgcatccaggatgtccgaagtggtgtgagtctacaatcctagaagtgcagacagcggtagaacatgaggctaacaggagatatttcagagacaatgtagcgagaagaactgaatgaagaatttatgcttgagattaaaatatgatcaggaaaataaaaaaccttaagaaataatgaagaaaatgactgtaaagcactcagaattcctttgaggtaactaaacaaacatcattaccataagcacatttcacaacatctgtctacaaaaaattcagttatctgccattctaacatttaaaaagatctcttgaggaccaaaatcatctttttcaagagaaaaaaaaaattgcctagtttttgtttttttttttttttttttttttttttcagaaaaacagtgatgttttagagtttctggtttggttctcttggtacaggctgaacacctgaatagctgggaatttctcctcagaaggaaagtctaccttacaaacctgtggtaccttcgagtggacttggctcataaggcttcccgtaggaaaattctagggaactaatctgtaatgcttttagacttcaaagtcttccttctgctaacagattcctccattactgccagtgaaattggcaccaattagcaccctgacaaggccacacattaaaaagaccacagagactgtgttcctctctgaaagcccccacgtttgtccccccaccatgaacagttgatgtgagcagaagggcgaatgtgtcattgtgaagaagggagaggggaccagggcagggtattgaggctgctgcagtccttgcatagattagcaaaggacatcggtctcctcgggctgcctctcttgtctgcatagaaagtcattttttaagattctggagcaaaaacacttattagagcctctttaggcgtcaaaggttatttttcaaaaatcaaagcatttttgttttttgcttgagatgacatctggatgtaacatgaaacacttgctgcttattttaagccttcatctgacttttaaaatgtgaaacttaaagctacatgctatttccctgagcaagctaaaggaagaggcagagtctctgcaaggcagcctaaattctgcatcccattctgtcctgcagccccggggcaggcctcagactctgaatagagcagaaatccgaggacaggaggacaccctcacttccccacccccaaagctatacatcttaactcaactctgaggatttttaatgtttgagtatatgataatacttcattttgctcaatctttgtttttctctatttacctatctttaatttgttttctgctactataaaaaaaaacacacagactgggtaatttatttttttttaaatgtatccctcacacttctagaggctgggaagtccaatataaaggtgctggcatctggcaagggccttcttgctgcatcatcccacgcagaaggcagaagggcaggagagtatgtgtgagagagagagcaggagagagccaagctcacttttataacaaattcactctctcaataaccaacccactactttgataatgtcattcattcactcatgagggcagagcctcaggacctaattgcctctaaaaggtcccacctctcaacaacgttgcattgaagattaagtttccaacttaatgaactttgggggacacattcaaactacagcactacctctccccctcatttctttgtaaccaagtgaacattctaacactgtatggccctgcattatctgtatccgttcaaaatacatctacatatatacaaagaaggggatttgtgtgacttggtatgtatgcgtgtttcctaaatcaaatcataatacacacatttctctaccacttacttttcccacttcagtgtggaatttcttccaacagtagatctaacttcttttaagaactgcatagtagcctataataatgaatgtgcctttatttactcaagcatagccctattgatatttatgatatttccaaaaaattaaccagaagacataatacatatcttggtatttctaaggcatcaattcccagaaatgaaaaggcggaacaaaaggatatgtatgtttttaaatgttctcaatggtgccagaatacaacagtttgcaacaattgaaattcctatcagcaaagcacaagagcgcatcctgctcacactctcaccagcactaagtttttatcactactaaatgcttgccaatctgaggaatgaaacacaatatcttcctgctctaattttcatctccttgcctcacagtgagcgcaagcacctttccacatctcttagccatttaaattttcctcttttaccatctagtcacatcttttatccattttctattgagttgtttgtctttcttatccattcatagagaagagctcctggtgtagtatgatagtaacccttcatctctcaggtatgcttgaaatattgttcccactctgagatttgtcttctgactggtctttttttctgtgcacaaaattttactgtttttcttttgcagtagaacataatattcttcttaaatggagggttggtttcctacctaacttgtaaaacaatctaccccattcccaaagtgttcttctttggtattagtatacttttgcatgtagcttttcctatactacatgtgacagagatgccgttttgctttctgttgttgcacatgaccttcccctgcctgcaggtctgtccccttgccatgtttcaggaatgttctgcattctccttggcccttctcagacctctccactgccatgatactgtccctgatcaccccagcccagagaaagagctttcttatttgatctcctgtaataattttgtgggtcaacctctccctttggctatcatattaaaatgttagctgtatttcaaaattcatatctctgaactggtccttaagcccttcgagggcagggactatattagattgccttttttttgtcccttgtactggcatgaataacaactatgttctcagtaaattattgactgatgtcactgcacaccctccacaaagcctccactagatctccctccagtgttctttcttccatgaaaaggatgtaagatgtaaagcctgcttcattctgtttctcttcagccttcctgattataaagttaccctggacagactcagttctatgtgaatggctctaagtgcaatggcacaatctgctgcagtatctaaaaaggccactggcatggctttgatgcttcttctcctaattatttgcatattcagtgccatctaggtttagaaatctagtttttgaaaagtgtgcttggaaataatttccatatttaaatttgatccatgactgcctttggcctatgactgcctcttcacttactaagctggggaccggtgtctctgggtacacacgctgaagggaagcccatccagccaatcctgtctggcacctgcatggctctcccagggacactgagacatccattgccatctcgggcctcagatgctatccctggctgagccctgcctctccaagagagcccaggccccctcagcgctgtgtgtacccattgttgctgctaggcactgccctctgagtgactcttcttcgctgcttatcctccttccatctttcctactctggagagtgaaggaatgggaaaatgggggaggtagagcagactcacctgccaggaatagaagttgttgattctctcagcaccagagagctgttatggtcatttcagataacaccacgggtggagatgtgatcatattagagtaattagagccattagggaccaggctgagggccaggcacttcttgtggaggtctatcaattcaatgccactaaaaaaggtggatattattaattgcctacaatatagaccaaaaaacccaaggctcattgacggaccagaattttgtctctgatttgtttgactctagcagctcatatttttttcaccacgctatgttaccaagagaatatttatgacctctatattccttgcaaacttactgtgatctaagagagtagaagagtctgtttcagctcaccctagtctcccaagatccctgatggttgtgtctaaaggattcatggcaagtggcgaccgaagttcacaatgggggccagataggcagaatggtggctggtggcagtgggaggcagggtactgacaagctgtgtgaccttgcatgaattatttaatctctctgtgccgggctcattagttttctgcaagtatttgctattttttcctcctccttctcattataactattactactacaattgaaaacatcagtgcagctccttaatgtgacttcctcccagaaacataattttttgtgcaagtggcttgcaattgtcaagggggaaatactgaacaaattctacttcccaagcttttaactcaattttttccaaacatcagggcgaactctatgaggttcttttggtttcattcattattttcattcacgtgcaaataaaaacagaaatcacaggaataaaaatgccagtacccttctgaatttacccaaggtcttgaatccaaagagtcccattgagcgaggtggtgcctcgtcataaacccctccctgggacaagatgccattttagaaaagggcattaattcttttaggtcagagaattttgtaaacagtttgctaaacaggctcaaataggtggaaagattcaacaggatttcctgaagtatctaatgcctcttggctcaagggctcaaaaactcccaagccacaactctccatccttgggaagccataatcctcagagtcctattcttagacttataggagctcaatcagtgagaaccgagctctaccttctcctttgatgtgccttcctccaatgaagacctgtcttctggaacaacaaaactgggtcccaaaccatcttctgggacatgcaggacacagtgaggaaccactcaaacagaccactccctctaaatcaacttcttcctggacatgtgtgcaccatgcccaaggccttggcttgctccagaacacagctcagcagcgatgctgaactgctgactgaaaatgatgggtgggttctagggatgctgttataatctgcttttgggaactgggccacaggctgcaatcactgatactgcttgtcatcaggttaccttgtcattactctctacctttattctcaaatgacagttgtgagggtagagcaaaagtgtgtaatgttggacaattctgaactgtgactctctggatttgagcactgacttggcaaggtcttcattagtactcaggcaaatatgtatgtatgtgtatgtgaactcattcattcaccctactttattctaatttgtcatattagtaaggaacatagactttgaagtcagaaatgcccaatttgaatccttgcttttccatcattggttgcatgtgattctggatgagttccttaatctttttaaccctgtgttgtagatggctactgttgagctaccaaccagccatccctacctctccttctgactcactctccccccctcccccccaccctcccccctcccccctcaccatagctctttatctcctcctcttgtgaactgccccttcctcaactccacccatgtgatcctgtggaggttgccattttattccacctcctggtctactcactgacccagccatagctgagaggttgaagggtggggcacctgactggctgggtcgaatcctcgggatttttggtaggacccaggagaatgttaagtcagtctcaatctagtggcataagctataatatgtaaaattcagaagccctgggcagccatgttttgtagcctatggagaaactgacctatggaaggagagaagaatgaaggcagaagctactgaaaagtaaatacaagtgagagtatgagcaagatatatgacagcatcagagtcccggtttatggctattctgggggctcaaccacattcccattgtgagttctgttgagatgatccagtatcctatcatacagttgtcttttgcttaagctggttcaagttgggtgtctattctttataatcaaaacagttctcataatgtactgtgtatttcattcataaatggcaatataactatctttgtggggttctgatgaaaattaaataaaataatgtacataaagtgctttgcaaagtgcctggagcatggtgagccctgagtaaatgacagtggttgtggtggcagtagtgacatttatcatcgccaatttctgtcaacatctcagaagccaagaagtaagttgggttgcaagtgacaggcagattcctcagccatttccaaacaagtgtctctccaaaggaagaagcagcagggggcctccactcaagctctttgagtcttgggttcaggcagggccaatcggctagagttcctgttgtttggttagtgacctgtggctgcattctcttcctggccctcaggccttgtgggggtgcttggacagccacagagtctacagtcacagccaaacgcactcagcaggtcacttggcatctcttaccacctggcccatgtgccagaccctgctgctaggtgcagtcatttgcatgccttccgtctcctcttctattccccatgcactccttctacaagacccttcccaggattaagagctcataaccagaagggtcctttaagactccccacttaggggttcccaaaccaagtaagtggcagaaacaggatttgaacacaggcagtctgacaccaaaggctttgttttttaccactcctctatgccacaaatattaatattatgtgccataaggcacataaaatgcagagaacagtatcaggcatgtcataataatgtctaataaatgatgctgatctagaatacccacctgtcctattctccttggcagttctgtgtgccttgggcctgccatagcattagatggtctaggggcccaaagaagcaggaggatgaaagacactgagtggaaacagcgccaccatgcagaaggcaccaggttgttgcagaagacccctgggagtcagaaatgattatactggtcttcaaacaaggcttactggactggtccccagcttgctctaccccttgcctcctgatcagtctcattacaccctcttcatgatccttctctgaatttcaagtgttttcaatatgtttaaagaaaagtttacttgaaaatatgcaggaatctactgatagatcttagacatactaaactaacccctctcagatatagctcaggacactaatgaaaagtgatgcaaatcattgcacatttagtaaaccaatcaaacaagcaaaattggttctcaagcaaatttctttggagctagaacatgtagctggactagagcaggacatcatcagatgagactgcagagagctgcttttatcactgcagggtgcccatacagaagtatcagaaagaaagtaatgagaagcattctggaaaagggacatattgcataagtataatgacaatattttccagaccacaaatctgaatgtaaacactgataattatgaatgtgctttctgggacaatgaagcaatgtagttgaaagtgtgatcatccaggaaattcaagacataaggttgtgaatacatatgaaaagaaacaaggtataaacattaaagagacacataagaattactgaggcaatgagggagcacaaatggaagaggtcaaagtcatttaaaatacattataattttagaagcctagaccacaaagaaaaaaaaaggcttgaaggatctgtgtctaagaatgtacttactgttctctctaaggtgacctgtcaaattcatagaacagtttcctcacacctcaccagggccatccaaaacaagactaaatacttaacaataacactcactctaagattgcccagggtcgaccactcttctagacaataacggtcaatttggtagataagaatatctgtaaagagtgaagaaaatagttttttgtcagatattctagactataggctcccaaactaggatatccaaggtcattgcatctctcacggaaatgcttttcttcagctgtggagggtggaaatagaaaggatcctaccttgacttccattcacagatactctccctcttgcctggatttctgcattactcctaatggtttccccacctccattcatgctccacttggcccccagagtgattgctctaaactgcacatctgactgcatccttacccttctcaaaggctgtcagggcctcctcattcacctatagaataatatctaactttggaaaattacacatttattccccacgtttcaccctttctcctttcccttcctctttccctccttccctcctcttgctcctccttctcctctttctttacttttctctccctctctcttttcctctctctctcttgcctccctgcctttgtttcttttttggcttatctcttcagattcctagccttttaatttcatttgataacacagaatgctctttcttatctgaatgtctttactcatgccaaaatcctctattttaaacccctggtcttctgaatgacacagctcttcccttaggattcggctcagtagcatctatgccaagaagtgtttccttaccacaccccttggctggactaaggggttaggtatccttcctttgtactgccaaaataccgtgtgcatatctcggcctcacaacttgccatgatatcttatatctaactgcttatgtgtctggtctcctccagtagactatgagttcctcaatggcagggactgaatattatcattttcttttatccccaatacctagcataaggaagattaccacggtaagcactaaataaatgttagctaaacacataacagcaagatttcaaaaggggaacctgctcctggcagctaataatagataatgatgattctaccaatactagctaatatttattgagcatttggtatgtcagaggtgatgctgagcaaaacacatgcagtatgaaatttaattttcagaatagtcttataaggtagatattatttttatatccatttatggtagattcttatattagtggtaactaaatgaatcagatatcccagtattcatgcccttttccaatcatttctcacactgactctgagtttagctttgtgacttgctttgcccaataggatatcgaaaaatgtgacacatgtagagacttggatgagcgatagtcagtgggtcttgtcttgtcctcttggaatgttgctgacaatgctgaaaaaacttgggccagcctccttgaggacaaccaaacgtagaatgaggctcatctgatccccagtaccaacactagacccacaaattaggccattttggatggttcagccttggtagactcatcagataagtgaccccctggagaccaacccaaaaaccactaattcaaacttattctaattcaaactgctgacccaaagaaggctgagtaataaaatgatggctgtttcaggccactaagtttcgaggtggttgttacacagcaatattctcacactgctaaaaagtactaccttacactgggtaatttataaagaaaggaggtttaattgattcataattctgcatggctgaggaggccccaggaaactcaaaatcatggtggaaagcgaaggggaagtaaggcacatcttacgtggcagcaggagagagagatcaggagcgggtaactgtcaaacacttttaccaccagatctcatgagaactccctcactatcatgagaacagcatgggaagccacccccatgatccaatcacctcccaccaggtccctccccaacacatggggattacaatttgagatgagatttggttggcaacgcagagccaaaccatatcaggtgctctcagtatatcttgtgcaactttttcctcccagtgtttataatctagtctcacatcctccactgaagggcaggcggatatctggtctcaaagcaagagattttcgccaagagcatgaagacctggccaagccctgtctgtgactgcccatgggatgttggcacataaacttgcagagactgattctctaactgtaaaatatgagggtaaaaacatttgccaaaataccctcatataggtttgagagaaactaaggtgaaaatatttgtggaagtgccttgaaactagctactccctggacaaaggcaaggaagttggcaagaatgctcccatccagccaaaaagaaaagaaaaaaaagaaaaatactcagtgtttagagagtaacaaatgatgtgccagacactgggctaagtggtaggttttgcagggagaaaatggggaaactgacatgttaagatgccaggtaacttgcctgtggtcacataattaataaatggctcaactggattcaaatcctgatttgcctcactccaaagcctgggctgcttgcacagtgctaagtggcctcctaaaggaacctccacagcctgtgcaagaacagaattattggccaggtagtctaccattaaatggggttgccagcttgtggctaaagaaacagatgatgaaagaagtgctgaggagaaaacgcctgtttacaaacatagcttaattaattagtcaactcagatgaggcagaaaaggcgggtttccagatgtctgacatcgagaattaattagcagaaaggcaccagtcctcaggccttgggttcatggccagaccacatggtagaattaaattactagacttcccctccaacttaagccatttgaaagaaaacaaaaccccaaacaataaccttattaaaactgacaactcaactggaaaatctccaccaaccaaagcttcaagtgaagttcagaaaagaaggttccagtgcttccagttcagtttacaaaagagaatgaaatgaaagtaagttaggctaacagttggtaagttcacatctgtaccaagataagtaaaacagaaaattaaggtagcacttgaattcctatcaggcaaaagccaccatctttgcagaaatgttatcacatgagtcacttgtaaatagaaagtacatgtcaatctgcaggaatcaccacaaaatggggttgggccagcccaggagaatagataatatgcagccaatattaagtgtaatgtgtactcttcgggctcaggtgtgactttatgagtaaaagttactttccaggaatgggttcccccactgcttccacagttaacttttcacaggggttctagaactgctcctattttgttgtctatatttttatcagtgaatttctgcagttgtttgggactcatcctctgcctaagcagggaagttaatgaggtttgaagcaactttgtgtcccagggtgaatggaatataatgtatgtggagagaggtaagggcaaagagttcagctaggctggagggttgagggctaagcaaaggtagacaaggtgggattccacggggagggagggtgtgcaggtagactggtagatctggaagtgacctagaaaacgtctgtggttttcaaccagtgtatatattagaatcacctgtaatgtgattaaaatgctgatacctaggacctatctcagaccaattatattggaatcgctaagcaggtgattctaatgggcaccagaattgagacccacacatctgtggcaacctattgattttcctagtggggaaatgagggaacacatttggagaagcaaaagagagactgtgtgggtccctgctgtcaggtgacatttcactgagctgccctgagaactccactcctccttcacagcctcaatctggcttcatgggaaagggaagtcacataaagtcactcccaggtgctgggatccttgaccttgtaaggctgttgcacttgtgcatgtttgtagattccttcactgatatagaatgaggttgaggggtttagaccagtgaaggtcaaagtgtggccccaagaccggcagcatgggcatcatttgacatgcacattctcaggcatctctccagaactactgaattggcaactgtgggcagaacccagcaatctggttttaacaaagcctcacgcatgctaatgtttgagaactgctggtttacacaaccattttccaaaagtgagtctttggagacagggagaaaagtaggaggtaatggtggtaggggtgttcatgaggatactggcctgtgccactaaggataaaggctggaagtttactttggagtaatcaaggatgcagggtaaaactcatccccttctacaacaaagattttaatatttaccaggtatcgcctgcctgacctgcagccagctggtagaaataaaatgtctcttgtttcctcaaagagagctcatgccaaactaatatattcctgacttgaaaaagtttcatttgctcctacctggtcttaacttatatctttcaattgtcaactcttgattatgtctcataatagttaataagaagatgcatataatagtgaaaagataatcaacattttatttgacttgcagatgtattcacaactcatacccagtcagtaacaccagcacccacccccaaacccaccccacctgtttctgattctcccttggctcagggtccctctcagcgcctacgacacagctgctgacaggaggaatgtgccggaatgatggaagagctgggtcacagcagataatccatttatggataataaaaaatgtgtgtcacacttcgttgaccatgccagtcctgagctgctatacatacataaaagatccttcacacccaagatggatttcaaagcaaaatgaaaaacccatatgatttggccatgttcctactcatgttccagaataaaaggtagacataatctctctgaccaacgtatttactaattatgtgtcctgtgccagtctctgtatgagatcctgcaggggatacggtaggggatacacagattctgctttccaggagcttgtaatgaaactgaggaaagagaaatacacttattgagaaagacgttataacttccagtgtattaactatggtaggctaactgccataacaaatagtctgtgaaatgtattataattccaacacaatagaatttcatttctagctcgtgtaaccacattgaggttggcagggcagccttttctaagcagtgatttgggaacccaagccaatggagactctgccatcttcaacaggagtcttccaaagtccctaggaggtgtctgcattccaactagcgagagacaaaaggagcgtagttgagctgtcaggggagggttttatgggctaagctttgaagtgacacccatcacttctgcccatattatgttggctacgggtccatcacatggccacacctcaccataaatgggaaatagagtccatctgtatacccagaaaggtgaacaaacacattttgttaagtacccaacagtttctgccatactgggcatggttggggaaggtgtgtgaggctgggggacagttttatttatttacacatgtgttgtttcattgtttctcactatcacagtaacttctgaagatcctgctatagttaggatcctgttatctgaactcgttgctactttcttgatttttcctagagttttactgaagactgggcagtatagcccattccaaggatgagcattattgggaggctatgaaaaaattcagcaagagaagggtaacaatcttcaaatgatgcatctttaacctctttgtgttcttctttttagtcaatacttcactgcttagtgccaatccatggaaatcactttcgtgctggcactgcccagagagtgatagatttcattcaggtgcctgggccaacagagggtccagtaaggcaggacagaaactgctttactcggagtgttcattctggggtctgatggaatattaatgctgagaggaggctgagaaacgtagactgtggaggaaaatgggaggaaacctcttcacactgagaaggggagatggtgaaaccaagtcagctggaaatggagagggggccttttgatgttttcctgttttctacaggaagggaaatcaatagatgcctttaaatgctcctctgggtgaagaatggatacttatctcatttctccctctcactactcttccatcactttcccagacaccatgttactagtttagggtcctgggaggagcagaggaagatggaaatgccacacacatctggactacaaccccctgctgctttgcaatgaagacaattttctaattggaatcaacagacacccagtgtctgcagtctctgttggaaatagcagacgtaagtagcaatcaaaaggtagagtacaagcacagaaggattagcatgtatgtgaacctgggctttctaacttggtgccctgaatctagccatttgcttgttttaagcaaggcattctgtttcatttaggcagttagtggcagtgaagaaatgagtgtgtattggagtttcctctacattatgctgagaaaggtattttatacctcacagattttatgatggagacctaagcttaggcagaagttgcctgtattcacatgtgtaattagaatataagttcttctttcgtttattcagcaggtattatttcgcaacaatcaggagtcaggaattttctaggtgctgaggacagtgatgataaactagtccctgccctccagaacattctagtgagggagaaagacaataaacaaatatatagcaaaatatcagctagagagagctattgagataattaaaggtgggaaagaggatggtgtgtgatgggagttagacaggatgttcagaaaagtcttctaaagaggtgacatgtgagcagaggcttgaataaagtgaatgtcatgtgactatctgaagaaagaggatttcaggcagaagactctgcaagggcaaagatcttttgatgtggctttgcttggagtgtctaaggaatagcaagttggctagtatagctggagaaccttgggggaaccaagggaagagtggcagaaaatcagtctggtgagatagggaggacacagaccatgctgggcctgcagccatagtaaggctttgggtattctgtatgtggtggaaagtcatggcagggttttgagcaaatagcagacacaaactattacattttgaaagaagcactttggttgctacacaggaattgactaaggggagcaagagtggatgcaaaagacaagggaacaggtgatggggacgtgactgtgatgatggcaatagagggagtgtgaagtggccactttctggatatgtttgacaggtggagataagaggatttgctaatgaatttgatattgggttgagagaaagagagaaatcgaagataactctgaggttttgggcccaagccactgggtgaatggtggtgacatttactgagacagatcctgggcagaacagtgattaggctgtggccaatacagttattgataccagacagcttcaaatcaaagcccaggtctgctagtgatgaactgtatgacctctgtatctctgtctctgaatctcagcttcatcctctgttaaatggagatattaataatacctaaatcatagggttgctatgaagattaaacaagttaatacttgtaaagcacttagagcagcatctagagtaaaggaaactctcaataaatattgcctaaaatgaggaacatggagggtgtgaaacagactcacagagaaaatcaagagtttgtattgggacaaggtaagtttgagattcctatcatatatctcagtagaaatattaatgagtaggtgggcataagagtctgggcttcaaaactgatgatacaaatttgagagacattgacatttagaatattttgcaagttgaaagactggattttataatcttgtactcattggccaaattcaggcaatagatgagaaattatatgagttttgagagctaaagagaaaataggcagagttgcagggtagtatgcaagaagaggaattaatctagatgtaggtaactgatgtttcagtggaaacctgaaggatgaacctccattggttattatgctcactgttcccctttgtatgtttttaatcataacactcatggcccatgttgagtaggttaaaaaatgtaagtatagaaaaggacagtgtgaaatttaattacacacctgtgtacatttcctcaagaaaaatatcagttgtcttcttaagtgagatattccatcaccagtaaaggttttggcaccaaccagtgaatggaaatgtcacaatttccatacagtttgcacttgcagcaaaaaatagtccatggagtagtcagaattctctcaaaatgataacgataatcacgacacagggccttacctaagctaacaaattattatcattcataacctaatagtaagcaggaccctgatgaaaagatttactagttttcttctctatttaggacactatacccttagaatatagagagaaactgcatctattaagaaacttattcaaatcatccacctactatttcagcattcttctccctttactgtctactttgtgtaccatataaataaggcccaggctttacttatttactaacaatcagtgaattgtttcaccaactcaaacagagcttggttaagagtctaggccaaaatgctgttactgacctgcaaataagtgttatgtgtctgagtggcaaaggggatttaaaagaaacgagattagatttctcactcaagtggaaaggaaggtttctacttttcagaaaaacctgctgtcatctttctgctgtcccagatggtgagagttatgtactccttgacctgagccaaagacaacataagagaaaacaaagagacaaacaaggtctgctcaaagaaactgggcaaaagctcatttccaatggtttaagtacacaagagacaacttctcagacaagggcacctcccttgaccctgtttttcacactattgttcacaaggttactgaaagaaaagtcgtataagagactagtccctacaatacctggaaataacaatcatataattaaaggattttgagctcagtgatttttgtttttgcaagaagtaaaccaaaaccaagacatgtccacgtgaatgcataagtacatactgaatgaatgtgaatggaaatgtccatgcaaacagaagggggttattggcagaggcagcccttgagcactgaccatggactgtagaaagtatcactagggaaaagtcatgctttccaaagacaggcaagagctgggcttcagttttccatctggtactcaaaacacaagaaaggatctttttcacttgcaaattcaatgtacctctggaggtacatgagtccatctctgtttgaactctcatttcaaaatggttctgtcctcaaaatgtaagtattaggacacagatgtcagcccttgacactaaaaaactgcttggaaaataaggttggcggaagcttccaagaagtcctgttacccagagaactgtgtattcctggtgacctcagcatggcaaattccatcctactccatctatggaaatggaagggtctgaattttctggacattaccccatttcttaccccagttaccttactcctggttccctaattatgacaacccatggtgaagatgagcccctctttgcacgtttgttgtacctcagaggaaggaaaaaggaaatgaaaaatagcatttatggaatgcttcctatctctcaagccctgaggaaggcctgcatacacagtgagctaagttaagttttctccatttcactgaggagggagaaaagttgagttgcccaaggtcattgggctaatgagttgcagtgtcaaaacatcaaatccaattgtctctaccaaagccatattctttccaggcaaggtagtctggtttagatcatgcccattctactaaagatcccagcagaatttcaggagcaatgctccttgattcatagactgtggcaaccagtcagcagcagaccctagtgccagatagcgcttggatgggtcataaaaatacaaagattctgcagtggtagaggcagtaaaagcagtcacagtgttcatagacactgaagaggtcagttctaatgccagataaatcctgcagttttcagcagtccctgtgttaatagctttttcatacccgaagaccattaataggtcacttctcaacgttcaatgtcccatctccttttacgttcccacacgtgttccacttactggccttataatcattctcttgatttccaatagacattcacaaggttctttttatctcctgaaaattctgcagttctcaacaggacccagtactcaaggaagattggaaaagcataatgtgccccagaagagagatgacctgatcagcactcagaatgctcttatcagaagcatactgcatcctctgctggggttccacacttcttttctttcatttcactggagcctttatttcctctctttcttacctgtttatcctattgttgcttcttttgtcttttcttctctccttcctctactcattttctttttcatctttttctctctccatccctttcccttattaaatttcccatgttcttttctttcacttcctccgcctcttactcttcaccttctcttcttctttttacacttttagaggcaaatcagttgagttgaaaaaatagagatgttgaagtcacataaacctggttcaaatgctagtttttccacttatggtatcattggaaaaataactattctgcacttccttgaggaagagggataccaggccctggtagacgtaaaatgtagatacaagaccaggcatggtggtacatgattgtagtcccagctacttgggagtctgaggtgggaggattgcttgagcccaggagtttgaggctgcagtgagctatgatcatgccactgtattccagcctggatgacagagcaaggccctgtctctaaaataaccaaaaagaaaaaaatgtagatatcaactatatttatatgtagatctgaatattaaatgagatagcctgtgtagattcagtttaggactttatctggaagtaggacgttcataagtgatagtcaaaacccctgcttccatactgccccttgccctgctattgttaagcctatcttgtctcacacattgatcttgccttctgtctgttattccccatagctgttgtctctggtcctggctcagcatccaattcattccccctctctattgtatagtttgtctttgactggattctcctcatgttctatgctcctttattccgaatctggctttaagtagaaataactagacattacagaatgttgcatgttgacaaaacgttcaagcatcacagtgatggctgattctaaaaaatgtaataacaacactattaaatactttgaaccattctgaactatctattatgaatgagaagcttagggccaaggcatagccaaatttccctgtacctgcaggaaccaaaatgtgtgattgagatggagcctaggtcgagtaggtaaggacagcactcattacctacccaagtaaccagaagataatgaggtttaaaaaaaatttgaagtttttaaaaatttgtgagcaatagtaaccattagttgttacaccaggttacttattggtggacacaactctgttgtgagaagaaccatttagggtataaaccttccataaaaacttcggaaccatagttttcctttccagaaaacatagaactctgaatataagctaaaccctgctacttaattgtatcatgcttattattattattattattattattagatgaagtcttgctctgtcacccagacggtggcacaatctcagctcactgcaacctccatctcctgggttcaagtaattctcttgcctcagtctcctaagtagctgggattacaggtgcctgccaccacacctagctaatttttgtatttttagtagagatgggggtttcaccacgttggccaggctggttttgaactcctgacctcaagtgatcctcccacttcagcctcccacagtgctgggattacaggtgtgagccactgggcccagccttgcatcgttaatttgaggttcatggtaacccatgtatctttgggtagctctcagcctgacttgccatttccatgtcttatacttctctgtctttattttctctgagttcttgacttccttttgcccttgtctttattgaacttcatcctgttagtttctgattacttgtccaatttgttgaggtcattttcaattctaattgcatcccccaagactttagcctacactttaaattcagtctcatctatgaacttaatgagtatgctgtttcggtaacaaagtcatggatgatcatcttaactagaaatgaatccaggactgagccctgtgcagcaccatttttagtgtttactcattagaggaaatgtataggcaggtgctttaatgaagttcagtttagaaaatataggcctccttcttcagcatctggaattacttggctagaatttttaacatttttggcaattcaaggctgtatttctatacaagtgaaatttaattaatcaaagtcattctcaaaatgtaaccttaaggtcaggcgtgatggctcatgcctgtaatcccagaactttgggaggcaaaggcaggtggatcacctgaggtcaggagctcgagaccagcctggccaatgtgatgaaaccctgtctctattaaaaatacaaaaaattagctgggcatggtagcgcacacctgtaatttcagctactcaggaggctgaggcacaagaatcgctttaatccagaagcagatgttgcagtgagccgagatcacgccactgcactccagcctgggagacaagagtgagactctgtctcaaaacaaacaaacaaacaaacaaacaaacaaacaagctagctaactaaactaaactaaaatgtaacttaaaaaaaccccaactcattattttgattatgaaagtcagtacctattttcaccattcttccctgagaatcacttgtgggcacactctgccttgctgaaggagcactaagtaggaggcaaggtgctggcttctagttccatctctgctattcagcgtatgatcttgggtgagtcaccaaacctttctcagcctagaccttatcttcatcaaatgtgccttccagatccaagaagctatgactctctcttaagggctaattattctcagtggctaattattacatgtatactttgattataagcattcccatgacacttacatataagattacaacttcaaacacatttaagaagtaaaagttagactagctttgcatattgcctagaattcatttgccaaaaatgcatgtttatttgcttatgcattccttctccgtgcgtgctcaaatatttgaatgctggttatgtgtcagatactctgataactgttattttctcatgaggtccccatctaccgatatgatatttcagaattctcacttgaaaaatgaggaaactgaagcccagactggtttagtgactgctcagggccatggagctggctttggcagagttggggcttggctttgggttttgggacgtagagttctgaaatctttccattatgctatgattgcatggctacctagcttattcttcaaactcagtatatgccacaaaagaatacaccatcaattatagcagcaaccaattaaaggcctcaccacacaatagagaactgtctctttttcaatgatgaatgaccatcaacttagtctgtgaagacgaaagttattctaaaatttcttacactggaaatgtgtaaataattttctttaggaaatatataaaggctattttctaaaggatacttgaatctgagtctggaaaagaataattttgaagaagtcaaattcttagtaccaggtgtacctaggagatattacaggtttggttctagaccaccacaataaagcaagtattatgataaaaaagtcacacaaatttttgtttccaagtgcatataaaagttatatttatactatactgtagtctgttaagtgtacaatagcattatgtctaaaatcacaattcatataccttaatttaaaaatacttcgttgctagaaaatgctaaggatcatctgagcctccagtgagttgtgatctttttgctggaggaggatctcgcctccacgttgatggctgctgactgatcagggtagtagttgctgaagaatggggtgactatggcgatttcttaaaataaaacaacactgaagtttgccacaacaattgactcttcctttcatgaaagatttctctgtagcatgctacattatttgatagcattttacccacaacagaacttccttcaaaattggaggcaatcctctcaaaccctactactgctttatcaactaagtttatgtaatattctaaattctttttcgttatttcgacaatgttatggcatcttcattaggaatagatttcatctcaagaaaacactttctttgctcatctgtaagaatcaactcctcatttcctcaagttttatcatgagtttgagcaatgcagtcacatcttcaggctttatttctaattccagatctcatactgtttccaccacatctgtagttaactcctccactgaagtcttgaattccttaaagtcatccatgagggccggaataaactttttctaaacttttgttaatgttaatattttgacctccttccatgaatcacgaatgttcttaatgacatctaaaagggcaaattctttccagaaggtttcaatttactttgcctacatccatcagaggaatcattacatatggcagctatagccttatgaaatgtatttcttaaataataagacttgaaagttacaatttttccttgatccataggctgttgaatgaatattgtgttgactggcatgaaaaaacattaatgtccttgtacatccacatgagaggtcttgaatgactagatgtatttattgtcaatgagcagtgatattttgaaaggaatctccttttttgaacagtaggtctcaatagtgggcttaaaatattcggtaaatcatgttgtaaacagatgtgctctcatccaggccctgtttttccattgatagagcatggatagagtaaattaagccgaattctgaaaggccctaggatttttggaagaggtcagtgagcactggcttcaacttaaaatcatcagctgcattagtccctaacaggagagtcagcctgtctttaaagctttaaagccaggcattgacttctcttctctagctatgaaggccctagatggcatctttttccaatagaaggctgttttatctatattgaaaatctgttgtttagtgtagccacttcatcaatgatcttagctagatcttatggataacttgctgcagcttctccatcagcacttgctgcttcaccttgtacttttatgttatgaacatggcttctttccttaaacctcatgaagtaacctctgctaacttctaacttttcttctacagcttcctcacctctctcagccttcaaagaattgaagagaattagggccttcctctgaattaggctttggcttaaaggaatgctgtggctgatttgatcttctatctagaccatgaaaactttcttcatgtcagcaatcaggctgctttgctttcttatcatatgtgtgttcactggagtagcacttttggcttccttcaataagctttccttttcattcacaacttggctaattgttttgtacaagagacctagctttcagcctttctaggttttccatgaggcttcctcactaagcttaatcatttctagcttctgattttaaatgatagatgtgcaaatcttcttttcacttgaacacttagaggccattgaagggttattaactggactaatttcaatgttgtgtcttagggaataaggagatccaaggagaggaagagagatgggagaaaggccagttgctggagcagtcagagcacataagatgtttatcaattaaatttgctgtcttatctgggtgtggttggtggcatcccaaaacaattacagtagtaacatcaaagatcactgatcaccataacagatataataataatgaaaaagtttgaaatattgtgagaattaccaagatgtgacacagagacatgaagtgagcacatgctgttgggaaaatggcagctgtagacttgctctacccaggactgccacaaatgctcaatttgtaaaaaacacagtgtctgtgaggtgcaataaagtgaagcacaataaaaccaggtgtgcctgtgctaatttcttcagagaaataaacaatttctttctcctcctcctcttccttttttttttctctccaaaccctagtttttcattttctttcccacttgatatgggattaggcctctaggtagagggaatgatgtcaacaactcctttccctgacctccttcagcatttctcctgtccaattcactgatttctctgattcactcgcattttccctcaaggcaagttctacataaataaatgtttaagtaacagaaagagaagggggtgactcttaaagacttagttgtggaatctggggaagagtaaagagaaagaggtaaattggagaggaatgattagaagaaactcaaaggcatcatttcaccacataaatttatattcttctagtcagtcaccttggacactgaaagtttttctttcttaactccccagacagtgttcactggtaagtagtctacaacagctgctacctggaacaaaaacgaagagctggatacagcggcagatatgagaggtagtgataggaagtttctctccctgatttacaaaaagtaattcaaagacatatatgcaacatttctaatgacaagctttggaatagaagcatctgcactctccttgctaagcttttcttttattacccatttctcttcctccaactctatctactgtctttgactcctcttctttaagaatacctgccttagtgtgtctcccatatacaggaataaaggcactgacattccttttatgttttacatacatcagctgtttaaatcctcactgtaataaaaagtggtagatattattgtggatacacccaaaggggaccacactgggttactgccctgtgtaatcccctccctgtgactttcttttaaacaatagaatatggaaaagtgatacaatgtcactcccttaattaggttatgttttaatcgcaaaggtgatataatgtcactcccatgattatgtcatgttatataagctttcgctttcttcttcttcctcttcctcttcttcctcctcctcctcctcctcttctccttctccttcttctcttatttccgtatttattttcattttttagagacagggtttcactatgtcatccaggctggtctcaaactcctgggctcagactatcctcctgcctcagctcccaaagtgctgggattacgggtgtgagccactgcacccagccacaaaatttcttcttaacacacttgagaaagagattctcctcttggccttgaggaagtaaacagccatttgtcaactacctatgaagagggtcgcatggccaggagctgtgagctgtgagtggtttctaaaagctgagggttgtttccagtcaatacccagtaagaacctcagccaaatagccacaagcaaatgaattcagccaatgagcagcagacacttagaagtagcatcttcctcactcaagcctcaagatgaaaacatagcagggctgacactttggttgcatcttttgagaccctgagtagaagatccagttaaagacatgcctggagtcttgacccccagaaactgtgatataagaagtatgtgctgtttaagccactgggttgatggaaatttattatgcagcaatagaaaattaatacaattgttatctctttttaatagaagaggaaattaagctttggagaacttaagtatgtgagcttttgataatttgagtaagtttgttcaaggtcacacaacccataaagcaacaggactcatacttaaacttaagtcctcctgaagcccaaaggttaaatgctgtccaatccaccatgttgcttttccacaattctcttctcattaactttcattgttgactgaatataactatgtatggattacaatatgacttctggtgattttgaacccataatgtatatggtcttgaagttaaaaataattgaagtagtctgttcctctccccatgccctcctccctggccatcgtgttaaggaatgctgcccacctcttacccctgaaagagcggagaggaggagaggaaaggggctgaatagaatagaggggtagcctgactagcattgaagagaggtccacacccactcaaaaggggaattcagtgaatgtcttccaaaagataactgctccacctaggaaaaagctctgagggtcacaaataatgagcctctcaccaggaataccccagaggcagaagcctagggcctatgaataaggttccatgctctgggttaatgaatcccgcagcttctcctcaatactattggtttcagttggatgaaaggacgctggcagtgggatgactttgagcttgacgagtcagagagcattggttgagatatcttaggggctgtctgtttgatgtggattataaaggctgaaaattcattggtgaggcttggctgggcctgtctgctgttggaccaaattggactgtattatatatgggccacagttaaatcactagaacagtaataaactaggtgtatcaaaatattgacatgccaaattacatgagagcacatacggagtagtataaaccctagctctatctagtctatcatattgctgaatttctaaagcacagtttcagaaaaagctcaacggacagttgagaacttattccatgccaggcccagggctgagtgctgtgagggaaacacagggtgagttttacatagctctcaccctcctagagtatctaatccagtagcatagagaagtataaacattaataactaaacaaccttacagacatttggaattagcctctttggagcaagcaatgatgaagggcacagctggcactggctttaacgcagccaagtaggtgacactaagtcacttggaagaccaggcagcaggtgtgaaaagcttaaggggcaaggtgtcacttgctataagaagtcctaggatttaaaatttcctcccactgccacagagaaagcagtttctcctttgatgaaagaccttattgcagttagcgcctttgacaataggcagggtccagttgaaaggaccatgagttcaatgaacatttctggattttatcatctccaccttccaagcagaaggcaatcacaggaagtgtggagtgaggactttagaataagtataacaaatctctgccctggaggatcttgtgatctagttaaggaatactaaattacatgctaaattaaatacctaagaggcataggagctgtaggagccttattgttacatctccttgagggtccagtatcttctttaatttattaggatattggttttaacatatgtgctatgtgtggttgacatcacaagggagagaaggagaagaaagagggataagaagaaatagcctgggaaaaaatagcacaatggacaaaaatactggctttaatcacacactggtttgaatctgggccctgccactagtgtaattgtgaaaccttgagcaattccctgctacctctgagctcagcttcctcatttggagggaatattactgatcttgccaggggttgttaggaataagcaagataatgtatgtgaagccggtagcatgaggatttgcatctagtagatgctcaaaagtaatttatcaaaggaaggaacaaaggcaggcagggagagaagacagaagatagaagtgggagggactcgctcttctctactgccttattttccttgagtgttttaggttttcggctgaagcttctctgttatataccttcttctttccttttagcaagaggtcaactggtgctgagaacagcttacaattggttcctatgagcacttccacaagattacaggtattcagggaaaaaattaaatcatagtaaaatatgttggataaatgctatagtgaaattaagcaactttttttactacaggaatcttagagcctacattttttaatgtgcattttaactcttcgagatgataatataatagacagcatttcccaagttaacttgatagaaaccagtttttcattgtagatcacatggggttagggtccattgaatacaagttgatatttatatcaagatatcataccagtggacaccagactgtttgggaaaatgtccccagaagaagctgcttggaaaataatctggaagatgagccccatcttctgcataactaagtggtatgaccttgcactaaatcattcaaacctctggccccctggttttctcatgtgcaaaatagaaggatgaagatacatattctaagtacccttctagcgctaacagtttaacatttctatgtgagcataaactacatgattaagaatttgaaaactatacacattactatgttccttctagagaaccagcaattcacttcaacagaagcttcggaggtgttcactgagcagccactatacaccatgctgtgtggtagatgccctgcactgcccaggctccttcgattgatggttcctggaagagtttgccttatgaacaaagcagaaagaggaagaaatctctttggcttggcagtcaaggccctccagagtctaggcatttgatattcttcatctcccaataattatgccaaccttggtctttcactccttcctctcctccatgtggacactcccttcatatgaaagtattccacatgccttctccacatgcccagtcatgtgcttccctccttccttcgcagcattatcttgcctgaaacctgtccccttcctcccctctgtcaatgtaaattctcttctttcaggacaccaatcagatcacaggaagtctgccctgtccccatagtagggaccttctctcactcacttacaattcagcagaccatagtgtgtgccttctcactaagatgatagaaaatcccctttacatgtgtgttgatttatcttacccatgaaatcttaaaaggtagagattcaggacgaccagccaccctttctttctgctggagttctgaacaagaaattatatcccatgaacatcaattggcaaatgggggaaaaaagtcccacctcattcagttcagtaactcctaatccatcttctcaatgaggtctgccttacttaaaatgtcaacacactccctgtaacatttcagacctcctcccttgctttatctcttcaacacttatctctgtctaacaaattgtatgatgtataattatattgtataatttacttattcccaacattttctatctttcctgctagaatgaatactccatgaaggcatacatttttgtcttttttgttactgaaccctggtgctcgagtagtagattagttcctggtgcatagtaggtgctgaacaaacttttttaagtaaataaatgaatgcagaactctctggtcaaagctgagttagagaataccatttaacctaaaggacttcatatggcctcttactctctgctcttctaccttgcaaatctgtgctgggatctttccactaaatgagagggaagtccaatttgaagcatacctgccagtgctagaagaaaaggggcaagagagatagcaagaatacatctgattgtctcaaaagccaaggcctaagatgttttatatcttcccaaggtctagtacctcaggcagggatggcctatggtagaaaagagaagaaatgacaagggcaatgtgggcccaggaatggtctttgatagtggagtctgtcctgcattaaaaccaggcatgtggtcaataaaattaatcagcagccatgtgtagacagcggggcctccaacatctgtccccaacccagtggggacaagaatctagaaagaagtttaattattttgggaaaagaaacagagatgagacgggaaagaaaaatatctcagtgtaaactttgtcaaaaaatagcaccactacctttatattcagcataaaatggtggctcaatgaatattagctgattgattggctggtgttgattttataggcatttgtagaaattctggaagtgaaatagtggcaagtataatgtccatccattttactgggcttagaatccattgctgatatttcccactcagtgtaactctaaccctaactccttaatatgaacccttctctacctgtctcataactaagctagaaaacagcctatatcagaagttgttttctagtgccagtaaacagaaattagtccagtggtctatgcgaaatgtccatgaggtttgaacagatccacgtttctctgacttgatatttgcgtaatcctgaaaaagtcatctaacctctccagatcttggtttcctcatctataaaactaggataatatttatccagtaagatgagttatgagaattaaatgagaacaggatttgatctgttcatccatttaacatttaatgagcatttactgtgttctaggctgcatcatgcactaggaatctagagactaaagagtcagttcccactctagggaacttatacccatccataagaaatgtattatggttctctgaatctaccatacccttttcacctccttgcactacacatggtttctgctttgtctagaggggccacttttcctcctcctacctcagactttagcactttgctaactcttcattactcttgaaggttcacttcaaatgtttccttctctggcaagcttttcctgacctctctgcagcctctgtggagaggctctctgtatcctctggagaagaggtacaagtaaacatgagcaagtgcaatatggtgtaataaatgcatggatgaagtgtgttggttagtttggaaacacctaatctgtttctaatggaggccgcagagaagtcaggaaaagcttgccagagaaggcaacatttgaactgagccttcaagaactgtgaagagttagccaagtgctaacagtctgatgtaggaggaggaatattggcccttctagacaaagcggaaaccatgtgcagtgcaaggaggtgaggaaggtatggtagattcaaagaaccataatcaatttattatgcatgggtataagttaagaaattatggaaaaagagaaggaagaggcaagcaagacacaccaatgggcaggcggcctaactccaatcaccaatgtctctttcagaaaggagacacaaatggttcaactgcataaggcaaagagagtcaaaggtctgtctctgatcactcagtagcaagattctgaagaaagctgctctagattgttattactgagaattactaaaaaggctgaagaaagaagacggtggaaaaattcaacttcctttccaactatccttcccagcaaggtagctgttaacaaagaaaatagaaatggaagctccttagcggggctttgagttttcatcttgatgtcactggagcactattgcagagttttagtcagggaactgacatgaataattttatgttttaggaggatccatctgacactgtgtgaaggatagattagaaaagggctagattagagtcaaggaaagaaggaaattgcagtaattcatgcaatcaatgacaaaggcgataaaagagaaaataaagaagagatggtagatcaaagagatggatagatgaggaagaggaatcacttagcaagtcccagctttctaccttggacagttaagtagattgtgatgccaacatcgatacaagaggagaagcatgttggaaagagaggggagaaaatggggcattaacttttgagtttggtgggcttggggtctctgtgagacataaaagttaaggcttaaaagaagggggttggtcatctaagttgggttcaggagaaatatcaggctatgcagatttgaaaggcattacttttagacaggcatttttcatgaagtctgtgtagatgggtctctgagaagatgagaagatcaaaaacggtaccctggagtacatcaataaataagggaaggcagagtgggagtaaagatggaaggtaaggggagggggagtgagaaaaaaagccagcagagaaaggagagacttaaacagaaaaaaaggaggagttgcaaggagataggggtccccagtatcaaatgtcagagagatgtcagtaagttaacaaatttacacataagaaatcacaaatggcattaggaagggcaattataatggaagcacacagtacaatattaactcagtaggcgactttcattctcttcaagtgtatatggtgggagctcacctaacaccacagctttacatccactatttcacataagtatatctctacccattttcagtaggcatgtttcatctataaccactaattggtaacattaattgtccatctttcctcttttctgcagtacaggcctatggttcacactaaaatttctatttgttgagccagtcttaggactaagtatctgatttttgtcaaaaatcacaaaaaaatgttatgcaactctgctacctcctttctgcactcccttctgactctcaaaatccaaaaaggctgtacctatgcttccagtattttctgtctgtgacccaaaagcagaggaatgctgtgccaggggtgggctgctgaatagccctcactgctagagtggctcaatgggaatcctccgatgaaaggcatgacagaaaaggtagatgttatttctggaattattatgataagaggtgtaatgagaagctcactgcagggccagataggaagaaaagggaggaggtggcaagggaaagaaaagcttccctgggctctttgcaaagaagctctaggaaaatatttgaaaatgtgtgcatgttgagaagtggcaggaaacagaagaatgaaagaccccaacaatggttaactaattctgtttgcttgtttgtatatgaaaaaccaaagtgaaaatcttgacaggaagcacatcttttaagaaacccattgctgactctgatggtctctgcttaaaccttcagataatagccttacaggttaatgccaatgcaatgatatacagaacagtcttaggactggctcccccaaactgctggctgccaatgcgtcaaatggttctgtttccaacaatttactttcactgagttcctgtatacaaaaagtgctgactctgtttttctttcatagatgaaactgctaaaagccccaaagtccagttctggccatcctgctggtgtgttttgctcttctcaggtggtattgtccagataactcaggtcctggcatctctgttcacctgttacaatggcaattacaatgaggaaaagctagatttgcctccagttctgcaaagcccattctaaggtttcagaacagctctcagggtgaggataatattctgtctcaggttctggctacttcactgaaggttttacaagcaggagaaacaggcttacacctgttagaaaggacaggaacccaggagaacaaaaaacaatatttcaacggaagaaatggaattgaaaaatgtcagtcttccacagccttctccctatgagtaaaagaagtgaattagtaattccctgagttgggccagtgtaacacttttgagaaacccagagaagttaagacttagtagggtggtagttgcatatcatttggagagaatcaacattcaaccaaaaaacccaccgagcacaagattacccaaaggcattcaaaagccgtaaaattcttatacttctttccatgtacaagaaaaccagtgagtcaaaagccacatcttttcaagcttgttctcctaacctacctcatcccagaatagaaccacccagcccaaccagtcatgatgatactcaagccatgcctaaggctaaagcaaaaatgctggccagattcttgctgtcagcaaacatcaagtatgaggcttgaattttacagcggtaagaattgactgagaaggaaaatgggcattaggacacttagaagctactgcagattaatccccactgcatcctcaatagaatgagaatgggaccagacctttctctgtgttacattcagtggtgcatgggaggtcagcatagtctctggaattcgactgcatggtccaacgcctggctcttccattgactagctgtgtccttcagaaagtcactaaacctctctgggcctcatgttgttggcctatatttgtttttgtcatattaaatattgactccatagcaatgttgtgaggatttgtatgagttaatgtaagtgatctgcttagaacagtgcctgacctataaatactgacatactgtagacatattatagtgttagctattactaacactttgttatctgtcaatcagggctccagttgcttgagagaattgtcttacaagaaggattggctgacactccctaaattttctgattccttactttcatttcctctgccttctgccttagatggagtctgtgctgttccttacctcttttgagaaaactccacctccactcccttctagcttctcctgtagtgtttttctttacctttccctctccgttctcttgcttctctgcctgtcagttctctccactcatcttcctcaatctccttccttggagaacagaatctagcacactgtaggaacgtattaaagatttgttgaatgaatggtcaaccaaagcatgaacatatgattcagttcctgaatacaataataatttcaaaatataaaaaggaaaaaaagcatcactgtgccctataaattgtttctaattttgaaggaaaagattacagagaaagagacaaatggtcacacgtaaaacagtatctaggatcacagaataaaacgaacaaacaaaaagagactgttttgcagtggggtagggaacactggtggtgttctgtgtgcacgtaaccatgacacaccaatgtgcaggcagttcagcctgactcgaatcaccaacgtttcttccaggaaggagacacaaataagtcaactgcacaaagcaaagagagtcaaaggtctttctctgatcgctggtcgcaaggttctgaagaaatctgctctaggttgttattactgagaattttactaaattttactaaaaaggcagaagaaagaggacagtggaaaaattcaacctcccttccaagcatccttcccaggaaggtagctgttaacaaagaccatggaaccaagtgactgagctgccccatctaagaaatgaagttctaaaaataagctattcttataactaatgaataaatagatgtcactaaaaatacgccatagtcagaacactggaaaatctaaaactgtacttaaaactacagattgtttgaactagatggaccataagaatttaatccaaccctcttgttttatagatatggatggaaaccgaagcccagggacattttgtgacttgtccaaggtcacccactagatggatggcaaagccaagacatgataatccaaggggaagggactcatttctttctgggatactaggactcagaaaacggatcaatcgcaccaagtcaagtacagatgtcctgcttgagtcacacagcatgggattgccagagtagggaaggagagcaggagaggggcctgggagttgctttgctgccagtcagctgactgactgcaaagagtcaataaaagttatcttcaggattgaaaaagtaaggtgaaggggaagtggagcaataaaacccactaggaaaaccacttcctgtcttggagcacgtggttactgaatggtgtcctggggaattggggatattccaagaatcagcttttaagggccaaatagcttttccatgttctaaaagctgctagagctccccttcatgaagaagggcccaggtgctcatctattattaagcatgtttaaaaaggcatttaagagaaagcaccaggagacagatttgtagctgcaatgggaatcccaggagggcagtgcttgcttagagaaggagcagagttcatgttagcgatatgggaagagccaacacaagcaggtgtttggtgttccctgacacctgttggtgtgctcttcagcagttcactaaaaagtgagtgatgcagaaggcaaagccaacaaatgccagatcttcctactatcaatacaacacgttcagaccaataagctatgaccaagatttgccccttgtgttggggggcagggaagaggggagtacagaggggcagaaatttaaaaatcatgggataaatacatgaatctaaatagataatggacagagattagatatttcatatattttaatagtagataaatggttagtttatacgatttaatatatttatgacatcattcacagcatattgtgattatagattataaaacaggatgtataatactatctcaattttataaaaatattcccacatgtttttataaaacacatttataggctgggcacagtggcttacgcctgtaatcctagccctttgggaggccaaggcagtcggatcacctgaggtcaggagtttgagaccagcctgaccaacatggagacaccctgtctctactaaaaatacacaattagctgggcgtggtggtacctgcctgtactcccccagctactcgggaggctgaggcaggagaatcacttgaacccgggaggctgaggttgcggtgagccgagattgtgccattgcactccagcctgggcaacaagagcaaaactccatctaaaaaaaaaaaaagctaaaaagccaacccacacatttataatataaagataaaaggactaaaatgatataaatcaaaatataaacaaattatctctgggtggttgaatttggggtggattttattttcttcatgctcttctctaattaacttttccttaatgaacgactgctatacttttgacatcagacacaaataacaaaatatcgttacataaaagagaaatgaaaacgaaacaggattcctcagattctgaaaaagagatcctcataattagatggaatacatttaagaccacggtttaaggtattttccttctttaggatcttacacttaagaagagtcttttaagcggccaataattcagctggagaataaaaacatagattttgaagagcacagatccatcactgaagaacaataagaatttatatttgggtaaaaatatttgtgtccatctattccttaaattgtcaagaaaaaccctaatgcctgagttttaaacaatgagtaaaagaacagagctacattgttctgtgattgcctggcatggtctgtttttgatggggtggggtcttgtgaagcatttcttcccaatgatgcatgaatgagaaccaccgagaagtcaggcttcatcccctcctctcctccttaaagtcccctgccttcaccttgctgtcaggctgtcctggctctaccaacctcttgggtggtgactacttctccctttcctttgctgattccactctctcctcttaccctgtacccacccagaggcatgtcctgtagcccatgtccttggtcctcttccctctccttctgttctcgttagaaactcatcttctcactagccttcaattatcccctccgtggagaacatccctcagtctgcattcttagtggtatcttcacaccagaaccacaaattgacatttctacttccctcctgactcaacagtaactcagaattagaaatcctaaaattgaacccatgaaactgcttccccgtcactaattttgttccttgttttgatgtcccagtgtcccataaatgtcccatttcctgaagttcaattcttcagtggtcattgtctcatctttcccagtaggttacagatttattccacctctgccatcactctcgcagccacctctgctccatgattgtccacattcattcaggcccaagatgactgcggcattcctgcaggcacctaagttcctacaccccatcacagctgctggatgaattttttgaagagaagtcataatcacatcactctcccactcacaaacatttcatggcttccgattgcttcttgagttaattcaaactatctttgcttctaatgctctttaagctcaatctttacttaaagatgtctctctacccccttatttgtacctatcacctagacaatttttttaaaaaaaaactcttattcaataaacaaatattgtacttcacctgttactccctctgcctgaaatatcatcctcacttccaatattactcacctctaaaaccttccctatcatttaaagcctatcaataaaatcatgttcttctcaaaacccttcctgattcccttaaccagatatgtaatttctttttataagcccctttgtcttatcatttattagttatctattgctgtgtaaaaagttataaaacttagtggtataaagcacaaatattgattatcccacagtttctgtcggtcagcttccagacacgctttagctgggtcctgtggctcagggctgtatacagggctgtatggcagcgggcaggccccagtcctcatctgttgctactcagggacatcagttccttgtcacttgggcagggttgctcacagcgaggtggctggcttcccttagagcaagggatgcaagagagagggccccaatacagaagctagtcctttcatgtgcacatctcaaaactgacatctcatcacttcactattctcttccaaataatcaagttgctaaatttagcccataactgggggagaggaccacacacaggcatgaataacacgaagtacaatctttgggggtcatcttagcggctgcctaccacatcatattcttccctgcatcatacctgtgtgattttcttaacccctctgttaaaagggtacatttcttgagaacagggtgtctatttacctttatattttcctcttagcacccagcacagagtccttcatagaagagcccttcagtttaggtttgttgaattgaactgaagctaactgattgataaaagtgctaactctggatacaggcagcaaaagcaatgcctccttctcgtggactttgagaatctgctttcacatgaaaagcagaaacaccactggggatcagagaagaagaggttcactagagctttgtggagtagaaaaatgctatatggtcaatgttgttctatgaatattaggaaattccattctgagatgaagtgtttctaacttctggggtgggatgaagggatctaaaatcgccaaaaagagactaagcacttcctttgcatccttatttagcacttgcacaatataaagatacacgtgtaattattgtcattattaacttcccttcgcttctagccagactgttcaaagcctcttgagtacggctcttctgctttgacaacttcaacctcatcttttcttgactctgcttttcctcctctctctccacagtttaatcagtatagcatgacttaaaatcatcaagctttctctctacacttttagactatatcactctgtttttaattgctgtcagttttccattcttacatttaagatgcaacattctggccctgccttcatttctaatttcagtttttcctatattcacatgtttcatttacccagcccctttccttcattctcctagtcctctagctgagctttttctctgttgaagccttcctttctttgctaggtaaatgcccttggatcactccaattctctgtaaagctcatgcctgtgaagccattccgggtgttccttcagttaggattatttgttactctgccaagaaaaaagacaaatgcacactcctcatgtgcctaaaacctttaaatgcattaaaagtcgatatttctgtatttcattgtctgacaaacagaaaacccccttcagacaagtagtgccttttgccttctacacttccagggtacatctggagattccgtgcaacacagaactgtaattgctccgtgtgcttgcatttccaaggcagtgctcagaattcgcagctgccccctagagactccaaggtaaactgcaggagcaatcaaaaggctgtgtcagctccataaatgcccaatcccttaatcctaaatctacccatttctaaggtatccattttagattttaagcagggaatgactctttttcgaactcatccgtgttctaggagttgcaaactccagtgtctgcaggggctaggtagataattaatgaaagaggtgggacacttgcagggggctgagatgaactggacagcatgtattccaaccaaaggcggccccgcagaatgtgaacgcagtgttgcccatcttctgatttttcaggaaatccagaatctggagttctatgggaatctgaatttttaaattttagaaaccaatttaatctttaaatataccttttaggccgtatagaacatgtcgatggcccaaaagtagtctgttgactgccagtttatgacctttcctatacaccctcaccaggtcccatgttgtgtcacattcgatggtacagggtcaactggagacaaggaagtgaagtaatttccgtaacagctgtgaaagaaagccaaaagatgccatgctcacttagaacagtaggctagagtaggtaactcactaaatgcagttcttattaaacaatgaaggttaatgcttcttgattttttggaaaaatcaagcataaatattgtaatgttcatagcctgatgtgacagattatataaatccatacccattctctaaaatctagcagcgagaaaaaaatgggagataaaatactactcatatttctcctgtggcctcaaagtgggcctgtagcctcaacacagaatctgtatacaatttaggcagaggacttgtggacataatttggaaagttcttacataagttgctagtgaaatttcttatgacagctgctgaacatactctgaagaaatttaactagcaacttatttaaaatgataaatctatcaaaagcccctttgagactggccttaagagtctgacagccactgcaccctgtcttaccaccttaagcgtatatggcactatctgaaatgatcatatgtattgatttgtttatatgtttgttgtctggccccactcaccaagacacaggctccttgaggaagggaacttgttggtcttgttcaatactgtttccccagcacctagaatagtgcccagcccttagtaggggctcgggaaaatattcgccaaatgcataaacccaatcggcctcgtgtcagggaatgtcttgagcaactacatgaagatatcaggtaattaagaatcttctggagtgagtagggcaggctttaactttttcttactgggctactggctctgtcctccactttatgaaaggataaagattcagttttattataaaattaatggctggaaaataaaatgagaacagagaacaatgacagagtggcagccttaaatatctattaagcagatacttctccttgtgaaaaggaaatgtctgtgatcagcggcccttatgttttataggtcaaaactcagattactgggcctcatccctagagcttctggtgtagaagctgagaatctgtacttctagtaggttccccggtgatgctaatgctgttggtccaggggccacactttgagaacctctgatgtaaactgtgaaacgctattcagttgtctgttgttaagaccattcaccactcccctcacctaccatttcaccgccatcccctttatgttcaactatgactaaccatgactatgggcatgtcttttgacattaaaccactttcccttgcagaaggaattttttttaatggttatgagctaatctatctgctgcagaataaggaagacataaagggaaaattggcaattctttaagatcaaccacaacatggtggtttattacagtgaaacaacacccaagtagatcaaatagcacaaggacacactataaggtttcataaactgtgattattgcttaatgtgttttggttgtaatttaatggttactgagaacccacaatgtgctatatcaaaactgaggggtttctaattgcctgatttctgagtgataggcccagcatgggctgctgtgctatgctgtagactttgtcagtattttattattaattaagactcaccttttaaaaatccctgtgcaaaaagtcattttagaatgaaggaaaaaagcttgctcatttcaaatttataactaggcacatcaaaaatctatatactgttttctagtttcttcctgttagtgactaaggccaaaacccaactagtttgtgtgtgtctttgtgtagttaagtatggtcaatttttccattttcctgttttctagaatctaatttcatttgtattatcattggtttaaaatgtgttcaagtaaaatgatagtgaacacgagagtagcacttgctacatgtcagatattgtgctaagaattttacatgaattataattttagttttaacaaaattaaaactttacagtttgaggtaggtgctattataatccccattttacagatgaagaaacaaaggcacagaaagggggaataatatttatttaaatttatttagataaatcactgcactgggcagaggtgaccaaaatatggtttctcttggtttttgaactgtgtgtcaaaagacaagttcaagaatccaaggtcaagagaaaagcataagacagggcttaaggcataaaagcacaagaggtgctggagaatagttagttgcaattattgggcatggaggctgaatgcagagaggtgaggagggaaaaggaagggaaggtgggtcaacctcaaacaccatgattttggggctggggtgggggagaagaacactttgccctgtggaaatgtttcccaaatttcattcattcaagtagtactgtaacaattttgccacatctgtataccacctatactaatttttgaaataatctttaagaatatatgtatcaaaaaattcgtatcattactataaatgtaagttgtgccacttcccaaaagtagaagataactataaaaatagatgattatttaaacaaaaaaatactcatcccttctgaattaactcaaatactacagttgaaattcacagccacatgtgaggaaacactgatgcagcaatgatgaatttgaagatcagtgttcttattgttgaattttattcctactttttctttcttatacttttttttaacttaattgagtttaatttatctcattttatgtaagatctcaaaactcctctcccttagctagttgagttcataaaatatttggttgcttgtgtttcaaataaagcagttaaattttcatgttactgtcccactaaggtttaagagctgtttttgtaggtcagctattttaaattcccctcagtgttttgacatttctctgcacctccaacagatgtctgatcaatggggctgcagggatacggtgccactgccatgatggttgattttagaaaagcttttaattcagaagatgactatttcctcgaaaatcccttccatgcaatgaggacctagacagctgtttctgtaggtagttatggcctttgtaattcaaagaaacatgttctttcctcacagtttgaggagataggttctgagttcctaactgaaaagagagggtgtgtgtgtgtttgtgtgtgtgtgtgtgtgtttgtgtgtgtgtgtgtgtgtgtgtgataacaggaattataagtatagaaagatacaagaaagctttctcccccctttatctttctttccctctctcctttccttcctttcttccttctatttttgctaatcacagaaaaatgttacactgaaatagccagtcacagtctgggctaaccagcctccacacctccagctccaccccagatgctggaccatttcttaacacgtagttttaaaactcaagtagcagggtctgcacatttctatagtgtgacttgtcctcttgtctatgaatttatccccattgacattgctacatttggatcccattagtctagttgtactcttatactccatgtattgaggcaaaaagcacactggacacaaacggagctagatgtaaatgtctacacccagctctgccactccttagctatgtgactttgggaaaatcatgtgacctctgatcctcaatttacttacatgtacaagtatttctcaacattttaataggaatcaaaatgggatcatatatgctaaatttgtccattaataacattgctaataacatgttacataaaagtcagatgtattcatggccaaatcttcctaatgtcccttaattccaggctagactgtctgatcatttatatgtctttcccagatcctatagggaaaatggaattttgtgttcacttttctataaagagaatgctgaggtgccttaaatattcactatgaattttacctcaaagggaatattctgttcctttgccagcaaacttcctttcctatgggatgaatgaagaaaaacgagtacatattatttcaggaagagtcaaagatgatgacctcagaagacatctgacagcaaacgcttgagctagaaaaacatggaaaggcatccaccagaagtttggtgtgagcaggaatgtggtgtgcacctggagaatagggcagtggagcacgggcttctttcccctcgaggtccatcactccctccccagtgactgccttctatgtgcactcttctccttccagggtcatactttctttctcaccattcccctggcacagatttgctttaagtttaaaccttcagaacagctagctgacagaactaagacctggaacgcctgtaaaaccagcaatgggccacctctatgacagcgaaggacacctggccacagaagagagagggagggtggaaggaaagtagaaaagctcctaagcaagccaccttaagacatctctgtcaggataaactaaaaggttcaccaaattatgagcagaaataaccctaacagagaaaattataaaatcaccctgaataatctgaatgctatggctgctgtgggaaatttatgttcatggtttttattaagagcttttattatttttaaattttatttttttgttgttgttggctattacttcctttaaaatgtttgtaccacaggctgcttggcagagttaacatgccaaggtcagagcttctcttcctgtatacatgaattatttctaccctgtttctggccagctctcataaataggtattgtggagatacagcctgtgcatggctggtacaaatccatcatcactgcaggaaaaactcaacgcataagatcttcgggtgctagatcaataaaggcatgtttgcatatgaaggacaatcaggtattttagctttaatgccaaacttcaggtcttagctaaagtcaatatgctattaatataggcacaaagtagcttgtttggtgaaaaatatgtaaaggtatttttataatatactgctatagcagcaagtcaggtatgttctatccctactggtgaaagaagggcattgctctctcccttctgggtcatgtatgaaccacagaatagaaacagcgctggaaagggtctcatactgagcagtagtcatatgactccttgggaacgtgagtctgaattttacaagccctcaactttcaagaaaatgaaaccaacatgatgaaaaatgcagacagacatggaacacatggacaaccccattctctgtgatgtaactaccaaagataagaaatacatatctcaacaaagttagaaggcagcgcactgtatgagaagatcaaaaagagaaaaccctctgggactcctagcagacccgaaataacaaaggacagccttccaccagactgcatatgtgtcccctgattgttccagaatcgatataaacaaaccaattcccaaattaagggttttcatttttaacatttagggacattggatacaaaaaaaaggggacaaatcttctcactttaaaaagcaatcttatggcatcacagttagaccaccaactctgaaattattttcatatgagaaccagagtttctatttaacatgcatatgaatgtctaatcatagggaaccagtttgaagaagcatgttatattctcacagtgtaatattcggcattaagtttcatgcttttgaaaaacatttaataaaaagggaacatgtcctcaatatcctaggaagagaaaaaagtagattgcaaattatccatacattaagatgccaattctgttgtattattctgtattgtattacagtgtacacacagaatgcacagaaaaaaaacactggaaagaaattttaaaatataactgctaattctttgtaggtgcagatatgggtaaattttattttatcccttcaaatgtctttaataaacattaattacctacataataagaaaatcataaatgttgtttttaacctagatataaacatagaattttctcatctctctaccactctttcttcttcaacaccagtactggaaaagcattgtaaaataaaaattagaaaaaattgtttagaggactcagggacaaaccacagataactgtcatgaaacaaaaatctcaataacatttaaatgagatggatgaaagccatcttttggctttgggaacactttccttttcactgtttttcctgaagccaaggttaggccagcacttcttcagtctctgaattcaattctgctttctctgtccatcagcatgtacaggtttcaaaagtaaagtcaaccaaggttatcttgttcttttatccttttcattcagtggctgttgacaagcactggaaggcaaccagcctttctgaaatgatattccaaagtctattcccccaatacatcctgctcttctctttgaattatttcataaatgtgcatgggagtagcagcttgacattttggactgagcctacagcagtgttgagactttagggattaacagcacacctctacctcctcctctccatggctgcctcctgtaatctctttctggaaccctggagaatggtgtagtcaaacaggatgggccagggctcttggagctcagtgaacaaggaaacatctggatgtgagggtctgcactaatcacaactcagaaaaacacaacaaaatatgtaatccagtggccccgtgtcattgtcgtaagtaaaacacacattaatggagtctttactaatgaacatcaacccaatgttagatggtatcaaatagtaagatttaaaaatcaccttagtttatagaaatgttaaacatcacaacaagcactttttttattgcaatgtacttgttttgtttttcccagccaccaggaaagctatgatacaaatttgtgggggcagtccttggctcatgataggtgcttaataattatgtgtgagaaggaaagaaggaatgaagaaggaaaaggaaagagaaagaaggagaagtaaaaaggaagagaggggcggttggaaggggagggagaggaggtggagagggaatggaggggaggtggggaggggagggaggggaggtggggagatagggaggataagccatttagttcacgcattgttgcttgcacgggactgtacattacagagagacaaggacatatacaattttgaggactttcaaagtcatcccctggtgttgttaacagttccagtactcaacacttctctctgttaagaaattctccctttagctaatataaaccctctctgcttgatcttaagcccactcactctggttgtgtctcagaggagaaagtgaacagctgatctccacacttggtacaattattcttcacacatttaaagagaataagtcatcacctcattgccttttttttctttcccttaacaaccccaattcccatagcctttctccatggatcctgtcttctaatcccttaatccaatgatgcatattagtactcagttcaaagtcagtaaaaatagcatgttgtcaaacggtggtatcaggagatcctgaataaacacgcttgccatgaggagcttctgtttcacccccttagatgccttctgtagagcctggagagagcatgaatatcccctggcctctcctctgaggctgggaggtggaacaaagtctgtccagctgtgcccaagcagtcaccaacactgcacttactggcctgctcagtgatgtctcacaccatgctaggcacagaggtatagtggagaggcacacagatgtgccagtttcttctgagtgagtgaatatgtatgagcggggatggaggagctgttttattttgccagtcaaaagctttcaagtaatatcaatagaggtagtgattgacctctattgtataaacactgatttgatcattgtggactatgatcaccatagtccttaggggctaggatcacagagcccccacaccctggagttggtgctacctcctggacatgaggtcaccagagacacagcgtcccttagcctgtcttatttattccaggctgcagatactggcagagcattctgttttactacattttcattgcttcagctcttgtgggggtctcccttttctcggtttggttgcactccttccctccagttgatccatccattaattcctgagtactatcatgggttcaaaactgtgtgccatgcactttcatttctagtctctcctttactggtggatgtggctgtgacatctcagagttgaaagccatagatggaaacaggtttggggagtccagagaacgatctacacaaactgaaaatgtttttaatctacataaggaagggagttttctggtaggtggaggcagggaagagggagtgggcttataaaacaccctcttgtctctttctgaaaaagataagcagagatgcaaatcttacatattctcctttaattctgacccagacagtccctttaaggtctgtttacatctcagagcccaaaaatgcaccatcatcatttcttgaagtcattactcagagcacacccccactgcatttcatttttattatcaccattttaggaacgattaaatggaagcagagagcagtagcaatgaagcaaatcatgagaggctctgatagagacagaagccttaaagcttgttggaactgcatctctgtgccagactatttttaaagcaagtttatgcagctgtcccccacttaggagccttacaaatgagcccagtctgcacacaatgattttttttttcaccatttctaccctttccaactcaccatgctatgtctgcatgcatatgtgtgtgtaaaatatttctttttaaatgtccttctccacattcctacataccagggagatgttcttggctttctgtgaatcaaattctgatccagagatctctttgctattctagccccctaagcctccaagaggttccttacataggatcccattaaaggttcacaagagcagatactgttcatttttttattaaagtagttgggtaaatgtatcaaatctgtaaatgtttggagtattttcagaggagtacataagaaattggcaataacaattgctctggggaggattccagagactgggaacagcattgctctggagagggaagcaaagggtcatagatgagaagaggactttctttttactggatactcttttgtgccatttgattttttaccatgtgcaaatattaccttaaaaattacacaagaagggtattgactaccaattgacatttgttggagactgactgtttcagtgactattcactgatgtttgactgtaaaacctctttgaatctttacaacagccttatgtaaaaccctatgttacaaactcaggtagtatccatcactagctgataaatggcaacatggagaactgaactcagttctgatttccaaaaccacagactatgttgtgttgacttcaagtcttcccaagggaacaaaatgtgtaagactgtagcattgggactacttttaggaacctaaaggaacattgggaagtcgtatcacatggttcacaccaacaacttaatcttccttgacccgagatgccttgttaaaagctggtcacacatgtatgactccactgggagttgggcctccctgacaattccccccaagtccttccctggcactggggtgctcactccagaggaggggaagttacctgttcccatgctgtctccagtaaacttctatgtctaaatgggagattttcagggtagaagtgaaatagcttgtcaatattctagttctcctaagcatacagattcttcatttatttagcaattatcttttgagtggtccagacactgaaggcaagcactcttctgaagggtcagaattacagaggtgagcaaggtccttgcccccaggaagcatccatcctggtgtgaagaggcaggcaataaacaaacaagcaagcaagtaagcaaaacgccagataatgagtgtattcaggaaaattaaaatctactgttagacagtgtgacggggtgactacctcatcatgggtcattaggagggcctttctggagaaatatttacttaaatgacaggaatgacaaatatgtcctaggagctatgcccttcaaaacaagctcaggttcctgtgtgttccatccctcacccaatttcttttccaatctgctatttatttgcaaggagattttgcagtcccagaagttagcactagaaaggacccaagaagtcttcttagtcccatgccatcattttagagatgagaaaagaaaaatgtagaaaagtgaaaaaagcaggtcctatggctagttagtggcctgaccagtggctgacagtcctatctgtagcccatatttcttccacaaacccacattcctcccctgcttatctgtccagtgttcaaatcctccctgtagaatcttcaccctggtgcctgcctccctggagtccactgacactaaatcctccctggaccaaggggactttctgaagcagcattaggcgtcttgaggatgatgtcctggggacgaggataacagtggaaggaccaatacaactttccatgatgcaatctcaccacaacccagccattccctggagccacacctggctcctgccatcctccctgcccacaggtgagccctaatagaagccttcaagttggggagctacatggctctatgacctcaatgaacactagacatctatcttccaaagtgttccctgggttaattgagtcgatatgaaaatgttctattctattatctcaacccctcccaaatgccctacaaaaagattaaccacagaattcctttaaacagcaacttcctttagtacatgtaaagtatgatctacaaaaattcaatctacacaaatattttctcctgcccctccccatgaaacaacagctaccgtatcaagggcaacaacataaacttggattcttaatggtagattttgggattcttttattatgtaatgattctcatacatgctacaaatatttattgaactgctctatgaaatacgcccttacaggttgctgtgaggacacaattgagctaaagacacagcctctgccctttggaagcttgcatatggacaactctaacaagaggcagatgtgatgggtgctaccacagacgtatggacaaaatctataggggacaagggagtgtgagattttatctcagtcaaagatgaggggaggaagctgcaacattttaattgggtttcaaaggatggttatgattatataattggataattcattctaggaagacacatcatgacatgtacaggggacgggacctacaaaggcacattctcagaacaagaagaagcccagggtagcttaattgtgagacaggaaatcatgaggaggagaataaaggcttggaaggcagaccagagccttgaatgcaagaacagatcaagtctagccccagtccataaaccatagaaggctcaagttggctttgggcagagaaggaacatcacagtcagaattgtgcttcaggaagctcattctggcagccatattttggactaatctgaaggagtaaaggcaggtaccagggacaaggaggcccatttaaaaaattgtcacatagtccctggatcatatataaagtaaagaataaattcaagagctagaataaaaatagaattggtgagggaagggatccaaaccctaggaagtagggtctagttctagaaaggggtaggggatgcaggcctcagattctggactcaagaagaggagtcaatatgacctgatggtgagtggtgtctctttaagaaaaggctgttgtgagatgcctcctcctgcttgagacagtaattgtgagcctactgcaaagaaagctgccccctctgtacatcttatgagctacctatgaagcctcagttattaatagttcctcttctagagacagacagaagtgcctgttatacatgaagaacccagaacatttcttaaattatgacatctctacagcagcagtgaaagcagcttgattgtagtgaaaagcagaagcccagggaacaaccatttctgaacaaatgataactcagtggagggagggcaactttaatcaagaacatcaggcaggccaagcgcagtggcacacacctgtaattccagtgctttgggaggctgaggcagaaggatcacttgaggccaggagttcaagaccagcctgggcaacatagtgagacctcatttctaccaaaaatttgaaagttggccaggcatggtgatacacacctatagtcccagctacttgggaggctgagctggaaggacaggttgagcccaggattttgaggttgcagtgagctatgacagcaccactgcactctagtctgagtgacagaatgagaccctgtctcaaaagaataagattaaataaaaagctggcataatttaagccttataattgtgccctatctgacaagagaaaatgcatgatagattgaggtctttcaacttgaagaattagatcctggattctactgcctgagccacacatgcctagtttctcgggtgagcattcacacattcacataactagctgtccagggctctctgtgatgaggttgtgaatttcaagaagtttatctctggcctcattttctggtaactctctctagaaatatatagctggatttccattctaggcagaactatgctaacattttgaagcccattctcagccaattggtccatggaatctgtggaagttgtcttaaatcagtttcccaacatgttttcacagaatatgaatatcatgaacaaaggggtctcaaggtagaataattttaggaaattccattctaaataaaagtaaagatgtttctttgctataagacacctctgaacttccaagggttagtatgttccaagactctcctagagtgagaaacagtaggtagcatctcccaaccttatgtatctgtaaagctatttttcagcaaaatgtcttgagagacaagagcactgcagaacatatttggagaaaaatcagtgatgacattactctcaggaatacttgtattcaactgggaatctggaataataaaaaattgtaatactaattgagtgcttactatgaaccaggcaactttctaaatactttacgtatacttcatccttatacctgttggtactattattattattttccttctctagatgagaaaactgaggcatcaagtagtgaagagatttgtctaagatcctacatagagctgggaattggacctagacagtctggtgcccacagaaattaatttctgatggtagaatttcaaacactgtgatcaactggcagtgggagagattgagcagagccttgcatgggaatccttcaatcacaataagtctaaacctttcttctcataaattcatctttataagcttcccagatgctctctaggacacaactcctgaactataccactaattcagtttcttcaccaaattatgttatattgtacacacatactctcccacaaaaacaaagtcaagattcagacagcaatgcaattatcaacaataaatggtaatacacaaagaaaacaatcccttgattaaccaaaatagcaagtaaatgaacatgcaagtttgagaaatggcttctcctgtgtatcaaggtattgatcccttgctccacaggtctagggacaaaagccaaaggactactttccttcattgtgttgcaaaatttcacatttctactctactttgctcaagaattgtcaaagacatgtcttaccctttcccacttcctctccttgttcagaagaattatcaccagtttcgggtgcatctggtagccatcttcactgaaggacaaattcctcccctcaaaagtgacattgatcagatacctgtaaagataaaataaaaggaagattaaaagtatgaagagggtataccatgaacaaggcagtcaggtatatagagagaaagctggctggagacagacaagtaaatagaaatacagataccattatcaaatttggtacttcttgaactcgcatttgattatgcaatagagtcatccaagttttcacatagtaggaatcacatgaaaaagtaatataaaaattttaaataaaagatgtttggtcaccgcatgttctcacttacaagtgggagctgaacaatgtgaacacatagacacagggaggggaacaagacacactggggcctgtaggcagggaagtggggagagggagagcatcaggaaaaacagcaaatgcatgctgggcttaatatttaggtgatgggttgataggtgcagcaaatcaccatgtcacaagtttacctataaaatgaacctgcacatcctgcacatgtaccccagaacttaaaattaaaaataaaaatttttaaaaaggtgtttggtttaagttcagcctagaggtatgactttgagcaaattactcagcctttttgagcctctgtgtttttccctatcagtgaaaactaggttaataaagggacctacttcattaggtttgtaaggcttaaaggggataacttaggttaaccacttaccatgcggcctggtgcatagtagagtctcattaagtgctaacaattgctatcaaaaaacaaaggtggattaaaggttggaagtggtggagataagaaatgaaagtaggagtgtaccaagacaactttctgctaacagaggtggcatgtaggagcctagagtctccctctatcccagagatatgcacatactctttaactcttgctaaggtcttgccaagcccatacttctaagagttgtgagatgagtacagtaagcagggatctgatatgacaggatgcatctggaaatcagggctattacactatgtatagggaacagaaaatactaaggaatgggaaaaggtgggaaagggatttcacagagtgctctggttacttgtgcatagattagcagaaactctggaggtaactagagtcagaccaatgaaactgtcttcctcccggacaccttcacctcagcccacccttttcccctctggctgctgtcatctgatgagcagtcccttcactgggaattcccaaaggcatgctcattacaactgcattagtgcaactgcactgatggtaattaatgtctttttaccataatggcccaaggaatcaataatgattagctctgtgttcatatgacatgttactctggagccttgggcttaatgtttcttgtgagaccatgtccctgctaagaagcaaaaggggtatcttgtaactgcagtgaggatgctaaaggaggcagcttgaagactctttttttaactcctctcattcaatgaaactgggaggtcttctttgattcttccaggtaacattaggttaaacaaccaggttgctaggatgcatattcttctggtgattctaatgatgcttatgcagcatgaatcaaaccctcatggatcacttctcatttccagaactacctgggatgtttaagcctgtcattccctggtcctgtgtagcttcacaaatgcaatcaagaacacagaagatcccaaaggagtagcgattcctagaatcttagaattgaaagagattttcacaatcaactagcctaccacttcttacagtttatgcttcccttctatatcataatattggtcttcttagctcttcttgaattctttcactgatggggaacttttaatggcaccttctgggctcaaggtaggcatctcggtgttggctacttagttctttcttacttaaagctgaaacctcctcccctgcaaccctttgatacatgtttcctctttagagattctacagtcttagtctaatccttcttctacatgagagtttctcaagtatttgaagacatttatcatacatcccttatgaaatcaattttactctttaaagacctgttaaactcttttagttccgtaattttaacttgatggattaaaaaacaagcacaaggaggttaaattattttccaatgttattgtatggcagatgcacctgacagcaataacttatgcataccctgagaatgaccctactgtctaagaaaaatgttcagagtcctaagctaagaaatcttggaatagccaacccagagattcactttttatctatgaaggacatctaaacccccagttcatctgctggaatgcaggccatacagggaatcagagccctttgttttgggttaaatgaacgtttaggtgaacattgctaagtgaaaatgctatataaactgcatgcattttacaaatggtagcagttctcctgtccagcccaccaccactggattgtccttgtatgtaagtttccccagtaaatcctatgtctcattcattatctctgggtctcttcttaggcctttcagatatggtgccatcgctattggagtcaacaagggtccagtatgaccgttacacagctaattgggagcagaagtaacattttaagcaatatctccagtttcatgtcctttcctgacaccagcctgattctcatatacaacatcagacttagcatcccaaggcctttacatattcctcatatgccatggcttcgtgttttctaccatcccaccttggctgctctctccagacacctccactcagtgacatgtagcatccccaacacaactcaatgctcaatctgctccacttcttgccctgttcctcagctctcagcccagagcggctcacccaagcccatcattagtgtgaaggtaatattcaggtctcttatagtttgcaatgactctaacactccaaccaaaggccctgaagaattcattgcatagaatataattacaaaaccatgagacaggatattttaaaccaacaaactagaatataagcactaatataatatacttgaaaatgtattcttactacaaagaccctgaacaatttctggagtcttcaaataaagtttatgagacatgtaaaacaatttggtctcatctattttgaaaggaggaaggaaagaaggaaaaaggaagaaaaggaaagaggaaggaaagaaggaaaaaggaagaaaaggaaagaggaaggaaagaaagagaggaaaaggaggaaggaagagagagatggaggagagaggggtaaggaagaagaaggataggagggaaataaattatctggtgtaagcatccaccttgttatcagacactgtgctgaataattctgcctttagctaaaacaccattaagaatatttaaaggaaagtatctatttcagaaggcaattacaaaagagaagttccaaaaataattcaattaataagcaacatcaatggaataactatatagcctctcaagatgacttctttgaaggggacagcattgaattaggtgtacaagttgagaaatttgaacttgcagaaaataaatcacactcatgagcaatgtaattggtctgtaaatttttctggctattcctgttccagcgccttctgattttccttagaaattgttctctttctggggtgctcctcctcttccagctctaagttcattttatctacctaagcactcctcacatattttacacttatcaaaaacattagtaaaattttatgacaatatacaaaatattcttctccaaagtatcctttcatcattcatatctgtcagcagcatatagattaatcattcacactgtgttttcatgagtaatttcttgtggtgtgagaacatttagccattactgaggagcatgcaaatatacatcagccttgagcaagatgccctttgaatagcagaacaaacccatccattcactggtaatgaaaagtgtgaaaaaataattgggggtgtggtcacttctagacatgtgatcttggcacctgaatctcagttattcttctctaaaatggagacatcattttacttccagcttatcagagaagtctgttgtgatgaccaaatgaaagagtggataggaaaactatataaaatatgatacaaatataaggttatttaataggaaaaattcagaaaaagaatatattagcataatttgagagtctaaaggcaagaaagttgcttgattttaaacctcagtgaataagtgtgataaccacattttaacaagactcaattatcaatgaaatacatctgaaaaatggagattggcttctacatatggaggctaaactagatcaaatggctatattaatcaatttaactttccataagacctgaaaatatccaactacccttggatctggctgtactttgtcgatttttaatattaattagaacctcgaaacgttcatgtgtgaatcctgggtaaaggattaaattataattaagagatgccatagctattctatttctctccaaacatgtcatcctcaagtacacagtcaaaaagctttgcttcaagtggcagccaaatgcagaagttctgcccatgagactcaaatcccctggaagtcccatcaaggttgtgtgtgtgtgtgtgtgtgtgtgtgtgtgtgtgtgtgtgtgtgtgtgtattttaaattgcttgatttgtctctagaatgtagtttgaaccttaagaaaccagatggtctgcctcatatagttctaatattacacagaatctcacattgctaaaactaggagagaacttagaaattatccatagagaaccttcattttagagaggagaaaataggtcccaagatgcaaaacaactttgccaaggtgacctgcctgttcaggactggagcttaagtcttctgactctcagctcagggtccttccatgatcaccaagtgaagtaaaatcagttccacagagctccagatgtgcattttagcattcttgaatcacatggcacatcctggactatatagatccctaatacagactgcataaaacaaaatctatcttagatgattaatctacctgcttgcctgcttgttgagaaagagcctcagaatcctgatgggctcagagccaatacatttgctttatatggccaaagtcacaccacagtgagcttaatgggatcaggctaaggttaaagagcccttctgcctctctgactctggccatgccactccaagctcatctactgcaccacgttgatacccacagcaatgatttagcggcataccttgagtgggaggcactcgaaggagctctaccagaattttcccagccaaccaacagccctagaactacagtacttactttaccccgcatgtctttacaagcactagatttttaaaattaatatctgctaatgtgtcaatcagagaagagatagcatctcatttcatccaatcttttcatcttcagatgaaacagacaaagcccagcagggcttttgtgattagatgacaaggctgagaataggacccaggtgtcctaacccctagtccggtgttctttccatgtgccaccatgcttttaaaaagtggcggtttttcatatctctcattttccttctctagctattaaaagtaaagtgataaaagaacacagttccaggcaagggacaaattcttgaccccctctttttttgcaattttctggctctgaaaagctgtaactctgtaactttgtatcatgcatgtgtcaccttctaaagccttcagcttcctcatctataaaacaggtggttcataccatcttacttgtctggtgtgagaagctacagggaggatcctttgacctgttgtttatctctacatttcttttcttcttttttaaacatagtttttagtgtgtatatgtaaggtatccaacatgattttatgggatacatatagatagtaaaaaagattactctagtgaagcaaattaacttatcacctcacatttcatctgattaatactgttcttagtaatattgctataattctgttattattagctgctgttattactctctaccatgtgaatggaaaaaacacaattcttttgaaagactagagtttctttttagaaattatgattatttatacacagtacctctagaaatagtagaaacaatttcccaaaggattagaaatagtggacttaaaacttttaaaagctacctaattacagactggtattggagaaaagaggcaaagatatttaaaaattagattttcagtgttctagtttagatagactaaacagaaatttctgaatttttcccagctaagaaattcataattatcaaaataaatccaaaatgattaatccagtttagcgtggtcaacatggcaggcaagattattacaatctggtcaacaatgtcctctttttaaggaagaaggatttgaagaagttttaaatgattcctttgagatatgtcatatataaaaatattaaactctgtggttggacaatataattagaaatgccagtttcctaagctgttcttttaggcaaaatgataccttgtagagaagctcaggaataactaatttaaagagcagactgtaatattagtttatgtttacttgagatgggttaaaaatagtttgtcttccagtggataacacattttctctgaaatggtgtttataccattaatttattttgcaaaccattcttcacaaatcataaaatgttcaagtttgggctagttcatatcacagttatttaaattctaaattagtggtgttaagttaatgagatatattaaagtatcttaaattctaaattagtggtgttaagttaatgagatattaaagtatcttgaacagtgattgatacaaatttaatatacctcttatctcctactggtggtgagaaatgtgctttagccccttagtagtttgggctgaactgaattcatgagaggtgtaagtggcaatgtgtaaattcaccatctattatgaagaaaaagtgctttcagcccccttggcctaacaataaaaaatttcagagagctattacctggattctgtttcacaactgaataccatgaattagtttaatctgcaatgaaagaaaacagaggaggactgatataagaaggtagagaacattaacctccctccagaaagatgctgtctttggccaattatcaaagcaatgagaattttaaggagttctgtcaccagctgtgataacctcctatctatgccacctttcaccaagcagggtcaatgtggcaggccatggctagggaacaatgctctctagacttacctacgggtccatctgggatgaaatggaggaactcattctcattagtaagatattctcattcaaatgaatgaaaaaaatctggacaatgccccaaaatgcttagtggtgagaggtgaatagaaagaaaataaaggggagaaacagtaactaaagagggaaagaatacagtgtatataacacacgtacacactcatactgcaacaggcagtgtagcgaggtgtttaagaacaagggcacagttcttaaacagtgtaatagtcacagtctccattcaaatcctgcacccaccagttctgaagctgtgtggtcttgcaagttatttaacctctctttccttattttcttcaccataaaaaatataaataataatattacctatctcataggattgttgtgtttcgatatatataaaggggatgtgagggtgatctggctgcggcatctgtcactccatcgattgccagggttgattcagctgatctggctggctaggcgggtgtccccttcctccctcactactccatgtgcatccgtccctaagctgcaggctcagtggaagaggatgaccattcccaataaaggaggaccggtcttcggtcaagggtatgtgagtagctgggcttccattctagaacctccaaacaagctctcaacatatataaaggacttagaattctccctatcacagagtaagcattatgtattagttgttattattattacctattttttacattgcctgggtgtcaggggagttagcatttgaagggacttttggatcacagtctaactgttcatatttagagctgaacactctgaagcttgggacaatgatgtcatgctttggcccatttagttgagtctgggtctcctaattcctggatctctgtttttccataatactaccagttcagtatattctctctcattcctataacatccaaaactattaaggcttgggaatatttgttttgttcttactatgattagttacccctgtgaggtttttttgcagtgggcagtcactaaatcataccacttcaatataaagttcactttccaaggaaggcaaaagatgtgctcatacctccataattttagtctagaataaatgattcctcaaaatgatcccccttctgacctcccagatccctgctttgaacactatgtaattctctttaaaatccctttggagagaacacattcttgattatgtgtgaaggtaccacacttccttagggaactagtgaggctgccttttgatgccaattaatcaaatgtgcagaataccaaagttgcttctcatttagctctacgcacagaactcagtgatgaaaaatgaaattcctctttgtgctcatgctcacgactcttagtcacctctactataggtgagacctggtaaggtgctacaggaaagccagacttattagacaatgctagaaaggtagaaatccccagagagaagaaaccaagtagcttttctgcataatgttactgtcactggattatttttccttttagttcatatttccatgctgtatataagttaaaatcactttcttaaaacactgaataaaattcctttcttcttccagagattaggtgttcagtatgttggaatgcagcccagagtaggtaggctatcaaaactaagtggtgagaccttcccagagaaaataccaaggcagatcaaaggctagctgatcactgactacgttatctcttttttgtgactattaataattttaaggtgaaggcttgtctttctgacatccattttagctcacaggctggaaaaactattcaggggctatgtaaacaatgactggcaaagatttctctaggacattcaactatggcaggaagactttccttcctgtgaactttcaggcctactgaaagaatgtactcaaggcctactgagcatatgtactcaagaagcccttgggtaagaacctaaagtgacctaggtatgatatcaacggaaaagaataagaaggcttttctctcccttttgatctttctccatttcctcaatttgtcctttctgtagcctctctctacttcctcttacacattgggtggtcaacaaaatcaacacacaggaaatatctccatacacacagttcctgccccatctgtagctaccatatttttgacttcacaattccctctaacagctctgccaaagggggcaaaatggtagatgaatatatgatgagttggtgatggcttcacttacagggctggagagtggaagttatgaagaattgtcactcatggaaaaagaaggttataatttagttttccagtaatggttggcagagttcttcaagtgaagatttatagaagtgattatgttgaattgggaggaggagagggtcaaaggagggaggatcttccagggtcaaggggacatttccaacagagagaagactcaagatgcctgggtgaagattatgtctttaggggagacaggcatgtcatgctatgtatgtgagacagagagagtggtggaagctgttgactcattcaaaaacatatctctgacttcagaaaacccagtcataaaccacacctaccatacagataaaatcctttcacatagggaacgaaatcatttctcccaaggaaagaccagagtaatgagagagatgcaaagtggaatataatctgggaatggagaaagtgaactgacaggaagatttgtttgcaataaggagtttgttaacgtggttcctgtagcacattctggagaacagctttctgggctacagttcagtgagatgaacagtctctaacagtagggttggttttaagggtacaggaaatttgtactagatggcagtgaaagggatattatggatctgaaaactgtgaagccaaatgtgtacataatcaaagaaaatacatctagatgagaaaaaccacaatgcaaaagtgctggtcaaaagttatcagtcaaacccacatcttatatttctagagtttctttaagtttcactctaacgcagtacattatggcactgtttctagaccaggttagaataaagaggttggggaagatcaaatttatttatgtatttagttaaagatatccattgatcttttccaatattctaaaatgagattgacccttgagtcagaatttcaagcaagatgaggccaagagtttcttcaaaccaaaccccatttccttcttttctcatcctcaagaggacagcaccatgaaccccaattgcatcttcactgggaagctgaaagaaacgtgtaatcatctctccctgctgtactgtgtgggggctagaactctgctgttccttctttgtcaggggatcctagctctttctctccctctgtaggttgatgtttccatggaaacatgctctttaatgcttctgaaattactgtgcatttataccattaactcttttttgaccagggcaaatcacaaagagatttttcaacccctatgaaaaagtaattttattttctatctcttcttactgggaactttttaaaaaagtaattggcgcctgatgaccctatttcctccccagacttcactccttaacccttgtaatctttgcttttgcctctcttttctactgaaactatcacagctgcaaaatcatcaataatcaaacaaggttgatatgatttggctgtctgtccatccaagcaaggatgtgtgtcccctccaaacctcatgttgaaatttgaaccccaatattggaggtggagcctaatggaagctgtttgggtcatgaaaagattaatgccctcccttggggataagttccttctttatcaggtcccatgagaaccagttgttaaaaagagtctgggtgcacccccctccccgaccttgcttcttctctcaccatgtgatctctcaacatgcagtgtctctttcaccttcccccacgagtagaagcagactgaggcccccatcagaggcagatgcccaatattgaactttccagccatcagcatcatcaaaaagtaaacctttttcctttacaaattaccagccttgagttttctttatagcaacacaaaataaactaagacaaagatcaacaaaaataaaatcagtagcctttgctgtatcatcattctcctaagtgttctatagtctctaacagttgatactcccagttttttttagcaagtcccttttttgtactttattatttaaagtaggataatatcttggttctccttatacaactcaggctagtcatctctccattttttctccactttgacttgaaactccccaatttgggggtatgccaaggttcagttttgagcccatattgtctccctctgagatgcattcacagccataacatcaacaatcatgccaaggtctccaaaatccctatcataggttccaccaattccctgaccttcagctcaatatttctgattggaatgttctacttgaatgctcagatcaaacttaacatgaccaagtccaagccaggttcccctgtgtctttagacaatgagaccaccacacttacagctttaaaactgttacagctttgtcttctctctttctgttataatttcatctttaacacatgaatgaaaggaagaattagctggctgctcttaggcactggattcccaggatgaatcaaatcaattaaaagtcaactgtagtttagcttcatgtacaaaatatgctgactgacatttttcccctcttcagcacatagtttcagaactttgtctccacaaggtaaatgaatctcatagctttctgatctataagtgaagttgcttggaagtcttatttctgctctggctgctcaattttttaaaaaacccaacaatgttaccatttattgagcacatgcctagccttgtttttggtgctttacattattttacattctcacatcaatgatataaaataataggtaaatactataatgaaggcccaaggttgggagcactgggagttgaatccatccacttctgaatgattctaaagcccattttccttccaatgccccacgctaagaacaatgttgtcaagagaagcaatggtcagtagagaagaaaagaaagaagccacaaacttctaagatggtagaactaaaattcaaatccagatctgaatggctccaagccctaggctcttgattatgatttatacaccaaccagtggtccatcagttgttttaaattgtccctgatgccatcaccataaagaggcctacaggaaagtcaactaaacacacaggctttttacagccctaagagagaccagaggcacattactggtaaggagctatgttcataggataattagagaaccccagtctctaagggctgtcaatctgtcatatttcacaagcactaacccaaaaaagtgaagaaattgaatgaatttgccttataaaaaaacaggagaaaaaccacacagcagtaagcttgactggacttatagaggaattaattcttagatcgtgctctggaaggaagtcagttatgaaagtctaagactgaattcttggagttcttgttaaaggcagacaataagagctagaatatttatttggtttggttaatagtgacaaaaacttatcctgctttggcacagaatatccaaattctctctggacttaaaaatacaatattaaagtatttctttggagctatagtcaactctcaattgccctcaataggacaggctgatcttcacttatgatctggacaatcaaatacataaattagtctcagtacttaccctgtttgatctctccacagattcacaccgtagaatagctccttcctttgaaattgctttctgtctagatactaccatgctatgttatcttagttctcctccttcatctgtgatttctccttctttactggatgcctttatcttttctcttattttactttttaaaggaaattcaaaacaggctgtttatttctcattttatgcagatatcagccattcccatggcacaaactcttcttctaagtggattagtccaattcttctcctccaggtctgacctcttattccccatttccatcctttgccagtcatctccacttgcatttatccctattacaaactcttagtgcctgaaattgattggctttatctttgctctcaaaatagctgactttcaattcttcctctctctcaatgagttaaaacttatgaagcacttggaaaggtgcctggcacatagtaggcactcagtaaatattaactagccttattcctttagtcttgaaatcttccagctgtctccaacatttttcttttaatttcccatgcccaatccatcctccaaaacttccctttctttacaaaatgattcttacatttgtcccttcttttctactccctaaatgtttaccctagaccaggcatatatccactcatacccagatacttgcaacagcctcctcctgggccctttgccttatatcattgccaccctccccaatactatccccatttaatcttaccgtgagatttcttagtgccacatcactacttgctcaaacatctccaatggctccgcactgcctagagccaaagtctgctctcagcaaaggatctctacaccctggtcccttctacctgtttggaattctctcatctttacatgaactcttgctgaagccaagaaccatctttgctgtcccctgacaaacattatttacactttctgcctcttccattttctctcaattgagcataatccaactcttgctcatgcttatggactcagatcaaatcttatcctctctctacactttcctatcaatctgaggccttctcccctcttctctcctcttgtcttatcttgcctccagtccacatttcaacatttcatttattgttcacttgacttgttctgttcccttttattacttaattttttacttgtctgtatcttgtcttccatgatagacaacatactatttaaaggtaaaaatcaaatctcgtccttctgttatcctttgcagaacccaaactagtatcttgcttgtggtaagtattcaataatacttattgatttgtttttcacttgcagaagactagtgttgaaatcctcccatgctacttcctcacttctcattcccacccacaccccttctatgtcacaccacacacacacacacacacacacacacacacatgcacacgcacaatctatttacaaatacttttttttgcctctctctctctctctctcacacacacacacacacacacatgcaactggcattgagtactggttccctgtggaagaaagtaattcctccaattattaatttaaaaaaagaataaattctaaagaatatattatctataatctttcttttctaaagaatgagatgaaagtttggattgacttcattcttgcccagactctttttaaacttctcccttttgatgtttttctcattacactgccataaaaacatagatctgcctgtgaggatcatgtaatctacccaaatccttattctctccatggtattgtgcccttggagagagctgacacaggagtgaacataattaatgatcggtagagaaatcaaaagcgatttctctttgtttctgaaatattttattccgtaagaaagaaaaataaataaaatttcttgatattgcagtttgtggctatgatttttttagtttagaaactcaaagcattgggggaatctgaaatatatgttaaaattaatatgtgaatattctttactaacgtaaatcattttgtcagtttggaaagaaatgaaatcaaattcatcttacttataacattgagatgaggaggtcttttaagagaaactagaaaaacaaaagggacatttattcattatttttttctagtacttttcaatttttgaggaaaattaaaatatcctcagtggagaagaggaataatctttttctcaatcttcacatggttaggtgcacataactacaaaatcccattctcactccttcccactcctcactccctacacacatcacagcaaggtgagggtgaatagttgatattcacactaagatcttctctacatttggcccaactcttaataacccaggatgtcagtatcttcagagagtccctgtgggtccatgcaaataatgcctgaagtgaatatttcatggctgggaaattaagagttgaggatagttcagaaatttcttgtttgtagataacaccaggacatgatgaagtagttcaggtggaaatcagaaaggtattatgaataagtctctctgaaccacagtaaagacttaatccctgtgaaagcaaaggaagttaatttgattaccacttgcttgaattccctcaaattcttgggcatcctagcataacctacaggaatttagcatttcagtcaatttctttacccccttttccagtcattaccaggttgctttgattatattaagttaaaaacacattcgatatgattggggaaaggaagcaaaatagcttgaagaaatacagtgtttgatgtcttcaattacaaagggggttggggtgagtgtagaagagatagaaatgtgagagaacaagcacacactagagagaaatgaagagatggagaggagatgaaacagcatgcagcatgctggataacatctccatggcaaccacattacatgtacagagaactgccaaaataagtcaagatccaagcaagtaggtgttggtggaaagagaagacaagcactcagcaatgggcaaaaaccacctagaggagatgaattatctttgtgaatttaactcttcttcccatttgtttttctaaccacacctaaagctctagtttgagtgagaatgtgtctaaagtgtcgaggctgccaaatccagatcattcaggaaggtctcaggatgacatgaatgaggcttaaaaagcccccgattgaagccaagagaaaaatcattaagtgaggtaaataatttccctgtagcaattaactcactttcccaagttttttcagcaacttgcacagaaggaatatacttttttattttccaggtggcttcaggaggggtaacaaagttgatgaaaacattattgggcaggtaaaatggaaactatgaagataggtaccaagttcatacgttagggagccaggctgtccattggtgaaatctatccctgtaacacagggagaatcctattaaaagtatagtcaagatgtccctagagaatataggtgctcagaatacatacagcaggtcctcaaatgacatatttttgttcaatttgtttccttacattgatgagaaaaaaatggatttctggctgggtggggcccctgtctgtgtggagtttgcacattttccccacatctgtgtgggttttctccagttactctggtttcctcccacatctcaaagctgtgcacgttaggtgaactgccgtgtctacatggtgccagcatgagcaagtatgggtgtgtgtgaatgtgccctgtgatgggatgccatcctgtcctaggtcagtgttcaccttgaccctcagctgttagggtagtctctggttacccgagaccctgaactcgaatagttgggtagtaatcattacttattttcattaatctttcttttctttttttttttttttttttttttttgaggcagagttttgctcttgttgcccaggctggagtgcaatggtgccatctcagctcactgcaacgtccacctcctgggttcaagtgattctcctgcctcagcctcccgagtagctgggattacaggcgcctgccaccacacccggctaattttgtatttttagtagagatggggttgctccatgttggtcaggctggtcccaaactcccaacctcaggtgatctgcctgcctaggcctcccagagtgctaggattacaggcgtgagccactgcacccagcctctaatctttcttaagtatacatatagctcacatttatcttaatgtttaatattagaagtgtgttaggtctttatttagaagtttgatgatgtttttgtgaccagagagatactataggaacttaagtctttataccaattagctgatggtcaaattggtttcattctacatcatttcgcttaaggttgcagtttccaagaccctatcgatgaagttaagtgaagacttattgcatgtttcttgggacatttaaaattacccagcaaatataaagtaaatacacatttatatattttatatttaaatatcaaaatatgtatatatgtgaaggaaaaactataaagcatggcatataccttatagcccttcctctacacctttaggtcatcacatataagaaccgcaagctctccagtatttttatgccttccagcagcactcgtggagagcccatgataacatgcaacccagggctgcttctcacaggtttacatccagaggctgagctgggtccctgacattggcctggagagcctgttaaaaatatggattcctgggccacacttgaaagacagggattcaatatccctgcttcatagtatgcattttaaatctccctgggtggttgtcttgtgtagacaggcatggaaaccatcagaggaagcatacatccctccttccccttctccggtgactcccctactctctgccttgccaagcagtggtgaggaaccttttccttgcctctggaacagcagcatcacacctgttagagagctgctcccagggcacttatgagaccagaaaagtgtccttctgcactgaaaaatgagttagaccagttctggtcaccaactactaccatctagaggagtctgctctcagatgcactctcctataaattctgggtggaagggatagaggggaactaggaagaaagagaacctaggttccaccagaggaccgagtcagcaagggagagtaattaggtcttaaggtgcaataaacagccaaattttgaatgagaaataagcacactcttttttctcctgtccatgcacagaagtacttccctacatcatagccttgccagaaaaattaaagataagtcaaaagagcccttgaacatcacacagctcaacactcagctctcgtactgtttgagaacaccatcattttctggtttagatttatacaactgtatatttggagaagctcttccaaaacaaaataattgtataaaaaatgaaattaaccaggtgaggcatctgacaaaggcagtgtcaagtttatgcagcaaatgctcattgaaccctatgatgtgtcaggcactgtgaacatggggataagtaagaaaagtcatcattcttctcaagcactgattgtgttacaggtgtcttatgtatgttacctaatataatcccatgttacagatgaggaaactaaggatcagaaggtgactcattttgttgaagtcagacagctagtaagtgacagactggaattaaaattgaggtttaccccaaaattatacttcattaagtccactacagtagctccttcccagtctattgtgcaagaaaatgtcatatatatatatatatatatatatatatatatatatatatatatataaattaattaatattggtcaccacatatccactcttctcctctattttaatcctcaaacaggcaccaaggatacatggaaatatgatgagacaaaaaaagaatgtgtcttctgagaagagatgagacactactcacattactttttccaggactggggaaagtgaagaaaagtctctgtgaatgaagtaaaggattacaaagttttttatggccttcatttgccttttctttcattcttccctcttcataagacttgaggctatgtgtgctcctactttagaagtgacagactctgaagaattaagaggatttaaagtggtgtcaatgacaaggaacaaggagtttgctgttctatggaaagctgcaaagggatctctaagctttctacattgtcccactcaattcaccaaagagagaaaactgatgtgaaagaagtctttgtcaagaaaataaaggaatttgtattttggggtgtatcctaaccatcatatagaaaacagacaggataggaaaccagtgcataaagcctacatctttcgctcacctatccccttccttcccttctaccttgccaaacactggcctgccactgtcatatctctcaggtgtatgacctagcaataactgagtcaaggcagcaaagctgaggagaggaaaaccccatgaaaacaatggtttaaagactatgcttgttttatagagaagtaagaacataagaagctggtggggagcaagcttcaggcttcaccaggggagttattttagctgggtctgaaagagcgagtagtctacttggcaaagaagagaagaatggagagtccagagagtgtgtcaggtacaaagaagagtatgggaatgatgaaggtatagctgcaggacaggagggaggaaagagaataacggagtcagggtgggcagaagcaatggaagaaataaggctgaaaacagggccaattgtgaagcttttgaacaggatgctgtattcctataaataagtacccaagaacagttttcaaacagggcagataagtgatccaattaatttttctaattaatttttttcattgttgttaagaaaaatagtggttggcataaagacaagttaagcggctcatagtgtagataagggaaacaatgcaaacctgaaccccagtagcggaaatgatgattgcatgctggagaataatctgagactattgtgaagagtggatggatgtgacatgtgaaatgtagtggatttaaatgcatcaattgctccctgtgactgcagggagaataagtatagctctgacctctgcaggacactatcaaggtatgacaccttgtatttatgatctttcttactataactacaacctccttaggacttcaaggtcaaaggtgagctgactggttcttattaaaattggcaaaggaagaagaaatgcttgggagtcaagaaggaaaggaagcctggagcattaatgaagaccaagaaggggtgcagcataatcatgttgcacattggaagactgagctagtatgagtatacagaatgatgtgagggaaacagcatcccacaagtaaacttttatatatgtaacaaaaggtgtgtaactaccttgggagccctcctatcttcagacatgagaatactagcttggagttctttaactatcttcattgttcttgttcagccttctcaaaatcaccaacatctcttttgcatggtgggatataagatgattgcttcagtaattattccaaagtccacaccctgatgtcctctcaaatctcagagatgtcagtgcatatcatttgaaaaagttgccccaggaataaaaaagttgctagaatctacctgcaccatgcagtctcaccgccactaaaaacttctactccaatatgtgccagacctatgctgaatgagaagaaagattgcacaccaatttgatacttcaatgaactcatatggacttgggctccctctcattacggcatcatattacaggaacatgtttaagtcatggctcactgtgattctcagctgtatgttgccatcctctttcatcctgttttcctgtaagtgagctcttcattatcagtactaatggaggacagggagggcatacctaaccaaaatcaacagataactccaaaacttattgtaggcaaagggttcaaaattctcccccaccaagccctttgcagagctcctaccatgaagcagaacttaataatgctttagccgttctttatgcttctccatatcagctggtggaagtcctaacaagcagcaaaatgaccaaaacccagcaggaggggaaagggtgaaaagcaaaagacctagaaactgcacaaagtgggtaataagtgcctgaatgatgagctcttggaaaatcaggccctgcttgatgaggtttattcccccacccccaaaatgcaatgaagacaaatcacccagcaagtttgctctaagatgtaaattctgagttgccatgaattactcccacaactcaggagagaggcaaagaatgggaaaagcctcaattttcactttttaaatgtgcaaccataaccttaaaattcatccaattcaggaagcagcttgtctctaaatgtgattagaaaaaaaaacagaacagtctattgagtctatcagggcttctgacacactcacagatggtgcaactaacatctagctgagtccgtatccctaccccatttctcccttgtcaccctactagcttttgggaacacctgactttatctccccttgtattcttatcccctgttctctcttatgtaggtgctacagtcactagaaggagacttcttatttgacagtgacattccaaaagcaggaactagagtgcgggggctggaaggagcctcagcaaagaggctctactccatgttcctcatcccaaacattttgtccaaggttgcacttagggacaatatccctaccaatgaaatagagccttttaaagagatcagaagcaatataacctcatccattaaatctgtgcgtgaaaacatggtatccaagttagcattttctgtacttttgtgtgcatttcaagaatttcacattaaaaatgtttcactgtataaaacacacacacacaaaaacagttaacctgcaccaacactactgtttcactacttaagcagagaatgttgatcctgagagtgcattttgctcaatccaacatgtgacactgcaacttgcaccaaagtcacagataagatcacttttgcatctgacatgtagaatgataaatagaccccacctgctcttctccattgggtagcatttcttaaatgagaagctgggacattattcagatgcaactaccattgcacagaacagcactatttcttccagcttcggcattcagctggaggtcacctccccacatcattatcaggccgtgctccaaggttgatgaggcaatgagtggataacacacactgctgagggatgcgcgtgcatgctgttctatactgatgcaataccatgcggtggagttggggcgcggggcgcggggagcggaatgattttacatttaggaacgtctccaaatcccagcaaatccctgccttgttgaaacaatgaaaccctccacaaggagagcccctatagaaaagcaagacagtagggaatttctcaaaatgttccttttgtggagacaagtaaatattagttgaagttgctttgatagtataatttcaattttgtatacgataaaatgacttgtgtctgaataaacaaaatatatttataacagattttgaaaagcctggcagaaaatattcaaaaaatataacagtattacatctttgtgtgtgataaaaatcagtgtattatataattgtttcaaatatttccacaatgtgtatacatatattacttttatgtacagaaaaaatatattttaaaaaccaaagaagatctactttgatcatccgcatacagtactacataacaaatcaaaattatttttatttttttgagacagagtttctctctgtcacccatgctgcagtgcagtggcacgatcctggctcactgcaacctctgcctcctgggttcaagtaactatcctgcctcaggctcctgagcagctgggactacaggcgcgcaccaccatgccaggctaacttttctatttttagtagagatggggtttcaccatgttgctcaggctggtctcgaactcctgacctcaggtgatccacctgcctcagcctcccaaagtgctggcattacaggcgtgagccaccgcacccggccaaatcaaaattattattataacatgtagaaacttgggaaggtgaccatccattgaaacattgtctaaaaaagcagaataaaaattaggcacatgctatgatgacaactatataaaagtaagcatgcataaggttaaaggctacagtaaattaaaatacttatgttaggatggtgggaatatcagtgaactttcttctgttctgattttcgtattgctgctgtgtacgtattatatgccttgggaaagttggcttctctgaggtcccatctccccaatacctgcagtgcattgttgtgctacaaagtaggacatatacactttctggaactaatagataactaataaatggtgaccactagggtctcctaaatggaagtacagtaagcaagcttggaacttttatcaaggtattacaaatagtataagaaatctgcaaaagaatcacaagaattaacatgtatcacttgtttaacagggatctctgaaaaaagatagggttggcaaaggaaacttgtctgttgaaaacctacaaaagaagaattaatgtataaaaaagtgacttttctagcaccttggagaggagaaacctacctgaaaggaaaaaaaataattttttttttttttagatggagtcttgctctgttgccaggccggagtgaagtagcattatctcagctcactgcaacctccgcctcctgggttcaagtgatttcttctgcttcagcctcccaagtagctgggactacaggtgtctgccaccacacccagctaatttttgtatttttagtagagatggggtttcaccatattggccaggctggtcttgaactcctgaccttgtgatccgcccacctcagcctcccgaagtgctgggattacaggcatgagccaccgcacccagccttttttttttttttcttgtctaaataaatacctttggcagataacaatctagttgagatggaaagattataacttcagtgacaccagaccctcagaccacgtaattcactcctttttctctttctaaacttaccagggaatctttttattgtaactgggcagaggcagctccagaatttcaacaaaagaggactgaagggcagtaatacgctgtctgtctgtggggaggtgggatgggagatgtcagtaccctgggacttttcttgagacatcatctgcacagtaagtacactggttttattctcattgtattcctattttccaggatttgaaagagaaactgatggcaattttaaggaggtcaaataccatccccctcctcttggcctatgtaatttcgctaactgtggaatttttctactacaatgagaacataacgaaaaaccaacttgaggtgattgacaaatctttttaatagatatttttcagtgaatgtttggagttcattaaaaatgactgcaatttctctatcactttctccatcaagaggtagtctacttctatcttcccccatacccccactacccttaactctggattgggctgtaactgctttgaccaagagaatacagcagaagtgatacttgccaggcagcactagtcacaatgtttgaggaaccccgagtggccaagtggaaaggcccacatggaagagaattgagtcctggtgactcccaggtgacagctagtaccagtctaccaggcatatgagtaccccaccttgggagtggatcctccagccctcgtcaaacactctaactaatgccacttggagctaaaataagctgtccctgttgggtccttcctaaactgtgaaattgttagcagataaataagtgttgttaacttaacacaataagtttggaggtgatttgctatggaaaaatccacaatggaaactgtgtaactaaatgataactggtttacatttcagtctttgatgagtttggtgaggtgtattaatctgttttcatactgctataaagaacttcccaagactgggtaatttttaaagaaaaagatttaattgactcacaattcagcaaggctggggaggtctcaggaaacttacaaccgtggcagaaggtgaaggggaaacgaggcacctacttcacaaggcagcaggaagaagaagtgcacacaggaagaactaacacacacttataaaacgtcggatctcaagagaactcactcactatcacaagaacagcatcgagggaaccaccccagtgattcagttacctccacctggcctctcccttgacacatgaggattatgaggattatggggattacaattcaaggtgagatttgggtggggacacaaagcctaaccatatcaggttggttattgccttgattctgaccaactctaagaaacttatgaaattgagattggaagactaaaaattcatggggtgtcataatcctgtcaaagcaatactttttgtttgacttctgcctaaagtaccacattggtctccctctgtaacatattcaaaaaattcatttaactaatacttaccaagcaactattatgtgtgaagcactagggattcagtggcacaaaaaaaaaaaaaaaagaaaaaaaaacagacagttcctgccaccacagtgttcttggtctagtagatgtctaatttcatccctccaactacaacaagcagtgcctgctctaactgaattaactacaactgcaccatccaggcaagatcacaatggaaggttttgttttgatgatgaagactggatgactagcacaagaagcccaggactatgcattacaatgtgtgttaaactgctgtcagttcagtttggcttgcttcaagcatagcactcaaagatccagacaagaactccaccaatcctcctgaacacagccttacttcagtgttctttggataaaagacaaacacaaagcaaagcagaggttcagaagagctgtgagaagaatccttgaaggcctgttgaaaaattcatatgcaactcctctaccaagtaagttgagtctttgctacacaaatcagtatttgtcaattcaaactccaagaagtcttttctttctacatttgaataatctcagcaataacagaacttcagcaatttgccgacaaataatcacattaattaagatttgtataagtgttttataatttatggatctctttcatgtacgtaattgttcttccattatcattctcagaaagtatttcccataggaccttagcttgattccttccaagctactaccatcacatccagagtaacagaattataattgtgaaaatattcataagtttactgattaaaaatatgttcaccaggatctttcccttaaagagggaatctcaaggtatttaatttttatttgataactttatgtgctacctagatccaaggaggacttcataacagaacatagcagtcagagcatgtacatggcatctgtttgctcagagattgattggttttctggtctggccttattatgctcttgacttcagtagactagggaatgtctctgtatcagtgataaatgaaaagatctaggattgaaactgtgataagcggctatcaactaaaccaggaagcacagctgttaaataagcattacgatttgaacacaagaatagattccattaatccgccctccggggggtccatacacaattagtgaaagtctatccatccctgagagccagctccattataaccagggattcaactcacttccaaataccccataaagacggaccccacaagagttaaagagtggctttccagggctctcatgcaaacaggagaccccaggccagcattaaaaattttaagttatcatttgctctcccttcctgtcataccacatgtttatgtgcttgtcaaactcccattccttacagctaaagtctcagtcagactaggaagaaataaatctatgcattccaaattaactcattgcttacaagtttgtatagaaagggcactgcacaaacttagaagagggtcatcataacatgaacatcggtcatagcatttttatgatgtcaatttcccagcacatggcaggaaagtgtttggaggaatggacacgttaaaaaatttgtgcaaaggtgccatgtgggttaaactgttttgtgaatcaccactacatttttatgctcccagggatacttgtttattacctcaaataaatttctaattggggagggtttttagaaaaagattgtatgcaagggttgggcttttctttaagtgatttcactcccatatggccagctagagaaggagggaaagaaaagataacaggcctttaaacccctcccttatttgggcataatgagagacctcttgctgatgcccactcttcatatttgtgttattcctgaaatactattgtcagctcacaactttatattttttatcactcacatgctatatgttcattagagcaaatgaaaaaatgcagttaagaaaaataataataatttcactttgtagagacaacccacattattattttagcaactttcccagatgaaaacatctaggcatcaatatgcaaatacaacagaaatatatatcaattatacataactgctgtaatgttttattttcattcaatactttaatctctctctctacacatacacacacaaatatgcaatatatttttaaaaattcataatctttcattgaattattaaccaaaatttaatcaaccccctcttcatgaaaatttaggatgttttcaattcacaaaaactggataaccaccctcataggcatatctttgtgcaataaaccttttccttattttaagtaaggttgaccaccatgggatccttttaacttcaatccatttattcccaactgcctcttcccacttgggaaacataaaaatacatacagcaaatgtaatctcacatagtcactttcactcacaatgacatgcagattcaaactcaactcatacagaaatatacccagtatacagattcctcatacattcacttgtctctgtcatcaaaagagaggaagaggctaggataaggctatggctgcaagaagatagggacaggatagcagaggagttctgaagattggggagaaatgaaaattagtcagagatttatcagagagataagaaaatagtaatgtggtcatgaggctggcatctccagttatgagaagaaggtatcaaagtcatcaattaggaaaagtctgatgctgagaccgggaggctgacagtgacatggatgctcaagggtaggatgcatgaggaggacttagccagatgggggctacaccaccaccatgcagagccaatgccagggcttgcgggaaaactctcaatgagaaagggaaaggatggaggagaagggcatgggctgatgaaaggaagaaggatttgatccctgtgaaacacactgcttgaatggccaatccttgaacatgcattttacccagtatcttttaacgactcaaaccaaatcctgacacaccaacagatttctctaactctgcattcatctattttcagaatatgctgaaataacacccacagcattacagttcttcttggtcatcacaccatcccccagtgccatcccaatctctaggagacacccacatacccacctaatctagtgccccccaaatcctattggcaccatctccaagtgaactccttccttgccagttagacccagcaccccatgtaattccatgagatttcttctccccatggctgcatctatgttaaatgagataaaacagcatctgcctcacagcattgttgtgagagctaaacgaattaatacaggtaaaaggacttctaagtcctttgcctgaggcattgtcaaagctcaaaaatgttaaccattattataatgatttctcatttgtaaataaaacacatgtcactgatacttttattcctcattttttactgagccctaatttggaggaatcggtttctttctgcctaaaatattaatgccccatgactgatttcagtggaatatcttcacaaccaatacatccttaggcagccccttctccaattcccaggtacctttgtgtcatcatataagcatacctggatttgacaatcctatccattcttttttccttccccctgataatgatttgctgtgcatactcattttcatatatccaccatccctagcaggtgctttacacataggaggtatttaacaaaagttgaatttgattcccctgctctcttgccttagcttttccctattacccattatctccctaacttctccataaaccacaaagccattttatgaggaaataaatgccatatgatctcacagttacttgtagtaatcatcatgtctattatttcaaattctctggacaaggcactctaagagacactagaggaaataatcccagatgatcagattagaaaggcatggatgatataaggcatagtgtcttgtattatctagatttataatttaaaagtatactatattttgaactttcatggcaggaggcacacaaatatacgttcataaggattcccaaaatgtgtttgtataccacaaagggattatgtctgttaacacattaatgaacaacaaaaaatgcactgtatcacccatggccctgtctaatgacctggctgtaacaccagtcatttttgttttcaccaaaaatagtccacaagcttccccacattgaaagtcattgatgagatctccaaagcagttactttgaatttagtctaaatttctctttactataataattatttttaaataatgtagagatactcaagagttcagagaactttaatcaagatggctaaagacattaaaataaaccctttgatgaacagtgcaagaaactgcaattgtttagtctagacagcaggcgcagaaaggtgacgagagtttggcttcacattaatgaagggttgttattagtgaggtagtaatcatttgctatccatgcccacagtagacaacacaggagcaaacaaattaaattacatcaggaaagatttcaattagacataaggaagaacctcccggctgattaattagtagaataaagtccttgagagagactgtcatcctcatctctggagtgcttcaaggaggcagtaaacaattctctaccttggcaggctttggtaatcatctagctatgccaccaagacctctagaggtcccctccacctatttgatttgatgagtctcttacagtgcttattggtatctcatgggtcacagaaatacactggaactggcaaaacactgaggctcaataaggctggaaaacagcagggattagtgggagaattaaggactgaatagacataagaaatgccattcttcaatatgatcatattctaactctgttaagatcgaaagaaaaatgcataaactcatactttcccagtgggagactaaatggttagaaataaaataaagtatcttccagcaacctaaggagaactcaatcagcagagaaaataaaaaggtcaaagtagactcactatttaatcatattttccaggacaccgacatgcctcccatagatctaaagccccagctttatgccatgttgctgtatggacagcagtagtccccaaattaatctcacacatttcctcctgtagcctgaacatggaattcccaacctccccatgtctgaccatcaaagcgttaaccaccttgaaagcccaagctcagatgccacctgccctaggaagattttttgaatctcctaaactggaatgtcagaactgtgtgagtcctgtttgcctcagctccacacagctacagggacaaaacactcacaaagtaaatcggagcaggagacattttggcctgccttgttccaaggcatcttcccaggcccagagagcttccatggttctcttctttccctttgatgcaggctttcagacacagtctccttcctcctcctctcaggaacagccaccccatctattatcccttgtaaaaatctctttgcccaagcttggctatagagaggcaatgaggttttccaacccgtcacttctcgctgctcatgagggtcagcatgtaaactcttttctgtttaaaggtcttattcttaatctatgagcatgaatggtaaaaaacacaagatcgtaattaaagtgaaaatctcactttgcttttattcctgaatcaagagcctaccaaatgtcaattctgtcagctcttactccattaatgaaggccttgtagtctctctttcactccagcaattcattcaagggagaacaacagatctacaccagcatcaggttgcatctcagaagatctcacaggggaaaacgcccaaacaagtaggtctcctgcaactctttaacggatattttatgaaagatggcctgtgactcaggagaagaagcctctgattccctttcagtgatattaatcactatatcttcttcctgaactcaatagctaaatgccaaagaattataaacagaggtagatactcatagagatgcccatttgctatacgtttatgtagtttccaaaagattaacattattttcttggggtctttggaatgttgtggttatctaaagaaaagttaaacagtgttatatcaataaacaactaaatcagggaaatcaatgcattttttgaacacttatcagatctcttgcaccagtgaacagcagttataaaatctgagattttcacttagcacctattcggtacagggcttgagataggtggagaatgtgcagatatacaaaacacggctgctttgtggacagtaaaattgaaaaaaaaatttaacttaaatttttgtaaatcctattggaatatttctattcaatgcctgaaaagaaggaatgaaagcaacaaatctctttgagaatttgtaacacgtaaaatatacagcaagtttactgggcaatcatggtgagagagacaggcacaggctcctaggtctcccacagagctcttgtagagagctgatctgctggacccaagctgaaggtctaagcaaggctagaagcctgatacatgtagagtttgttcaaggaacaggggagttacaggcaataaggcagagtgggctgtgactcagcaggtacagacttgtgttgaacttagtccagctatcccagaccaaaaggtgaacagcagcaaaactaataaaggttgtgaatttaccacttcccaatagaagtagttttggaaatgagctggcaattataagattctctttgaggctgggtaatgaggagaggctatgtcctctccttcccccacgcttcccgtaagttttattctgtcacacttaaaacaactttgtgggagtaggcattgttatttccattttacagagagaattgagttcgacctgagagattaagaaaagtcaccagtgaggccactctaacgtcaaagcctatgtatgaactccctttttccatacgaagatcatttttcttaatagagaagatgtaattaaaatagaggtggactatttctgatttcatttatcatctgtttacataagaccaactgccccatgaaataagtctatcctttggttattcttgctccacattttaaaagttatctttattattttggcatttgaagaggagaggagacattgaatttgtggggttttttgagcacttatttatgctaaatactttacatatatcatttctttctataaaatatcattttcctattacatacaagaaaaaaactggtacatacacagagaggttaatcaacttatccaaggtgacaggtatcggtaattctaactatcttcttgcagtactgttcagtgtacactagtgttttctttgtttattagctttttcattcattcgaaaatatttattgagtgcttccaatatttatttagttccagactctgttcccagtacctgggatacatagaacaaagatccttgcccttgtaaagcttaaattctaatggtggtaatagataataaatgagaaacccaggtttacataaataaagaagtgatttttctttcatcttgtgaagtatgtcttcaaaatccaaacttactggttctggttccagataagatggagtgaacacatgccaatttttttctcctacttaacacaactatgaaaccttgataaaattcatggcacacctatctgaggtctctgagaataaaatatcaacaggcagattgagaagaacaccagaattcaaagtgtcaccaaactgagtggctttaaataaggctcagaaactcataacataatatttaaaatatccaaaatacaatccaaaattactcagcatacaaagaaccataacatgtcggcttgtacaagaaaaaaacaattgacaggcccccaacattgtgatgacacaaatgttcaaattatctgaccaagattttaaagcagctattataaaaatactcaaacaagcaatcatgaacatgctttcaacaagttaaaatcgaaagcgtcagcaaagacacagaagatagaaagaagaaccaaacagaaattttagaaatgaaacaatataatggttaatataaaaaatacttgctggatggaactcagtgaccaaaatgttagtaatagaggaaagagtcagttaacttacaggtaacaagtatagctgagcagtaccttctccttgaggctctaagtactgcaccagatccacgggtcactacctctgagcttctaaattctaataaccacaaccccagctctaaaacgaagtcccggcaggtattatttctcagcattcccttttcattcttccagctgtctgatttcctatattacattcccactgttgacaaacattcatatatttctggtgagaaagtaaaatgatactaccgctctgaaaaatggttggccatatctgataaggttaaacatgtacctatcctataaccaattattcagctcctgggtatatacccaagagaaataaaaacatatgtccacaaaagcatataaacaaaaatgttcagagcatttttattcacaacagccaaaaactagaaacagcccaaatgttcatcaacagaaaacaataaattctgttatattcataaaatggtatattactcagctttaaaaaggagcatactgttgataaatgcaacaacatgagtgaatctcaaaacattatattgagcaaaggaagccagacatacagtaagatatattttatgactgaatttatatgaagttctaggtattgatgggatgtatctcaaaataataagagctatctatgacaaacccacagccaatatcttactgaatgggcaaaaactggaagcattccctttgaaaactggtacaagacagggataccctctctcaccgctcctattcaacatagtgttggaagttctggccagggcaattaggcaggagaaggaaataaagggtattcaattaggaaaagaggaagtcaaattgtccctgtttgcagatgacacgattgtatgtctagaaaaccccatcgtctcagcccaaaatctcctgaagctgataggcaacttcagcaaagtctcaggatacaaaatcaatgtgcaaaaatcacaagcattcttacacaccaataacagacaaacagacagccaaatcatgagtgaactcccatttgcaattgcttcaaagagaataaaatacctaggaatccaacttacaagggacgtgaaggacctcttcaagaactacaaaccactgctcaatgaaataaaagaggatacaaacaaatggaagaacattccatgctcatgggtaggaagaatcaatactgtgaaaatggccatattgcccaaggtaatttatagattcaatgccatccccatcaagctaccaatgactttcttcacagaattggaaaaaaactactttaaagttcatatgcaaccaaaaaagagccctcattgccaagtcaatcctaagccaaaagaacaaagctggaggcatcatgctacctgacttcaaactatactacaaggccacagtaaccaaaacagcatggtactggtaccaaaacagagatatagaccaatggaacagaacagagccctcagaaatagggctacatatctacaaccatctgatctttgacaaacctgacaaaaacaagaaatggagaaacgattccctatttaataaatggtgctgggaaaactggctagccatatgtagaaagctgaaactggatcccttccttataccttatacaaaaattaattcaagatggattaaagacttacatgttagacctaaaaccataaaaaccctagaagaaaacctaggcaataccattcaggacataggcatgggcaagtacttcatgtctaaaacaccaaaagcaatggcaacaaaagccaaaattgagcaatgggatctaatcaaactaaagagcttctgcacagcaaaagaaactaccatcagagtgaacaggcaacctacagaatgggagaaaatttttgcaatctactcatctgacaaagggctaatatccagaatctacaatgaactccaacaaatttataagaaaaaaacaaacaaccccatcaaaaagtgggcaaaggatatgaacagacacttctcaaaagaagacatttatgcagccaaaagacacatgaaaaaatgctcatcatcactggccatcagagaaatgcaaatcaaaaccacaatgagataccatctcacaccagttagaatggcaatcattaaaaagtcaggaaacgacaggtgctggagaggatgtggaaaattggaacacttttacactgttggtggaactgtaaactagttcaaccattgtggaagtcagtgtggcgattcctcagggatctagaactagaaataccatttgacccagcaatcccattactgggtatatacccaaaagattataaatcatgctgctataaagacacatgcacatgtatgtttactgcggcactattcacaatagcaaagacttggaaccaacccaaatgtccaacagtgatagactggattaagaaaatggggcacatatataccatggcatactatgcagccataaaaaatgatgagttcatgtcctttgtagggacatggatgaagccagaaaccatcattctcagcaaactatcacaaggacggaaaaaccaaacaccacatattctcactcataggtgggaattgaacaatgagaacacatggacacaggaaggggaacatcaaacaccggggcctgttgtagggtggggggaagggggagggatagcattaggagatatacctaatgttaaatgatgagttaatgagtgcggcacaccaacatggcacatgtatacatatgtaacaaacctgcacgttgtgcacatgtaccctaaaacttaaagtataataaaaaacaaataaaaataaaataaaatatattattaatgaaagaaaaaagcaaaattaatctatggtgaaataaatcaaaacagtggtcgcctttgtgtatagatgtgtattgggagtggggagaggacaagtattgactgggaaggggcatgagacacaactagtgataaaaatgttccatatactgatagaggtgtgggttacacccatgaaggcatttgtgaaagctcactgaataggcacctaagataaatgttgaaacacctagtgtgctttgtttccattagaattttatctttggagaatattataaagtctctgactatcagggaaagccaatcttttctatcaacttttgaaatacattgctataaagtatagggcgtatgttttctaatttcaaaattttaaaccctaagttaatatggtcaatatctctctcccaagtttctaggtacccccacatcttcaaacagttcttggagatagcttctcttggtgttaatttatattcagaatatgtgacagtgaaaatgtttcttgatctcaatttagttcacttcaataaatattaccgagcataactatatacaacgcaaggtgctaagtgatgcaagaaatccaagatagatagcatttagtccctccttcaatatgcttaccaccaagcataagatgagataccaaagaattaaaatataggcaggatagaagtaattttaaagagtgtaatacacaatcaacaagacatgaaacatttacagtacatttaagaaacgttaggtatttcttttaacatccttggttgaaaccattttaagttaacaacatgacttttttcccctactcttggtccacttgatgctctccttttatgctcctagcagacataattagcagacactgatgatgtcattccaccaaatctccattcctattagccctaataattttagcaagtgatcatgaaagaacactgaccttagtggcttaagcctcccatattcaagaggtccccatcttacgaagacaggcagtatgactccctctaaagaggcaccaacttcttttcaaatgaatcacagaatctaattattctgaaaattatttaagcagaaatcagtacctatattcatcccataaaagagcagccatgaaatacttccctagcgatgagccatcagtgttggtaagacgttcttaatagaacaagaagtcacatgaaccaatacgtcattccacatgtgaacaaaaattctacaagggaacaactcagaatctggttgttatttttgcctgttttttttcttgctatcagggtcactaatgcttaagaaaagtacgtagagagtggggcaaaagttgagacaataaagcttgcatatttagaaatctgtgtctacaagatgtttccttcttctgaacaaaagcttgccattattaccaaccacttagagcttttagtctgcctggctggagaacaatgcagagtgtttaagatgctctgttaccagtgttttgtaaagatttttttttcttactcctaaggactttgctcctttgtgaccttaagggtgtgtaattttcagtttctgtttagcatagacaagatgagtattgtttctagccctgtattctaaaagcaaaatccctaaaactccaattcagaaattaaatagatttctaaaaatgtaccctacatcactcaaccaaagtctgtctctcaggaagtgggagggcataagattctctccttcctgtcctccctcccccacccaccactcctgatggattggagatgtcagcttgtcaagtcttattgggtgctacctgatgtaagtccacactgaggcagtaaaaatctgtttgcagtcagctcttttaataagtctcagcaaacaggagcaaagcagatctattcagtaagatacttcctctgatacagcggggaaaaaatagtccatgacagaggcttgatatggaggagacttttagacaaagaacagttctttctttagcaaagctggagagaaatagtttccctagggatttgaggattctaagaaatactgtatttttatgcttatgattcaaacctgacccagactccaaactttttaaaaaggaggtcatatctcccctgtaaaatgcccccatcccacagagtcttgctgagtcctaagcattttgtgggttcagaactctgataaattatattgatgctgcctcttaatcttaagcccaaagggggaacgctggttggttacccagccttccacctatgccaaaaagaataagaaagcctgagaaggtcaaatgttctgagaatatattttataatacaaatcacctaatttttttattattgtttgtgcaagtttaaggggtacatatgcagttttgatacatgcacagattgtgtagtggtcaagttagggcttttagggtatctatcgcctgaataacatatgttgtctccattaactcttttctcgtcatataccaaagtaaagagtttctcaagaaatttcaaaactctgggaaatatgtgtttatgtactatcacttcattattcagataaaattaggtgccaaccacctgaagagagtgggccaatcttttcagtaaaagattgcttctcgtagttcttagcgcattgctggagtattatgggtcttaacggtgctaaacgttgatggatggtggtggtggtgatagttatgacgatgatgtatgaaataatgaagaagacaatgatgttcgctaacaagatgaagccaaatttaaaaatgacctgacagggtgaattattctgggaataattattatgtatgtattccttcattcacttttctgaagcctctccgttatcatcacccatatcatattcacttctcctagaatagtgcagacatggcagaaagtgaattccaggagtctggctagtaacattcaaattaaacttattgcaccattaggctgagaaatgtttttctttctggcaagaataaaatgataactataaaagttcttaacaatataaggtttttcaggaatagtcttgctctgaaggtaaaaagttgtctctgttcctaactcttaggaaaagtaacatgcagtaaacacttagtaacattttgaatgaatgcatgcatgattggataaataaatggataaatatacaaaagagtgggtaagtgaataaatggctcattgaactatatctctctactttttagaatagttactgattgtgcaggtaaaaatcacatcgtaagaaatctggggcttatcctctgaaagaatgatctcagagaacctaaactctgatctttcaaatgagtattttaagattactgtacatgtgcttcagaagcttactgcaaaatataaccccttgataataaaacaaaataaactagtcatgatgatgtcataagagcaagtccttttctaggtcattataatttttcatgtcaatttccacagaattttaaccagaagatctgtagaagcagtagaattttatctctatgggatgtggtgatggaggtatgtttcttccagcatttgcttacaactcccataatatctatttacaaatcattatcctgtccttcatgatctaagtccaaaaatcactgagctaacagccacacaatcctttctgcaggattttttaaaagcctacaaagaaagtctcaatggatagttggtgacctaaacatcaccaggttgaaaactccttggggataagaatatccccaatttataatacctctgtatctacaacaaacttaatagtaagttctgcataaaacagcctcttaataaatgtccattgattaaatgcagaaatgggactagggtgatgcaataggaaataaatactgtgcaaatttagagacaggagagtatagtgtagggaggtgaagtcagaacagacttcacggaggatgacagacttaaataatatattgaaataaatggctgtgctatgagccagtagtaatctaagcatctaaaatgaaaaagcactaagctctaagggtgtggagctatctcacagtggcaccttatacagggtatttctgactttgaatatcttaccgttgagaagaaccctacctaaatgggccatgcatttcattgtcacagtggatgatggcaagtgaaatacgagattgatgtcgaatttttcaagaaagatggaagacagggatatggaatgaaggtgagaaagaaagaaggaaagaaatgctttcaatgaaagaaattcttctttcccacatttccagttgaaggattaatctgtcctctgagagttaatgtcatatgatgatctttaggaaaacacaaaatagagggcatttcgcactgccaaatgttcctatcattccattcctgtcgtgtccacatatagtagtgttagtttcataatctttggtctttgtgactgagaaagtccttctcattcacacctctgcctaaggtgactaccctgatgtgactaaatatgcaaggacttagttctttgacctaatgcaagaactatagaaaactactaaattttctgcaaacccagaaaataagaacggtcagttctcaacagaaggggaaatgagggaaaggttactagcatttcctatgtaataaatatgtttgcattgtatcatgccatacgcgtgtgtgtgtgtgtgtgtgtgtgtgtgtgtgtgtgtattcactcaatcattacagagacccttaaattttggagtttatatctcctttttacagttggtaaagctgaggtatggacagttttacacaagttaaatagctactaagtggttatgaatcccaggagacttgggattcataactaggtctggccgactctaaaatatactgcagctcagaaaacaggcaattctgggtaataaaaaaacaattctgatttaaaataaaagcaaggcaatgcagaataacaagaaaagatcattagaattaaatccagccccgcttggaatactatctctatcatcaacccttaaacaaattactttccattagccacagtttctcctctgttaaatggcctaagaactacccgacaacacagcagtatgaactagatatgataatctttgtgaatgtgcctaacccagtagcctatacaatagggctcctggcacagaatctgtaccgagtaggcattcagtaaatatttgttgaatgataatgcagtagacgcgcgagaacccacaagaactcacaaaatcataacagatggttgtcttatttttaaggattacctatcccttccccacccccagagatcacactacctataccttcactgtcataaagcaaaagtaaaaagatacaaaatactggaggtggaagtagaggcacagtctgggtgatccaaaacggaaaatggactcattcttttgccgcaaatcacagtatctttttctgtttgtctactgaggtggcttcccttatagccacccttagaacaagaaaaggaaaacaaatcccaaaagaaacatgggggcttaaggtcagacactgaggatgctccgtcaggcattttctcccattttctctttaatgtctttcctcttcgttctcctccatgacctcctttgtctcttggatctataatgatgattcattccctgcatctccttatggaaaggaagtctttgcctctcacagacatgattatgtttgacatggtgaccctagtctcctattctgagacatcctcccccagtgccacactcactcacttttctctaacctggagcatgctttggctgctgcagctcccatgtaattctccagaagaacatgtgagtttcagttccaagaacatctcagtggcctgcatgccacatacatgctgctcctcttcctccttttccctccttcaaggtgaggagacaaagcatctcagcctgatcagtcaagaaacttaaccaggagtatttaaggagagattcagagctgtgaaagtccacatatagtttcaagtgctgcggaggaagtaccaaggaaaaaaagagccaagacccggactggaccgaggcagttccaaagatgaaggggtggggtgaggagaagccggacttgttactggcttacacccaagtgtaaattgtgtgctttgccctacagcatttttatggcgttggaaagcttctctaggaaattcctatggaactggaggtgaaaaaaatgtaaataagagaaactataatgttgccttgcacagcagcttctaaagaggatctggaagccctctagacaatcacatgatatccctggtgggcaaactctgtcacctaaggttgaacttagtagagatgacaaagttaatgcaccacagggctatcactggttatgtgacttttgtgttttagtttaaaaggggatataatgactggctcccttcacgctgtaagtagaaacacagagaagatatgcatcaatgagcaacctctctccaactcaccacttgcacagggactaaagatgccctttgtagaccaacgcttcatgccaaaatataccaaagcactgacctacctactttgctaagagacacatgctaagtctcaaccactcacagcatgggtaagaggccatcatccacccacccacatgcctgttgtcacaagaattctccccaacagctcctcatacactgaaatctcactcagttaactcatcaccacgcactctcttccatttccaggggccaggggatgacctacacctggtatccaacagagtagactgccactcccgcaagctcaccaccactactttctctcctgcacagtgagccacttgctcctggaatcagtcccctctataaatatatgtacagtgcattcggtcactcattcttgttggctttttcccagttgaataaacacttaagtgtaaacctactccttaattcacttatccacattaaccagatttattaattagataaatcatcccttgtactctgttgtaaactctaaagtaggatcacttaaaaaaaaagtctaaagtctccaataaatttcaacaaacatttattgtggtatgaaactccaaacaagagaagtccatcttaacaaccaaaatggtggtaacactgattaccaccatgagaagctacatggtggtacctgaataggagaccatcacagtacaatgtgcagggattcttgtaaagccatgccaacatttctgttcactgaacatgaaacttgtgataagcccaaaatgtagatatcaaattcacatagctactttttgcatctttacattgagtctgtttcagaaaaccattcttatgctaacttgtccctttggaagtatagctgtcttaaggccacagggtcaggaggaaattctttcgttatttcggagaaatgaaaggcaatttttagggcaatcactctcgttacttggtgcttttgtccattaaaattctggagcctctgcttgcaaataccaaaactggtttatcacaacagtactgcatgattgtgaaaaacttccagtccagctaccttgtaagcctttaaacagacagaaggaacaactatcccaaaccatgggacctgtgcaaggctgggaaaggttggccccagggatggcatgatgcacttacagtgtgaggggagcatgatagaaacaaaacggcaaaccagagtctcagttccctgggctaatggagatgtagggaatgtcgagtcagcctggctttgtctaattaaaaaataagcttctcatgtggataatcccctggcttgtgtcacttcccaggtacctgtggcctggcatctgtcacagggtgtctggctcctcagttctggcatattcaaccaagcagtctttttcttacatccccaatacaaaatggcatgccctttctagcattgtgtcagactgtctacactggtgcacaggacttactatgatggaaagggggtagcattaatgtacttgagacataaaactggctagggtcaaacgtcatcttgaaggtttttaaggaaagcatttaattcagcggcagatttatgtctttgtgactgttcaccaacagtgcattaagctaagtttcaaaaagcaaagtctagtctgtcaaaaaacatgaactaaaagtcccttattggcttccttctaccagcagatttctaaagggctagaaaagtctagagtaagcctcaatcttatggcaatcctatcactgctcttgaaagtccctctattgccctctccatgtttggtaaagtactaaacaaacaccttatttataggaggggcttccagaacttctatatagaaagagcctgagtggaggtgtgaggcagaaacctgttttaaggggcaagactaaaggaaacatcttggagctgctcttgcagggtaagtacagtgtttactaatcagttcctttaacatatactgcctactatatactgggataagcactttagaaacttatatgaacaaattcgacacagatcttggactcatgatactcatgtctaaagggagagagagataataaactacaaccacaagactgaggcaataaaaatattaactaatggtagcagccatttagagaattaattagtaccgtacaatagatagtgaccaagaagctgcttggtattgggtaggcaggaaaggccattctgagcaaatagtagttaaactgagacctaaatggcaagagtgagctggcaatatgaaaaacatgccaaggagagagggaagcatgttcaagaatcctgaggcaggaagaagcttggcacatttgaagaaaaggaaagaagctgatggagtcagaagacagcagccaaggacaaaggggaatagaaaaagtaaggcagggaaggtgttggattttattctaagtgtgacaggaggccattgaaaaattttgatgtgatcatctgatttccttaaaaaaaaaaattattctggttgttgtgtggggagggcaactgggagactcttgcaggaatcctggaaaaggattagggtgattggcagaaaggagagcagatgagatgatgaaaagacaggctcaatagcatggacttatgtgttggatatcggtgtaagaaaaataagtaaggaaaacctgccttggtgaccttagttcaccatttactgagttggggaagactagaaaaggagcaatttgaaaaaggaaaaaagttaccattttcaccatgctaagttttaggtgcctcacagacaccgttcggaaatgtttagtaggtaactagagagtctagtctagagttctgaggaatggtccaagttgtagatgtgtacctgagagtcattacctataaaggatatgtaaaagccatagaccagatgaagtcatctaggaaagttatgtaaattcaacaaataaataaataaataaaggagctcaagcagagccctttgggccgcgaacatttagtggtgggtagaaaagaacagagatagcaaggaagattgaaaaactgtccaataagatgagagtaaaatcacaagagtgtagcttcgtgaatatcaagaaaatctttcagtaaggaatctgtcatttcatcgaatgctgcagaggggacaagatgatagtagactgactattggatttggtaacatagtgaccactggtgactttggcaagagccacaagaaccattccattaacacagtatgaatggacatctgaaagaaatgggttaaggagggtgaaagaggtgaggaagtagagaaagcagctatagacaactctttcaagatgttttgctattaagaggaacagaaaaacaaggaaataggcaaaagcagacgtgtggtcaaggatttcaggggttttttaatatatagaatgtactagaacttacttgtgggtacttgaaataatatagtggagaaggagaaatagcaaagtccttgaaaaggaaaaagcctgagatccaaaatttaagagttcaaaaaagcgaaattcaagatcttttgctttctcaaggactttgctatttgtaagaattggtctctagtagaagcagggattcttcatccacagtagccagagtgtagacagagggcatgggtaccgatgcaggtaagctggtaactttggtagtataaaaatgagaaagttcctggcagaataactcaattttctcaatgaattatgaggcagacttagcagcaaagagtgctacttatagaaaagaggatatgtaataggctcagagtgacaagagagagtgcgaagttattttgaagtgggagaaagttaacatagtaaggaatgtagctggagtgctgggctgactcgagtgacgatttgagatccgtggcttcatcatcatggttgtgtttttccagttcagaaaagaaactggagttgcttgattgcttccagacaagcaagaaatgagcagtttgtttaactgaggctattcatcaggcaccactgtgcaccacttcaaatcgtctcaccacacctgctcttccagggatggatttggtgatcacttctgctctggcttcagccaacttcacggagcacctcatctgtagctactgtccagctatagcttcttgccctggggtttctccttcactcgtgtccaggaagcaggacactagtgaaggaactgctggagacgtgcatatatgcaacccggagatacagcagactgaaagggagcctctgaataaatgcttacaccttttttttttgttttttattattatactttaagttctgggatacatgtacagaatgtgcaggtttgttacataggtatacacgtgccatggtggtttgctgcacccatcaacccatcatctacattaggtatttctcctaatgctatccctcccctagccccccaccttttgttttttagtatacagttctaagacacatttcttaaggcttcttagagcatttcttgtaggatgaatgaccacttgctgtcagcaatgctcaaccagataatgtacccttgtatcaattttctctccttccctgtctcactgttctagtccctaagccctgctccctagaattacttaaaaaaaaaaaaacacttgcatataagctagtgcctcattctctgccatcaaaggaactcaggtaagataactggcattaggagtggctttagaaatcagtttctcaagatgggactgtggaattcagtgaagaccccactgctacaggtgagtgaagtagtattaattcctagtatgttcattctttagcatcacaaatactaacactcttacctgtggtggattgggataagctagtggtagagggtaacgtattgggttatgtggtggctctggtatttgaaaaatacatgagcagttggctggctttgtcaatacattttcaagtcttaaaaaaataaactggaagaatcaaatgaactgactatcaactcaggaaatcctgctgaaaatcagatcgatccagaggaaaaaaactaatagtggcaatgctaccaaagagactaaatgcataaccttggaattcctcctttgtggaaattctaataggaaattccaataggaaaagaatgggacctggagacccacgtggtacacttaggaagacagtaagagaggattttcctgaaacctcttagaaggcaagaaaagctcctcccctcttgccaaaggaaataagtctgcctttaaaaacactgtaaagaacacatctgaagcaggtgcctctcattctgactcctgtcctcaatatgtgaccccatctctctgtagtccctacaggccaataactagagccaggtcatagcacaactacagctggaaaatacagtccctagaagggatgaatatctaggaggaaatagtttacatactgaaggaattgcaatggaaaggcccggccaattacaggtttgcagaaatcaggaagcacatgtaggagtgaactttgaggaagttagactggaggtagaatgggatagagaatttattggcacagcaacactttcttgtgaaatgatattcaaactccttgcagagatgcctataggcattcctaatatactcctgggttgatggcctaggggatgaggtgacaaatgatgggaagactttggcaaaatattgaaaaagagatcagaagattaagaaggtgggaatgttaaaatggaagtattaattttatgtgagactgaaaattgattacctgactctgtcctaagatgcatttctgaaggctctcctaggatgcccttgtgggatccagcacctgtcactcacagggtttcagctcaatatggctcctatcattggctttacccccttccacattcactctcctactccctaatttctgctccctaagattgtttcccatataaactccttgcacaaaggctaagacaggctgcttctaagaagtagaaattctaggcaagctaaataatcctgggactgcacagggccctaccactacctccaaaaattattgccagatgcattctactatggtgtctaggacatagcaggtccccagcagataatttgctcctccttttcttcccccttcatctgaaacagtaaattcagatgtcagtgaaaggcaaacaacttccttgagacagagcaataatgcttgtatagcaattgcaaactcttgtgctctgtgcctaccaaaagcccctcctgaaaccactcttctttgggcaaatctctgctctttatttctcagcacaccgttgtcactatctagcctcaggataatagtgtcccctggagggatcagttcttcctctggggaaatcaaagagcagatcaggaattagtcaccagattgtgtcattttgaatacaaggaagaaaagaagaatgagaggaaagaaaggggaagaggaggggtggaggaggatgtgcaggtaagagggaagaggaggagtcaggcagtagggtggcaggactgtatttggtgagttcacacattttattttatttcagcatcacaatacatttgcaaggtgttctcctagtcatacagctggggaagctaaggcatatggtccctgttttaaacaaccgattcttcagctaaattagcagctaggagttacaggttgggccacagcatgagcaagacacaggacttgatcaagaatgagggaaaccaagcagatcggatacacagactctttacacttctgccttcttatagcttgtatttatttgtttataccaatttatggaaaagcatcacaaaactattatagaatacagacagctagaatattttcattttccctctgcttaacaagaaatggagcaatttccagggaagagggcccagggttttgtgaagagaaaccccaacttcactgaaccctaagttctgatgctgccagaatgaaggagcccagaaatcagagcaggacacagggatgggcagagaggtgagcgcatggggttaactgcaaaatgaacttcacaatgactctcctggagatttcaccagactggagtttcttgcagatcttcacctgctctgctttatttctggaaggtccagagcattacatcacttccctctgcttccctactgagatttctacccatgaatttctacctacatccatgaaattgctaatttcttattccactgtatcctttcttgagtttcctgctgaaatagtcatacctcttagccatttcagcatttttctttaaactagctactttgtaaattgtatattctttctccacttccagaaatatcaaagcttcaaagactcataatagcctagaggtgaaggggccaatatttttttttaattaaaaaaaaattgtcgggcacattggttcatgcctgtaatcccagcactttgggaggccaaggcgggcagatcacctgaggccaggagtttgagaccagcctggccaacatggtgaaaccttgtctctactaaaaatacaaaaattagccaggcatggtggcggccacctgtaatcccagctacttgagaggctgaagcagaagaatcacttgaactcaggaggtggaggttacagtgagccaagatcatgccactgcactccagcctggacaaaagagcgagactctgtcaaaaaaaagaaagaaatatatatatatatttatatattataaatatatatataaatatataacatttactcaagccacatactatttctattaactttttcttcttttttataatttcatgtatttttttaaatttacttttttatttcaataggtttttggggaacacatggtatttggttacataaataagttatttagtagtgatttctgagattttggtgcacccatcacctgagcaatgtaccctgtacccaatgtgtagtcttttatccctcacccgcctccgaccctttccgcaagtccacaaaagtccattgtgtcattcttatgcctttgcatcctcatagcttagctcccacttataaataagaacataccgtttggttttccactcctgagtaaaactattaactaattagttatcggagcaatcctttcacagaacagttattatctccattttttcagatgaggaaactgaggctcaacaagattaaataactagtaatttaatcaagttgtgtaagaaatggaaagaactagagcaaccagaaagcggcagagctcaggatttgaatataggtaagaggctccaaattcttcactcttaaccctagggattgtctaacccattcccttcattttataaataaggagagtaagacacaaagaaactaagtgacatatgccacgacaaggtagggtgtggactgccatgcaagtcttctgatttccagtttaatgtttttgttgctatacaacacagccttggttccagacaacagttctcatgtctagtctatgttttctggtggtttcccatgagttcttgaattgatctgaagatttacaatttcacaaaggatgttcattttatcaaggctgtatagaaaaagcacttgagattgtaacgatttacacctggtcatttggggctttagcattgggtgatccaaatgctagctcttccctcattagatgtgacacagcttgttctttaactctctgggaaatctagttgttacagctgaggggacctgcaaattgtaagaaatatataaatcccgttattacaacaatgatgatgattagtcctgttaaaagcacaatgttttacccattatttctgcagagtttgtgaaatggtgacagggatagagactcagatggtcattgtttctcaaggtgggaggacctgatgctgtgatcactgctgggaagagggaaggctgtgagtaaaagctaggaaatgcaaaccatgttcctacttatgcaaaccatgttcctacttattaacagctctggataatagctctgtggggtaaaatgtaaatctgtcaataaaggagatactgtgagtcatggaaacctacctctgcatgcaccccttctcctgggcatggatagcatgcatcattgaccctttcactgtagctcttactgtagcattgtgagtaaagcttatgtaaaactgatcacatgtggtattttggctgttttcccagccacctccattgttggagattgtgggcccctcaagggcagaaaccctggtcttttatttctgtatttacaaagccagtaacatggttggcactcaggaaatggtggttgaataatgaatgaatgcacgattttatgacctcctcagattgcaatcactttgctttcattcagcagcccacgactcagattcatgcactgagtagtcctcccagggttgtggttgggtaggactaactttggggtatgggaaccaataaacttttagggagaagaaaaagaatattgaaggctagaaatttttttcaaccagttttagagaaccactgtttagtagtgctttaatatttcatcatccagccaccaaaggatgcccacaactccctacacatcagaatattttccttatatatgttttaaaaataagaaatttgttttgtaggtaatctgatacctaaggagatacacagagagctgtagtttggggcttcagagacgatttttaagactggaagagagaaaggatggagaaaaaggccaaagaggggagatggcaattcacaccctctttgtgtgtgcttcaatatcaaagattccttaatggcaggaaccaggtgtaaacttgatagatctcccacagcatctatcactgactgtacacacagccaatgctcagtgaaaattagatggatggatggaaggattggtgggtggatggatgcacagagggagtataatttgctattgccagcattaccaacagtcacctgtaagttgtttaactctagtcagaatgcccaaataacctaccagtttgataatcactttcttactcatttatttcctctggactcttcttcacacagaactaatattcacttattttctgttctttattaaattattcaaaagaaacccttacctccctcagcacccatcagtaaaactctctccatacacaagtatcttctcacacaaatcacacaacataatacaatggtattctcacttacggtattgtgtctccatctgagaaagagatgaagtcagagacagagttaaagtctaagagggatgttttatttttctgtttttttcttacttagcactagctatcctgtgctttaaacaaagaaaacaaaatatgctaacaataacttaacatttattcccagcatgggagtggcggggaggaggttaatgtagataagtccttgtgtaccgcactatcaatcataactctttatcacaaataatgcactgccattcccacagctgcacccagctgtttgggtcatctttagtcatgtccgaactcattctcagagtcctatcttccttctgtctctcccgtttttatgtagctctctgtctgtcttagcttttgtatgatgaagattttcaaggccaggttaagtcttgggctgggtgtagcctgttcatggagagacagtcttggaggcgggtggaaggaagagtcattagggagaaagcttggggaagatggaggcagagaatggagccaaatgaatcaccagaggaaagagaatcactggagaagtgcaacagaatatgtaggaaagactgtctcccagatatcttgctcattcgagaacttccagaaaagaaatagctgaaagagatggagaatgggtttgaggaaagtcatactctgttctgtgaaggattcattttgctgccgaaaggaaataactacaggagaagagagagacagaaagaaaccaggagtagggtgggcgagacaaagaggaagccatatggggaggggggtgggaggataagggtgaggaggagagaacatggcatgcagtgggaacactgttggaaacataagaaccgcccccagaaacaaaatgccagcatctctgggcaaaaaatctaaattgtcagcacatgtatctttgctctgagaaatatacacctatttttttttttttttttaatttcaggatgattccccattccaacatcagtaaaacacttcagactgagagactcagataatttccttcctcctatcgtgaagcatccccaggccacttcctcactgttcctcataaaggtgccatccccaggctggggtcccttggcagggaaaattcaggaacaaggaattgctcagatttcatatagatttatgtcttataaaactataatggaagaaatccattcgtcttcaaaaaatgagaaaaagaaaatacaatttttaatgattacactttccaaatacaatgttttattcaattatcaataattaatgtcaatatgagcagggatagcccaataaaacaagcaaaattagatactaataaccaaacaagctgactgtgttttggtactctttgttccaggccccctgctaagcactttgtatacattcttatttaacgagcacaaatacagtacaaagcctttagtgttgcctccgtttttatagatgaagaagcaagcccagacaggttaggaacctggccatggtcattcagctaacaagtatacgggccaggatgttgagagacccctggcatctaatcatgtgtcaagggccccaaatctcattgtaggcgatagtgagtgttaagtttcttccccaccaaatttttcctacacctcgtaatagggggaaaatggtttgaatctttcccttccctcaaatttcttccttatgctgtttataaaatgatcaaacattaggcaactgagcagaataattaaaaaactaaataattaatccctgattaatggtagttaagtgtacaaaaaaagggaaataaaaggtaaggttggcccacaaatgcctgccctctctaccacatttgacatgactaaacccctttcctttcttaaaatggttatttcttttggctttaataacacgtgcacctatacagctgaccaccacaatcctccttccctgtctccaccaggcctgtgtccttcactgaacactgtggctcctcctgccctggaactatagctgatgttcaaggctcagtccatagctcacttttttctagatactcttctcctgagacaactcagcttttctcagctgggccactgacagttgtatccactctatgctgataaattttaaatctgtaattccacgttccagactgcatagctgtaggcactacaagacatcctcactaatgtgtccagccctcagttcagaatttgatgcagcttctgtgaaaagcaagttcccactccaacttctcagtttccaccaatctatcatcatcccttcaatcttaaaatccaaaagccatcacacctgtaatcccagcactttgggaggctgagacgggtggatcataaggtcaggagatcaagaccatcatggctaacacggtgaaaccccgtgtccactaaaaatacaaaaaaaattagctgggcgtggtggtgggcacctgtagtcccagctacttgggaggctgaggcaggagaatggcatgaactcgggaggtggagcttgcagtgagccgagattgcaccactgcactccagccttggtgacagagtgagactccatctcaaacaaacaaacaaacaagcaaaaaacaaaagaaaccaaaagcccagctttgaccattttgtcccctgtattagctctacagaggacattactggatcctaaagaagtgtccttcaaaattatcttgcaatcccaatggccaccaaaattctggccctcatcacctcacatctggggaatttgaaaaaggcctgacttgcctccccatcttgatttactctttccccattctctcatatagtaataatgagattaattttcttaaaataaccatttatcataaccatttcatcaagtgttttttatgattaccttccagagtaaagttaaatgacattaatctacctttcagggttctccatgacctattggttaatagtaacactcattcagccatgggtagagattcaagaactaactaggctgtttcatagagaaaggatttaaaacaaaaatacactaatggtgcctagttgaactcatttacagaatgagagcatataagagctaaaatttaatgtaatgcaaccctttactattgcatgttcattaccacactttttttttttttggatgagaaaacagagctggagaaaataaatgacttaattaagatcacatatttccatgccaactcccaatatggtacctttctgatgatagcttgttgcctttcaaaagaacaactctgttccacttgtaaacaccacatttatctcccatgacttgttcacaattccattcaggtcaagttgattccaatataaccctcacataaacattcagtgtcaagtccaaatctttgttcatgctattattcccatttgaagaaactcctccttccctcgggcctctgtattctacgttctttgaaatccaggtcaagtgtcactccaacccctccaagatgtatcaaggctgtaacttcagccgacctagacaatatccctctactatagcatttgaattgtactataccaatgtgagacatgtaatcatattatttcatgtttactcaacatttttgtgtatggggacttcacttcttgactaaactcaacttcttaagtgagctggatcatgtcttttctattgtgttatccttcacagtgagtatagctctttgcaaagtaggtactttaccgtttgttgaaaatataaagaatctaaaaatagaatctgaaacaaaatcttcaataggtaatccaagagcccagagaaaatcaagtccatagacaaatcaagcttaatttcacaattagcttaagttaattcactcatttgacaagtatataatgagtgcctgcactgagctcattaaagtgctaagcattaaactgcaatggtgagtgaaacagacacatccctgccaacgtggagctaacagtctagttagaggaacacacacatatattaaaagtttaaccaggactctagagaacatgaaaagaagtgaacagatttgggatacatgattaaaggaaaggagtgagggccaggaaagaataaaaaataacttgtgaatttctggtacgtgcaacaggaaggataaccatgccattcccctgagttggagaaaaccagtggaggacaaggtttatgggggtatatcaggaaaactcaaccttgggcatgctgaacaattccattagcagaacctattaggtaaaagaagttgacccaaaatggtttcaagtttttttttttttttgacctttaccctattcattgtcataaacaccctatacttccccaaaagtaaaagctctaccaagtaggcctgagaagaggaaagcagaatcaaggactcagacagcccagaattgggtaattaaactaactgggtaggttagggttcactgaggcaaggagaatataaaataaatcttttcaatcaaagaaaataaaatctggcctatttatttctctttatcaagtgaatcaaaagcttggctaaatgaaaacctaaaaccaatctaaaagaggatggctcctggtgttgtatacatccatgcaagaggtaggcttgcgtagaggctcttaatcttcactccccctctgagacattgttggctgctgtataatattgtggtataaatgaggccagcgttctggattaaaatctcttcaagcctcttcattgatcacagggttggaaagaaacatagaagttcaatacctcatataatcaaaaaatcaaaaaactttggaatcagaaggaacgtagggctcacgtcttctaaattctttctttccaagtaagcatctcttgtaagacattattttacagagaagaaaaccaatcaaagtctgaaaaggtaaaatgacttgcctgcctaaggtaacacagcaaattagtgacaaagctgggaaaagaaccatgctctcttgcttcttgccactataccatacagtctggagggaaaagagaagggtctgcctagagaacagttcctttcggaaagtaatttgagatcaagttgatgatatctagggatgataatttccattctaagtttcaatttgctaaatgaagcccccataggtacttaatcacatgagtaaaatgaccgaaatgatacttgaaaaatacaaaattcatagtagatgattttgtgatattcaagatatgggaaatagagcagcttgttatagaaatctaggcacaagctaatgaggatagtgactctgcaggtggcaagaaaggatgacttaacttaggggcactgtgcagggtgatgggcgtctgactgatgcagatataaaaggaataaagagcagtgaggaatcccttccaagtacgttactgattataaagcccgagaccatgggaacgctttatgtgcacatagcaaatgctgaaaactagttcaaagcctaactgcttctgccaatgaatccaaagagtcattttcacacatgaagatggcatatttaatctttaaaaataataatcaggttttgtactccacgtgcacaaaccccaccttttatttctttatggattcattcacattttcattcaatagaaaatgtttgtgtctactgtgccatgaatcctagggtggataccataatgaatttttaatgtgaactgtttgcacatctatgtgctatgccataggtatgaacaaagggctatgggagcacaaagagaggaatgactaattctgcctggaatcgtcagagaaggcttcagagaggaggcaacacttgagtcagatcttaaaggacacctatgtccttccagggaaattgaaagagaggagcatcacaaggaacagcctatgcaaatgcatgaaggggtaaaagactgccatactaagagagtggccagtaatgttatttgatgttgtgagatcacaagcagtgtatgttggcataaggtggggagttggaggagagggtagttaaataagataagcccaattatgaaggttaaggccggatattcaaaggtcttttatggcttgccaagaaatgtggaccacatccagtggataaaataagtcatcagagatttgtgaggaaattaggtttctgctctagatatccaattctttattatttgcagcacacagaaatcttatttgagccaataaaacatggttacaacttctttctcatacccaacttgatttgagaaagactactatagacactttgaagtcttcaatgataatgtttccatctaaaaaagtgcagacatgaaggtgataggttttttatcatccaatgcgatgactagacatcagcttcctggaagatgcttgttggggtctttgtcatgcctttgaaattgatgtctggtcaagccttgggtctcattcctttgtgaaggaaagcatactgtatttgagaaattttaagcatatactcctacaaggagtcaacctccttttccctgaattaaattcataaaagcagggttttcattgtctcatggcataatgctgctatgttaaggcagactgctctcctgtcatgatgctgctgctttttcagcagaatctcaatagtatcagaatgggccaatgcaatgcatgctggcccaacagggctctgctcaggggactaagcacctgggcattacaggatcacgccctaatcttatttatttctgaaatccctccttctcatcagatatatcctgttcctttatgtctcctgtcaatttcttatagacatatttccctgctgcttaccaataaccagaatgactgatacgacagctgggacaaccgagtgtggagaagtaggatcctttcccagggttcggaaggaatggaagacaggatttttttttttggaaaaaaataacctcaatctgaagcacgtgtcactgccagggctgacagacatagcatgtgtgtcctttacacgggattcagaagatttccaaggctgaattgaatgctgggcttgcttgcttttcccacttctcacttttacctttgcaatagaaatagaaaaagaaacatttctcagtttccttgacactgagaaacatgaactatcatctcccatagaaaagcgggggggggggggggttggcgggaataaacaggtggccactgaactcctggatgtaccctcagctcctctgctcctccaggacagcatatggcatttctaggtcacccttaaagtatggcagccagtgcagtcaggcactctgggcagattaactatggtgcctcttcctctccctttctggttctcaagacaacaccaaatagccaggatgaaatgaggttgacatcacttcaggcaagatggaaacaatgacaaccaaggaaaggaaacccctgtcaagtgcaaggaacattaataatggacacagactcttgcccactaaaatgtccaggtcttaaattgtttgaggatgcaatgtagtagctacatctcatttcacccatccttaacctcaaatgcagaactcagtattgctttgtgtgtcggtgatatgaaatccagaaaaacgtctatttactttcaaataaaaaaaaagccagctaaacacataatctcacttacactatcagtcattgttcatatggaaaacaaggatttagctgcctacgtaagatatttgcaatcaaaccttgagaagccaggtcaatattagaacatgcaatatatggccgggccaatcatgcctgtaatcccagcactttgggaggccaaggcgggtggatcacctgaggtcaggagttcaagaccatcctggctaacatggtgaaaccccatttctactaaaaatgcaaaaaattagccgggcgtggtggtgcgtgcctgtagcgcctataatcccagctacttgggaggctgaggcaggagaatagcttggacctgggaggcagaggttacaatgagcagagattgcaccattgcactccagcttgggcaacaagagagaaactccatctcaaaaaaaaaaaaaaaagaagaagaaaaagaacatgcaacatacaatataataaattccttgtcaagcccaaaagaggaacatgcattatgtggcaattaataaatgcttcttaatagttattagttcttccctcatattacacttatggggaagagactccagaaagctcatataatatcttttttttttcttttttttgagatggagtctctctctattgcccaggctggagtgcagtggcgctatctcggctcactgcaagctccacctcccaggttcacaccattctcctgcctcagcctcctgagtagctgggactacaggcacctgacaccacccctggctaattttttgtatttttagtagagacagggtttcactgtgttagccaggatggcctcaatctcctgaccttgtgatctgcctgcctcagcctcccaaaatgctgggattacaggcttgaaccactgtgtccggctgaaagttcatataatatcttaaatgtgaaatctgaagtttggcgaacaggcactctagattgatttcttcctgctcattccacaaaactcaagtccgatgaccttaaggacgtgatacaaaatggtgtctgttcatccaggcacctttgtgataaatgctagagagataggtggatgagtggaagaaagggattgaagccaatgataaaaattacctaataatctcctacttgttaagtgtacctggaggttctgccatggttcttttctcagaaatcataaagcactttaacaatagtaataagcatttctttctcctcttcttcttattcctttagacaaacgtaaagtttccaagtgtttaatcagatagattacattaccctacccataattctgaaaaattatgttctttcttaatacagtttcaaagctataccttggccttgcttgtccacagtagacattgccaagattgggctcggtcagaaccacaaaaatgccacacattacacatccacctacaaaccctttccatctcaactggttcccctgaaggaggactctcccagcctccaggagaaacactgtaagataaagacaacccaccatttcttttcttaccttggcacttaccctgtgtgtcttattctaaacactgcttttccttttatctgcagtacttcagaaagccatttcattaaatataataacagtgtagtaatacaaagaacatcactttctagtgctaataactttcatttttaaaaccacttgtgtactccaaaatttagcaaagcatcaatttctcatcaaggccagccgacacatcaaatttgaaacttcaaagttctgtttcttttgggtttataatctatgtacagaggaattgaaatgctgtttaaagtcaaatttgttttgatgctcatgttgccagttttactgatgaaaactcatccctctgcataaaatagactcatgaagtaccagcaacaggaacagaaaccaaattaggaaatcatgaccacctgcaagaggatcaccatgatgaaatgttcatatcctgtaccctttccaaattttgaagttcatagcaccagtggaaatcacaattttcagactagtcaggaaagaatgaaaggaaggaattctttcaagagcaccaagttcaaatgcatgtgaatgctatcattgcattttaccctattctgataaccgaggtaaaaaaaaaatgacaggagactggagaacagtgatttacaactcctggctgcccttaggaatcaacctggatgcttttaatacacgtctgttcccgggcccttaccctcttccagtgcagctacatcagaatgtgtgctgggtggggccttggggtctgtatacagtttcttaaagcttctcaggaaattttaacatgcagtcatgactgagaagcactgacacaaggaactcaaaacacagaaaaatgaaaacatggtgaagacagcacgggaggaagtcagcacatcaatacatccctgaggctgttgagtcagtatcagttgatacactttagaagactcttgtatctgaaaaagaaaaatgtggctaggtgtggtggctcacgcctgtaatcccagcactttgggaggccaagacaggcagatcacctgaggtcaggagttcgagaccagcctaaccaacatggaaaaaccctgtctctactaaaaatacaaaattagtcgggcatggtggtgcatgctacccagctacttgggaggctgaggcaggagaatcgctgaacctaggaggcggaggttgtggtgagctgagattgcaccattgcactccagcctgggcaacaagagtgaaactccgtctcaaaaaaaaaaaaaaaaaaaaaaaaaaaagaagaaaaggaaaaaaaaagctaacttctgatgatcctaaccaacctattttactgggattactttattcaacattactgcctctaccacatagcttccctgccactgctctctactgttcaccaaatgtttggggtaatgctggtctctcctggccagagagatggtgaatacctgggctgttccgcacacttctgagcactcagtaggtactccccggtgtaatacttgtggctgatgagaaagattctgaaaaaaaatagctgattgcatggagaatggttctaaacacacaagtgtccaacttggctaaggtggttaattttggaactgggctgaatttggaactgggctggggaaggaagcgcatccctaaggattgagccactagaggccgctctgagccagattctcactaaatcatgctatgaagaggaatcacatcaaagggaaaaggaacgctgctgagtagcaccgggcgtcatggcaacaccatggttcctatttttaaacttagtgagtgagcccacaaagtgtgggtgtatgcacgtgggggaaggggactctggtctattcctaaagaatattctttcatgaagttttgagtttgcaggtggccaataaactgagacaatgagattagagaatcaaactagaatcagctatattggaatggttcctttctcctgaactccactctcttagtctctatcagaaaggatcctccatggccttggatcagaggtaccaggaaattcgtgatggttttcactaacattctgaaattcttcgttcctgaagctcattctgctagtcttttaggcaattcactttatatttcaagaaaaataagtctaaacagcaaactaaaagcatctgtggacactccactccttgtgaagacaatcagatgaatgctatgtattgtccgtattcccggcatccggcacagggttcagtacatacagaatagggggtccacattcctactggatgtgtcactcagtgaattaagaatgaatgtaattttgtgaagtgcagaaaagtgggccccacatgtcccgtttctttcatttctaatagcattttctttttttttttttttaacttttctccaatctccagctgaatacaaggcttaaacaaatccaaatttatctgacctgtcaaaaatgaatagtggtactggaggacatttgtaaatcatggcagaggccaaggtcttgttttgttctattgcatgtccctgacagtattttcaatgcatctgtaatctccctgaaccttggcaggttgtagaccagaaagtctccacccgcttcagttccaaggatttttcaggtatgcaaagactacaagttgttgttttttcctctatgggttaaaggatttgggaataggataagaaaaaataatcctccttcccattaggaaaagggaggtatcagcaagatcagagcaagaccagcaagtagagatgggcacacttcaggacagagagtgagatgagcaggttcagtgtgggaagtctttaccatgtgtgtcctggatgccactcccaggctgattctagatgtgtcatggtctagtctttagggcaagaaatagcagagaatccaagaaagtaaactatttatttattttattttattttattgcgatggagtctcactctgtgagtgcagtggtgtgatctcagctcactgcaacctccacctcccgggttcaagcaattctctgcctcagcctcccaagtagctgggattacaggcatccgccaccacgcccggctaatttttttgtatttttagtagagacagggtttcactatcttgcccaggctgttcttgaactcctgacctcatgatccacccaccttggccttccaaagtgctgggattacaggcgtgagccaccgcgcccagacaggaaactctttattaccaaaccaccctgtcccacaggttaatgatatgtttatatacatgtgagtcattcctaattcactcaacctctttagcaaaggacatagaaagatggataacctggggcaaagtacgcctggaattcataaaaatttgagtttgaaacacaaagtaagcaaaagtcttaatctttctggatctcagggggtttggggttttttgttgttgctttcgttttatttttttgagacagggtcttgctctttcacccaggctggagtgcagtggcatgatcatggctcactgcagcctctatcttcctgggcccaagtgattctcacctaagcttcccaggttgctgggactacaggtgcatgccaccatgcctggctaatttaatatttctgtattttataaagacggggtttttgccatgttgcccaagctggtctcaagtgatctacctgcctcagcctcccaaagtgctgaaattacaggtgtgagccacctcactcaggcaatctcagtttatctaaaaattggaggcaatcatatccctgtacaatacttttaagcttaaattatgctatataaagcccttggcacatagtattcactcaataatcttttttaaaaataaattttctaaattgctgaagcttagtattttaaagtacaggctttttcttgattataggaagcattttaatggaaaatttcagaaaggcattacagagttctctgactttttatacctaagataatcgatataatttaagctcttattgatgacttaacaatgactatgcttttttgctatacagggatttttatgcagggtatatgctttctggggcgtagatgacatttctccccaaatggtgttatacaactctgcttttcaaggttttctgctgggtttttctaatatcttccactcttttccattctgttatttattaatgctgttggtttgcctatctgatcctcatcatcatgtctgttatacctaagctattgttatctaggaaatcatataaacaaatatctcaaagttgtctaccaaagatatggccttggccctctctcactagttaacagaactttgtttttttgtttttgagacagagtctcgccctgttgccgaggctggagtacagtggcatgatctcggctcactgaaacctccacctcccaggttcaagtgattctcttaccccagcctctcaagtagctaggattacagatgtacaccaccacacctggttaatttttgtatttttagtagagatggagtttcaccatgttggccaggctggtctcaaccccctgacctccggtaatctgcctgcctcggcctcccaaagtgctgggattataggcatgagccactgtgcccggcttagaactttgatttttaactgggcacattactgcccaggttaaaaactaaactaagctatatttcccaattttgcttgttgctagtgtggccattgactgatttccaaccagcagactataagcaaagtgtggaacttcaggggaatttcctaaacagggaaatgatttaccttccttcctttctaacttcaatctgctgcttgaaactggagttccagcagccatcttaggcatggggatgaaggatatacccagtggatgaaagagtggaaagctagcaggcatctgagtcctgatgacatgcagctgtcatcccagctctggacagaccacctaactatgctcacatatctcatttaaactgggttactgggactccacaccatagataacccaactgcccacaagcttcttagaagtatgtgtaaaattagagtaaacgtgctttgagcgacactctgtatgacaagaaacagcagtcattttagggcaagagttttgtgtcagggattttagctcagagcccttttctgctttcttcatgactgttggttatgttctagatacatcaggttgttgaatatgtgacctcttgtcctttaggtaaaaaagccaagtctccatgtgaacacatgtgagcacgtgtgacagaagtgaggacaatgaccccgtgcagcctgtggagtccactattttgagtcatagtctctaatatgcacacacatacacacacacaccttgtcctctatagtcaataatgagggaaatttgacacattattaagatctgtgtaatagtgaactgtaatataataatgctctattgtgctgttttgcctaaacaaaagtgcctgaaagattttttttcaagcaggggaggaagaaagtcaatgggagtgtctggaaatacctctgagaaaacaaaaaggaagcaagtatgtgaggtttctctgttgaagtccgcagccaatccttgcagtgaataaaagaagccttcacatgtttgttataatgatttagtgagacgatatacaagaagattatctgtatgaaaatcctcactttaatcatcatcattattagccatgatgatgaacaacgaaatttttgataattgggttttttgtctaacactaaatgtattttgacacctacctccatctggaccccatctataatctcttttggaaaattgtgaaaaggaccacttacaatgaataccatattgtcacagggtggtttccatggctattcctgttgcttgtcaggggagaacttaactttagaaaaagaagattcatttataggctcatcaacaatttataaaaccacttgactactaagtttccctccttcgcccaaacaataaatgtgctagggatatttagcgaccatccttacagccgtcaagactttaacaatggaatcagattggaaggaaatatttacttgatattcatcagagctaattccaggcaagccattttttaagaattcctcccaacttctatcccatattcaacctttctcatgtaatcatctaaatagtctcagcaatagaaagcattagagaaatgtaacatataaaagtgttttatccagttttcttaattctctcttcacttgacaaatgcaaatatacataaataggtgctgtctggatgaggaatacatgcacacatgaatatgagtgtgtgcgtgcaagaattccacaggcggtcatttatgaacatagaaaggtaaaggcaagaaaggttttaaaagctttaaatgaaagctggctaaagaagagaggggcagcaaaagatcaatgaacaaaacacccaataaagaaagagacagaaaagaataaagaaagaaagagggtggggtgtggagcagtaatgaatgagggaaagaaaaggcctgggcattgagggaagctgtaggcagcccccggccggctgctgctgctggaagctggacaagagggaacagatttcagcagcgggaagccctaatctgtcagcagcagttccttcatgtgtgaccagccagctcagcttggagactggtgccagtctgggcgagctaaccccaccatgtcctcccggaagaggacgcgccaccaaaaatttctgaaagccgagggaaggttctcttgctagctcctgccacatatcttccttggcttctcccgtgccctatctacagtgctgttcagatccctcagtagtcatcctaaatgccctgcttcttccaaatccttatcggccacatcagatcctggagaattttctccaggacatgaccacctatgcatccctgacagcaccatttgagaggaaacgaagagaaagactcaaaccattatctatttaaattgtgcaagatctcatgtagatataaaagccacacaaccatctctgctctcgggaagctcatgttagttaagttgaccttgcacagctgtggtccagccctcactcaggcttccagtccatgtctgtaaccagaaatgacagcactccagctttctggcaactcatccccatccttacccccacccaggcagcctttatcctctggtgggaagagagagcagatggagaaacgactcccactcaattcctaaataataccagcttcaattcccattaactgtgaatttgcatccttgtctaggtaagaaccaagggagcaagagccttggggacgctggcaggccagggcaaaggttaacagcaaagccctggctgcctgccagcctgcccttctgaggacatggccaagcagtggagaggtagcatgctctagcaaagagcaccgctcctgccatcaggacacctggcttctgtgcctgcccagcctccaacagaggagtgaccgctctgagactgtgttttcacatatgtaaattccatcctaccatctattcattaagaagacatgcattgaaagggttggattagatgagcactaaagactcttccagctctaatgctttgatgctaaggaaagctgagctttctttaaagcttccttaatgtgctgcacagtgaggggctgaaatccaggacccctaaggcagatcaggtcagtctggcatcacacagcctgagctggggatccctgggcctcgggttccttaaaaacatataaaatgagaataatgattcctgtcttttcattcctgctttttaatctgacaaatatttatcaattgcctacttatcaggcactgtgctgagaatacaaaggttaaaaaaaacaccttgctctcattgagcatgaattctgctgggaggagggagacaaaaaaaattttttaaatataatttatacagtatatcagatatgtgctatgtcaaaaaataaagcaggagaaagggacagagagtgcttgggagggtggggaatacaagttgcccttttaaacagagtgatcagggaatgtctctcgaggacatttgcatcaggatttttgcagggatcaaattaggtaactgcacagcgctggggatgcagtaagtactcaaaaaggcaactaacgatggagttcataactttcgcagcctggctgacaactggggctgatttaaatatatacctatgacccgctttttaacccatgccattgtcaccaacccacgtcctttctgaggcagaatctgttttcagaatgaggcttgtctgctttctccactgagagccattaaccttctcgggtttgcttctgccttcaagaccatcctattccttcccatagaccatattccgtctgtatcttcttcccctgcacagatgtgcattctccaccccactcactgtcctcagttaaatgtaactctttccccactcactcaccctctgtatcccctgccctctcctccaaatcacactaattttttaaaggagtgatacagtttggatgtttgtcccccccaaatcccatgttgaaatgtgaccccaatgctggagattgagccagtgggaggtgtttgtgtcacagacatggatctctcatgaatggcttaatgccctgcccatggtcatgagtgagttctcactctattaattcatgtgagagctggttatttgaagagactggcacttcctcccctcactctcctgctttctctctcaccatgtgacatgccggcccccctccaccttccaccatgagtggaagtttcctgaggccctgaccagaagcagatgctggcaccgtgcctcttgtacagcctgcaaaactgtgagccaaataaacttctttataaattacccggcctttagtattcctttagagcaatgcagaatggactataggaatccattttgaactttatcgaaatgcaaaaaggaggaaggcgaagagaaaaataaaagggaggagaaagaggaagaataacaaaaaagagacaaagaagagaaacaccacctatattatgggtgagttttaaatcttagaagtcagccgcagaattagtgattaaggaaagaatactgtagggggtctcagtgttaaaaatacttgaaaatgcctttcacaagtttgacttcagggagaagaagcaacaatcatttactgaaatgaccatctatatgtctgatatgaggaatgtgaaagactagaggaaaacagaagagtttgaatcgtcctcccattcaatgattgttctgtacacagctaacacatgcattgttatgcctgaactacaataagcattgaatgtatcttttaggttattaggttcttcgattatttttcccaacttatatatccttttacactactgagcagataaagtcattccctccctctatatacaggtgtgtgtcattttactaaacattttgcattaaaatgtgcatttttgtgcatatacataaaaatgtagctttccttagactctggtgcacttctttaataagatgaaaagccactgtgccagctataccgcttattactatgcattcatgtaaccttttggttgtttcactgtaaattagattaagtgaagtgaacctataacatgcgtttgccttaccataaatctgcctgtgctggcactcatcgaacatttaataacaaataaaagatgggtaatgaccaagcagctcttgcccataatgcctaaaaactaattgactcaattcctcatttatttttttaacctttcagcactttccaggccaagagtcaaatgaggatcccatgagaacaatctggctcatacattggttccaaagatggggaatttgcctcaaggttgtaggaagattgagcttatcacagctctttcattaagaacctaagaaagtactttttttcacatcagttattcaaagtcactcttccccatccctcaaaggctgggccaggacgatccagccttttaagatggcaactttcactaagaaagaagaatttagggaaggaggaaacaaatgttgagtagaaaaactaaagacactggggaaaagtaattaggcaagattcataagaggtttgctatattaagatccatctatctcaaatagcatccgttctttctacaagttccaaaagtagctctgtatgaagagaagcagcgggctctcaggacagaaagagagcacagaggtatgtggcaggtgtaccatcacgtgagtgacagaaacagaccatcagagattacagagtacatggagaaggaaaataaccactaactgctccttggagaaatgacaaatgaaaaatgtagacgggtgcctcctaataactcacaatttcttcccagctcaggggaatgaagatgggtttggaaaacttacctaatcattttctaaacattttcagatcatctggtaccaaaacgtttttagacttttctcaggaaccaagaaaattcttcccttagagaatatatagcataagaaattctccagccctttcaatcaaataaagttatcagttggaataaaactctcttagcatgtcttgggctatagtatagggcattgtactatatttattaataaggcacaaatgaatgctatgaagttccaacagaaaattaatttttatatgtattcaaagtagggttgccagatttagcaaataaaactacaagagccccatgaaatctgaatttcagataaataacaaatattcatttggtataaatatgtcccatgcaatatttagtattgacttgtgctaacgaaattattcattgtttatctgaaattcaaatttaacttggcttaagtatttttcttgcaaccctggcaaaatgcctcctccaggcaacccagaatctatctggagataatcactaagtctataacaggccaagcttcaaggagttaagaagttatcagtgaggaatttggattaacacctgataagtaatgttcatttgatagtgaattgaaatagtgcatttaaggatcctccctgagaaggattttatgccataaaaatatattcttcctttggtaactaacaagtgaatcacttcaaatacatgtctctctttgggattcaggtatatcatataacctcttctctccatcccctaagtgtagacttaggaactttccccacgtggaaagaaagctgtaatctggataggtgtgcatgagacctgtacctccccctacaatgcttctagcagggaaaggggcctatgaatgctactgccttttcagaaggtgagaggagaagccactttcctaaccctacatccctagtgtcatgctggggctgggccactcccagaaatctcccagagagccttcctccctactgcagttgctgagaggagaatagcaggccaaaggaaaagtcatccttataaaacaaccagccatttgcagcaattttatttgcaaagatttcctgctgtggctaaatggtgtggctgcttggtttgttatttaaaagagtgaccctagtgagaccagagctctgaaggggtggagagtctgatttcagagcagggtaagtaggaggagcttgaactgaatgtgcctaattgattccactgctgcttttgagcgtgctgtgcctggtgataaaactgcagacttggggctaactctataaaccctgttagtcaaccccaatcctttctggatcctgataggaaactatactaaaatattctcaagacaggcagggattacattcaagaaccagaagaagatgtatttggatggagaggaaggaaaagaaagacaatggagataagggaagaatggaggtgtatggacaagggagacatccaagagatgtccagcgggcaggcaggtgcagaacccaagtaaaggcagggaactggggcagtttgcagaggaaatgctttagtggagaagtaggtaggtaaatctgaagacacttcttaagccgtacatttgggaaatcaagtgaagctggactccctctctctctcagtctctctgctctacactggtgcctgaggaattgatgaataataatccttattccctgtaggactgctacactggaaaagacggatgtgggcctctaggactgagtagggccaccttcctgggtggccacacgggagcatctcaggcctcagagagatggcaacaaaggttaaaaccaattgcgatttcagagatatgtggttagaaaccaggcttcagagatgacatttacattgtaatgtaacataagccaagcaggaaataataatatctgcagatcattgtttacccagcagaagttttaagttaaaagtaggcattcctgggccatatttatgagctttaaggtaacattcacttgatttcttcgtgttgttgggcagatgttttagtctcagtagtccttcactgttagctttggttgtaattagcaaacatttgggaaaataatctgaatcagatttgaatttaacacgaaaagcagtgggaggaaaaccaaagctacagaactgaatcaacagtacatttttcaagggaatctttattatcttgcaagaacagagcagaacgggaaggctcctgcagagcaggtgtgcactgagtcttggagggcgtcattcacttccgtgtgccatgcactgtgcaggaaatggggtcagagaaatgagtgctatgggagggtcactactctcacagagctcacagggaagggagataatacagcatgcaattgccacagtttgaagagtggctttatctgaaaagtacaagatgtagtgaaggcaaataatacagtaatcttattctgaagctcaggaaagacttcccagcagaagtaatgccaagactgaagcctgaggaatctgacaaatgaagagcatgaggcaggtaagggaacatcagcacctgtgtttggtgggaaggggcacgctggagagtaagtttaagacagagagaggaaagagctggaagcaagagagagcatggtgtttttgaagaactaagctcagtgttgcaggaaggtagcgtgcaaggcagagaaaagcatgagagaattttggaaagacaggcagggcccatgaggctgaagtctttataaaccatattaaggagaatggacctcattaaaggagcaatgaaaagcctctgaaaggtattaagcaagagaatgatgaaatcacatttttaattttgatcaccctggctgcaatgtaaattgaaaagcagcagaacttggaggaggaagatcatgtaagaagccctgtagtaatgcatgtgagaaaaaatggactgggatgttgtaggagagatgaaaacaagaacggcattccagaggtatggggagactaaaatccggggcaaacagtacgattgactatgaggtgtcagggatgtggaaccaagggcatctaggaaatttttattttaggtaactttgtaatagaatacatcattgacaggcagtgcagatttggctaggagagggtgggagactagtgggagaagagatagaagttgagctttggatactgtgagttcgaagtgcccatggaatccaaagaaacatatctggccacagctaagaatacaaatttagagctcaagggagaggttgcaaccagagatgtcactttggaaaatatacagacattaattgtatccttgggaatggatgagaaaggaagagggtctagaaccccaagaagtgcccatatttaagggatgcataaaacaggagtgtgctaaggagccccagatggaactggaatagaaggaaaccagagaggtagaagaaaaaccaagacaatctgtgccaagcaaggggcaatacctagggatgatggaaagaggaacctctagagagttgatggtggaagaatatcaagattggatcacagatataactactgtgaacctggtttgagtttcaaccctgaattgaagctgtactctacagactgcagtccagctccctgctagaagttacccactcaacctccactatatgttttttaacatcccaagtacaccttttaatattttatttattaagctagatagtgagtacctgagtatgcattaagtttttctgaatacctttctgtacatcttaatacaattaaaaataatttcaaagggatgtccaacacattgttgaatgaaagaaatcaagctattgaacagcaagtatacttatatttccatatatgtaacattgtgtatttatgtccatataaatgtacatgcatagagagatatctagaaagatgttcacgaattatttctacaatgattatctccaattagttggatttaagatcacttttatttctaaaacacacttctttatgttctatttagtttgaatttttataatgtacttacatagaagttttatacaaataataaaaccacgaaagtatagtatagaatcttctaccccacagagtcatttaataccccacggaggatgcactgcagtcacggctgggttatgcaagatgagggcttgccaaacaaaccagactaagagtaactgtaaaagccacctctatagcagcatcctcacccttaaaggcagaggctggaggaggaagagacaaaaaccaagcctgtttctttaaagaaagaatatccttcatacgactacagatccgcataacctgttcttcaatcttactacaatacggcaacattccaaaggtaagcggactggtcctcccttatttctaagtctcctgcatctttctttgcgatcaagtagtacttacagatcagagaggcctaggttcaactccaaactgaccactcacttgcaacatgacattgtataatttacacctccaagcctattctttcgtattgtaaaatagaaacaattgttaaaacctgacttatagagttattttgaggatcaaatgaaaccaaacatgcaaaacccttagagtaacatctaacacataataagtgctcaataaatgaaagttgttttggcaaggttggatccaaaacactcccccaatcatgaccaattgccatgcccaaggccaggcttcaacctgctaccgtcttgaactgttcttcctgcagtttctgaacttccaaccccagtctttgaagctcccctctcatctccaccatcaatgtgccctctgttccacactcacctatttagcatattggactggtagattctcttctcgtgggtgttgtaacaactgcttttgggctcagggatgaagctgtgctcagacagcatgtcagaagcagcagtggtgattatggcaattccatctctcactctggcggggaggccatagtcccattcatcatatgatacagagatgagcccagtggggaactccgcaggcactgtgtctgtatcccctgccaccagactgggcacgatccacgtgtagccatagccagtcagccctactgagttggccacttcaaagatgtaggtggcttcttccttggtacagtaaagaagaatgatggggctttgaagtttcttgagctgattctggatcttagaatctccatcgtccagggacatgtccagtaggaggacctcctctagctcccagcccacaaagctattctcaatggtgctgcggatcttgtttacaaagtcctggtagccagggaaataggtggtgacgatagaaaagatgtaccagtcatattcttccatgatgttgagcattacggaagcttgctgttcaattgatgggccaaactggaagaacatggaggattcatcctagaaaaagaacaggacaaaaaaaggaagagagaaaaaaatcaaaccaaagatggtaatggagattttgaaccaagtgggtacaaagatttgtgttcattacttatttttatataatgcctttacaagtttgtatttacaataaatatttttaaatatttaaattgcagatatttgtaatacttttcttcctaaaattgtctcctagactttacagaaaatcaacctatgtctatacttgccttgtctgaaatccttggggtttctgccagagcctagggaagctccctaaaatcaaatatgttaatatttctaaagcaaaacatatgaagagtcacatagtgtagaataaaggctctaaacggcctcatgtcagttcaggtcaggttttgttgtcaaatgagctatacaaacacaaatgcacatgcccacacagacatacacacacatacatactttccatttttcaaggcttttggatttcttgcttgtgaaagtgtatcactcagtcacagagtgcataatccaaaaatgtcattgagctacacataaacctatctacggaggtgagataagctcagtggtccagaaggtgaatggtactcagatacagatatcagggagaagtatacgtagtatgaaattggatcactatgtgttctataaacatataaatgttaaattaatatcacatttagtttgctctctaacttctactctgataataatatatgcagaacagaataaggctcaaacagtatgtctaagctgcaagttaaaattattgccatttgaactcatatctgattaagctttacttcagacatatagaagatatgctctttctctgacctacaggacaccacaggtcttggtttgacctgggcattgcacacaccctcccgtgtcaattttgagcgtcttctgatttctccttcctttccagggagaagccattttaaatgtctcccattttaagctgtgtttcacctgctgttctgagatatcaagtcctgcattttctctctacctttagctagatgagtccgaaaacacaaaatgaacaccctctcagtcttgtcctcctatttcccctgatttcctcctgggtaatggtatgtcttttcttgctctgtgccccttatcttctatcccattggctcatctccattttatagcaatccaggctaacaaaactgtgtcttttctaaggggcagttccttcttatcctccaatgagagcttcaaagtacagttacaagagacctgggcttttaaacaaaattacatagtggtttcttagttcaggaacatattgttgtgcagctgagaaattgctgagcatttcttcagcaccccttattgaaaaaaatacaggttgggaaatatccagctggtatccaaaaatcctgattcggcaatgagagctgccagcccctggctctgcctgggctatttgttctcacagcttgaacttttcacattttccacaggctacccagaatgaaaccctggatgtttggtcatataggagtaatttttcctggtaagggtgaaatggtgctcaccagcactctcttctctggacttaaagatacagttgaagaggagcttcataggatcatgtaattcaggaaagcagggagggtgaggcaccaagaataggtgagtagaaaaaagggaatgaattcacaatagaataattatatcatgtgtatctattccaaaccctggccagtccctgatcctagacttctcctactacatgagtacaactcttaggcaaagctgaccttgtcgttaggttaaataacacagtgggactttggtcggaatgtttgcatcctcctcaaattcatacgttgaaatcctaactcccaaggtgatggtatctgatggtatcaagagatgagtgaggccctcataaatcaaattagtgcccttattaaagaagccccagagagctaccttgctccttccaccctgtgaggacagagcaagaagatgctctctatgagtcagggcatgagccctcaccaagcaccaaatctactggcaccttgatcttgaacttcccagactccagaaaagtgagaaataagtttctgttcttttttatccccccagagtctcactctgtcacccaggctagagtgcagtggcacaatctcagctcactgcaacctccacctcccgggttcaagcactctctgcctcagcctcccgagtagctgggattacaggcgcccaccaccatgccaggctaatttttgtatttttagtagagaaggggtttcaccatcttggccaggctggtcttgaactcctaacttcatgatccacctgcctcagcctcccaaagtgctgggattacaggcgtgagctactgcgcccatccaaatttctgttctttataagttactcagtttataagtagcctgaaaggactgagacaagtgggaatctggggcaatacaattttattccaagaattgtcagtggcctacagaggacgacgacaggaaaggaaggccagtggcaaggtgacacccctagaatagctgtcactttaaagagacacccatttgtttttcctgtcatgcttccagctaaagaaaaactgggggattccgaaatgagaaatattatcacatgagcttccacaagcccagtggttatagcaaagtgaagaaactttccaatatgctttaagatgtacaagcttgggatgaaagggatcccagtggcaaacaaagcaggtctacctattctgtgataaatgaacagatcttatcacaagaaggctcttgaatagatgcaaagttcatgtgctatgaaaccacagctggctgaaatacatagcaagaggtacaaaagccacgggggtccatagtaaatgggctttgttaattagattgaatttagaagaaaaccaatctattaaataccaacttggccctcccctctgttaggcttctcttaatactctctctcccccagttgcaagtagcttgtaaagacactgctagctactgtgtgaaggaagccaatgcataatgagagtgagaaatgagaaaaattgatatggctccatcatccccaactacatccttaccgtaccttctagttctactgtcctccacaatctgatccttttcctgattcctctgctccgattgatgcccagctcaaccattttattttgccaagcccttattaaataaggatgctttatatgaccattttatctggcacccaaaggaggctaatgaagccaaacagaagtcaagaaacagaataatagcttgggccaatgtttcctggtataatgagtagtccagttattattcatttagttgacacatcaatatggtatacagtgatcaggaatgggacagctctttttcagtaaagctctagtctagctgtaagttgcaaatggtgacaggctttgcaaattatggccatagccacaaataaaagggaaatcttcatgtgtgcatcgagtagaaaggactggtggccacacatccatctttgcaggcacccagcatgcactgtgattaccgcaagttatcgaggatgaaggacagagatataattctgtttgtagctcactatgcttccccacttacatttttatctcctaatgtcattacaaaatgttgacatgcaggggtccttggagcagtctcctcctagtgaagaatcccagtcaaatttattacctgaatgtccttcttcaactcacctcaagagcatctttaacatattcctatataaagggccatcctaacagagatgaataagcagcacagggaaggtagaattgtacactagaccctaacagtctagaaccataatgtggggcccccatcattttgatgtttgtggtgtttatttgctaataagaataaaaaaaaagaggtgctttttcatcttattatctgcctcagaaaataattgcctaaaaaattagcagtacctaagattcctcttctgcatcatccagatcccttatggatccacttcataaataaaggattaagtgccccagcggctggtagtgcccctggcaatagggcttccactcaacacccttggggactgcctcagctaaaaaagcccacttccccaaagccatatccgtttcctggggtaaatgggactgaatgactggctgttacaggtgtaaagacctaatcttcttgccctaactctagacaactccaaagggtcagtttatcttcagaattcccccacaggatttctgaagcttccattaaaactgcatcacacctgcacttctcctgtccagccttgtccaatcttcccttcccactcatggtgctgatctcaaaagcaccccctaataaaccccctgcacactaacctcaggctcagagtctgcttccctgggaacctgactctacccatttcccccttttcaacaccaaaaagaaattgcttcaaagagaacatatctattttcaaatactgaaatgacttatttggtagaaagacaaatcttggctcattaaattcagaggagaagagaactgggaacaatgagtagaaatattaaaaggcattattgggctcaatataagaaatgcatttgcaaaaattataggttcttaaaatggaatgggtctcctaaggtagtgagctctctgtcactgtaagcattcaaacaagagctggattattatctaacagagggatttttgccagtacatgggctggaaaattttatgattatccttaagacccaattcaaatgtcaggtcttttaggtatgttatcttttctaactttccctggtcaacttacttctatctcccctttgcttttatcacatcttgtgcatgcctccgtcatcatacttacacagtaaacatgcatacttgccttatctgactaaaaatgtttctcaagaggataaactataccttgttcatctctagatccctagctgacacatgaaacatttttctagtgttcattgtattaatattgtagacgttttatttactgggtgggagagtaactgaaatgaatttgatgatctcatctagttcaattttttttttttttttttttttttttttgagacgaagtctcactctgttgccaggctggagggcagtggcatgatcttggctcactgtaacctctgcctctcaggttcaagcaattctcatgcctcagcctcccgagtagctgggactacagatgcgcaccaccacacccagctaattttttttgtatttttagtagagatggggtttcatcatgttggccaggatggtctccatctcctgacatggtgacccgcccacctcagcctcccaaagtgctgcgattacaggcatgagccaccacgcccagctagtttcaaatttttatgctgatggcacatatctacctcacagaaataaggcatgcctaaaaagttatacataaactgtgcttttacaaaatgtgaggggatccctgttgtagccagccagagtggcagaaaatgctatagtcacttatttacatccctttgtagcaaactccttaaaagcatcatctatactcaattctcctaattcctcttctcccattctcataaactgaatccaattagactttcaacaccaccacttcactgaaacccctcttgtaaaaggcaggtgactttgatattgacaacgccaatgtccacttgcagtcctccttatctaccagcaacatttgatgttcttcatccaatccctgcaagagcatgctcaatggtaccactggctctgtcttaaccccctagtctaatgctcaacaaagaaggatgatcttttgtaaacttaagatgttattctataccccaagccctaaaagactccccagtgtactacaaagaaacagccagcacccttgattttgatcccatattggcccttgggtcccaggccctcactctgctccatgcactctgatctgtattgaacacactcacacattcttgcaccaggcctttgctgtagctatttcccctgcctgaaacactttttctccagctacccaggtatcacacatgcacctcttccacgtctttgctaaaatcttgccttcccaacaaagtgctctcaatcctgaccacaacacggaatgctgaagcctgtcctcacttttcataggcatatctgatccccttgtccagctttgctttttctttttcccatagcatctctcaccatcagatggactacatgattacttatttgacatgtttattatgaactcacctgcctcttcccaattaaatgtgagcaccaggagggcagggatcggcatgtgtttgttcattgctataacccacaattatggaattgaggtctggcccatagggtgctctcagtaaatatttgaattttttaaatggggtcatggatgctgcaaccagatgctctcaaatctaacctatctttgttggctatccaactgtgattatatttttccagcatcttaaagtctttcacattattcaaatcttagtactgtataatatcatagggaatataatcctgttagtacactagtatagtttcagattaaatcaatctggtttccctctactctctttcctattatattaataaagaaaattctccttcttttcttctaaattcagttcttgaggacaatctgtgtctgaaaaactctggaactggtaggctttccctgagactttctccatcagattaaggaaggcaaatgtagaaatgatgggctaagaggccagggttacccagctgtcctgagaagttctgagtactccatcttcactccttccacatttagcacagagtagaagcagaatatgggagacaaaaaatctctttctcctcccaaaataaggggaaatactttcctctactcaccaaatcctaaatgatcatctcctttgatgagtagaaattctgataccacaccatcatttttttctggtgactaaggctggagttagttctttagcatggctttgaatagtgtcagagttttgcgaacagtgtcttgcaagatagggaaaatttccgatgttctccagcctcaccattaatcaaaaatatcatgactgaaacacacaatggaagcatattgatacagaatcatgatctttcctgcctgttaaatgccagacccattctttctttaaacccttgcacacaaaggagaacattctgagttttcaaagaaattcaagcagatctggcaagtttaagagccactctggataactaaacaacttccgcagaagccagcattctttttattatttgttctttcagaagataattgtcctttctacttgaatttggccccattttcctccctgactgagtctctcttcggatgtgctttaatcgccaaatttaaaccacagtagagaaacaaactaaaggtattcattcactttgagaatgtctacaagattcttgatattctaggtcacagagacaactttatagccagaagaaaacaacaggaagtgtaataagaggagaagaaggaacaggtagattccccatcactaagatacctaaacgaattacagaagtaagggagcaaaggtcctggaggatagtaagagcactttgagaatgtgtttgtgcccctttgtaaggtatcgggaccactaaaatcttaacaagactctttcatttcattttaaagtaaaattcctttcctaaaagcaatcaaacctactctcagatggactgacttgtatttttattaagaggtgcctttctataaaagagcaagctgacaagttcagcaacaatcaggttctgtgactgaataaatgtacttttaaataaacacaagggaagaaggcaggaaaataggaaaggttggaaaaaaatgaaatgaatagagaaaaggtgtgtacatattaaactaagtgttaattaagtagtagcgttatcaatatcacactaaatttaataaaatcaagtgtggtcaacacaaatataggtctgggcatttatagaataaaatgacaggcatcataaaactaaacctaataaccaaagggaagatgaatctttttctttttttggaagggagtctagctctgtcacccaggctggagtgcagtggtgcaatctcggctcactgcaacctccatctcccaggttcaagtgattctcctgcctcagcctcctgagtagctgggactacaggcgcccgccaccacgaccggctaattttttgtatttttagtaaagacggggtttcatcgtgttagccaggatggtctcaatctcctgacctcgtgatcctcccacctcggcctcccaaagtgctgagattacaggcataagccaccgcgcccagccatcatttcttattaggtatgaaatactaaatccaaaattgccttatctcatcaaaatcatcttatttaacttaagccgaaaggacagcatctacaaaagaactgtgattattactaaagagcagagttaagtgcaagccagtgatggcacttgacgtactagcggcatttttcagagtaaagatgttgacatttgtctcaaataaattaacattcccatctcttcaaacacatttgatcagaacatcacgttcatataccaaggggagcagagaagcggaagggtagaaaaggcattttatatttgattaagctatgagtgctagtacctcatgtgttgctgaaaataacacaagcactggttctagatacagtgatcttgcttgtacacatgggcctcttcaagggatccctgggaaacaaagggctctttgcccttctgtcccagctccatatggagtgagagactaggcatggctgagtttaaaatgtggatcagtcatgcttgtttggccacagattaacaagccattgtctccaaaggctaaatccagaaagaagttttctgagaaagttttttttttgtttggttttttgttttttgttttttccaccaaacatccagcgatgtgtttttctaggtctctagattggaaaactgatcactacttcctcacatatagcaaagtacggctgttcacaatcaaagaggctttgaatttattcacatctcccaaaccaatttggtcctccatctaaaagaggcaatgcattttgaagggctccagaaatgaaaataaaattgcacagagacagattaaaaaaaaaaaaatcttccaacaacttgtcagcacctgcatgtcccagcttcattcaactataagactttgaactttagtcaccaagtactgccttctgatctttaaaccaggataggccaagtactgtcctcaccgacaccatcttctaaagctggctgggctgctttacacccaggaattggtgcactgattgtgaacctggctgggttcagacatggccacccagatgaagcctgtcttttcgtgtgcctcccacgtactcaatccaaaggactaaatcacttcctcatgttctgatttttattccagtctcccgtggatgaggagccttattcagagcctccaactacattggacggtccatgagaagctgcctaaatccttgatgctgggcttcctgtacctacagatgccagctggggtctgacacatctaccgtttcctgttctatacgagatgattagggcattattagtgtcaacacatctgtgttgcctttttccattactttgtcaaactcctgcacacccacactagcctgaatcccaccaagggggttatctgttcttaaatagggactcagagcttgctgacctccaccctgtggcaggcaaccccatggcagggttaagtccaatctttcccagctttctgaccctccctagaccttggcctgcaatacaaattgtgttcagtgtttgattggttgcatccaagtttatttgagattttctttgttttctttatactgaaaattgctctccttttccagaattattcaactttttcttttactcatttatggctgctggttattagcactaaaaatggatgtttaagacttctgaggttctaactgcttaccttcattttcttttcttgatctctaactttcctgggaatagacacgtgaagtttcattgagagtgcaatacaatccactaggatggatgcccagctcctaacctgatacagggagaaacacacgaaaactacttttctaaccacacaattgtgtccgcagtcctagaaaagagcctatccttctctatatccataccaaaaaaaaaaaaaaaaaggatattagtttagaacgtacagaatgctaaggatccagttgccaacacagtcaagagacactctctctggcccagcccatcccctctgacttaccagtactaatcctgtcaacattcctggagcccatcttgtccctccttgctgcaatcagcactgcagcccaggctgtgacctcttccttctttgcctccatttttacacagtcctaattccacagataaagaccccaacggaatgctctaaccggctaacaccgttggcccaaaaagtgttgccatcctcccctgtgggaccttgggtagctgaaatgctgttgctatctcaacttgactctgggagatggaccaagcctggacaagcagcagaaatcactcatggaaggtgccaacgttgatggaaataagaaaaaatcttccctagaaataagaacttggcaagtaaaagaatggtctatttactcatttttattttgaaatttgtttacttgtttgctttcaaaccacattcagtggtctccaacatttctattgttgatggcatttcacccggatacttttcctctgatggaagttgacaagcaagaaagaggtccttgaaagaaaatgtcatttgttatttcaaacagaaggaaactcggggcttattcttgcccccatcctcgtcagactctggagtacacagtcactgttataatcagatactagtacttattaatggctaatctgaatccttcacaatggggcctctgcctataaatgaatcatcccagacaagtatgagtgcaacatgcagtctcgttatctttagaactggcagtaaatcaactcacctgaagctatcaggctcacatcggccaactgtgaattctgatccatgctaacaaaacaaaatgggggcaaccttatggctcagcaatgacattttgatgttaattcggtactgcctaaaagtgccaatctgctcatcttttataagcacagatgaaactctctgttaaatgccagcccaagatctcaaagaacagacactaaccagagtaccctgagaacacattagtccagctcatagtaggaccacaactaaaccggttttgtagaacatgaggtgaaactagattattttacaagtcttcaaagaaaagtccacaattttcttcagttacctaagccggtgagtccagaaacctgactttcagaaattcatctctttgtctgccttacgtccatcgtgctgcagattaagctctttgggtctcatgctctccttggtggaaggcacatgataagccctcaagaatattgtcagtatgaacaaaactgatgtcaagatggatgatggtttgtcattaccttgtatgtaaagattattactaagcccactctcagccttttcttcctgagcctaaacaatctccctttctaattcatttcttatagttcttatgacaatattcattgagtgcttatagcaggctccatgctgtccatgcagtatgtgaatatattttcatattccattgcagcaggccctgatattttctccattttaccaacagagaaagtgagcttcagagacatgaagggtcttgcccagggtaaccgctggaaagagaacctgtgtagatctggctcagggtgcacccaccaaccactgcagcacacgttctcaagtttcttttattcatctctgtagctctcatctgaactgtctatacatccttgtttctttaggaagcacagagtgattacagtagtctagtaaaagtctaacctctgcctagtatattacagagattattttcattaattccttaagcttcaatcccatgcatctatccactggcactgctaactagtgatggactcggtacacattattactctgcagtgttcttctactggacatgcatacaactgattctttgtaacattattgtttgctaatcaatcacatatttattaaatgcttatcaggtgctgtaggaagtagaaatgaagtataaaccatcatcaacctcaggcaagctaattggaagataaaaatatatgaaattattgacgatgttccttaaatgccatcatgaagtttagaatataagtatcctaagaatggtgagaagagagggcactatgtctggacaactctgtttttcaagcttctttctacttatccctctctttcccagttctcccactagttttgtgcagtgagcaaagtaaacatccatgtgcatttcaatccaaatgccagactgtgaaaagaaacataagaaacactgggccttgaactgttccttgtatttgtcctcaggtggacaatgagcctctgatatcgagtctcagctaatgggcataccatagagtatcacgtccaaatcacagctacagtctaaatgaattatacatatctttttccatgatctacccagcctttcattttcatctcagaagattagattaatatgacaggacttgtcctttatgaagtcaggctacccagttaaaaaacctttttctcttcaaatgattgcaaattgattttgttaagatttttattcttcagaaaagctgggggaatgataattcctcatctcttctcttctctcagtgtatttgatttctttacactggcctttttcctctagccttccgacagttttaataattatacacactggtcaggaaatcaatcatgatttcagcgttcctaccgtagagatgatgtgggctttcaaatttaaatccaagcaactcacacaagtagcctaatgttggccgggcacggtggctcacgcctgtaatcccaacactttgggaggccgaggcgggtggatcacgaggtcaggagaacaagaccatcgtggctaacaccgtgaaaccccgtctctactaaaaaatacaaaaaaaaattagccgggcgtggtggcgggcgcctgtagtaccagctactctggaggctgaggcaggagaatggcgtgaggccgggaggcggagcttgcagtgagcggagatcgcaccactgcaccccagcctgtgcgaaagtacagactctgtctcaaaaaaaaaaaaaaaaaaaaagtattctaatgccaaattttccttctccagttcaactgactagtccctgtgctccattcatttaaaaagacgtagatgactacctaaatgctatcagttctcaaaactgcctccatgtctgttaaagaaatgtaattttttttctaattttcttactgatgaatcaagagtatattttaaaggctgcttttattcttggcatgatgacattaagtggatatacactagcaatggcgcccatgtgtattaacactataaacagcaacatagtttctcaacttttgccaaaaaacagcatatgatctgagctagaggtacttccaggtgcaaatagagtaaggcacaatgtttttgtctgtatgttgatgcttattttggttatctatgtaacaatttaccaacagagttaccagatcatgggttaagtttgcaagttagtttcacacagatgaaagatatcttggtttgtaggaaaatgtcctcttttgttcatatttttgagttccatgaaggtgcacaggttatcaaaattttcataagagtccccaaaagacctctcatcaagaaactccatagtattagtaacctagttacagtaagttattaatattgaaatcttcggtgacgaagggtaagtttgtctctccttaattctctcaacttcttaatcctttcctaatgtaagggagaataacctcagattcccctctctgttccttcacagaaaggcaaagtttcaccacaataaaactcttcagctacctaattgtccttatttattaaatatgcactaaaagaggattttcactttgctcagtgaatgccttctagagtcagaattagttaagcttccttctttgatatgtcaactcatcatatccatcatgcccaattttccttttagactacctgccctggttcacagcttcagcttttctttgcacattaagtattgttaatcagaggtgggtacctggccgaagcagaccatcttgcagctgcccagtgcctgcagtctgggcctggctagaaaaatgagccagaaccatcagatcctctgtctctctcaggagtctgaaccaaaaaaacttgaaagaatggcaagtctttcacctataacatgaaacagagtaagggccctgacaaccaaggtcatgggcactgtgaagtaatgaggaagcagaagctatgggatagcaggggatgcctgcagtagagaaggaagtggctcagatgcaagtggaaagcaaagaacccaagatcttcaaaatacagaccatatgtccttgaggaagacccagtagggagccagctggggagtggtcttagttcctctcggctttccaactctaggcacaaatatcctcgtagtaaattgcctggtattttgtttttattttgttggttgttgtgcaacaacttagttagtctttgctcctgctaattaaaagagcctaattaaaaataagcaggtggccggcacggtggctcacgcctgtaatcccagcactttgggaggccaaggcgggaggatcatgaagtcaggagattgagaccatcttggctaacacggtgaaacaccgtctctactaaaaatacaaaaaattagcctggcttggtggcaggcgccggtagccccagctactcaggagactgaggcaggagaatggtgtgaacccgggaggtggagcttgcagtgagccgagatcgcaccactgcactccagcttgggcaacagagtaagactctgtctcaaaaaataaataaaataaaataaaataaacaggtataaaggctaccgctagttactatttccttgttttacagtatcattcttggaatttattctacagcttcccattttcatgaggcaaacatctgcctccatgacgtttaccttgctcagaatgcaacacagcagagctaaggtgagagtcaggtttagtcccctggcctgagacaggggacagagtgccctcagtaatgcaaggtcactcacacaagaaccctcccaccccctcaaggcccttttcttatttcccattctgttttcatcccctgtctggttgtaatattcattcaagtgtggcttttttttgtcacacggttctcaagatggatggcaagctcaccacattcatactcagtgtttcgtgcatatgctcccaagttcccaggcacgtctctggagctgtaagggtatacatttgcagcatttctccatctgttctttcatctatccagccactggtgtttattcagtatgcagctcatggctaacagagaattgggcatagcaagcagggacaatttacttggcgataaagtcaaatcatgcacttgaagatttatagtttgcttggagattaaatactgtttgcatcagcaagctgagtaatagatgctaacaaaaccatatcgccttcacaggcatagcaagggttaatcagaagttgcttacaaacgtgccccccaaataataaataagcaggtagatgggggctggtatcccagattatgtggggataatcaaagatgagtgaagctgcatgaaaccctgggatatggtggctgctccacatgtctgaagccagtgggactcacacaaacctccattaggacttgaggaaggttctttgtgcaatatcaagcagatgttaaactatgcggaaagttagctatttattttatctgaacttctattttgtttgagtttctgctcatctttatatggttcttggtttctaaaattttcactacatccagttctctgcagctgcaagaaatgaaatttctcctatcttgctctgctctctcaagtaccttatcagtgggtcctgaacaaaggccagattcaccagtattcagcttttcctcattgcacataaggctgatctgcactttgttcaaatcacatcattccccacatccttaagaatttaggatgaaagaactggctctgaccatcaaggttacagctttgtttcttccaaatcattgggtgtttcacactggccaatgaagtgtccatgatcacttcaaaagaatttaatgttcattgacactgaccaagtctgattcactttgaatatatcagaatatgacaaggtaagacattaagtttaccctatatcagaataagacaaggtaagatattaagtttaccctctgtaaaatggtggttaagccgttgtcagaaagactagtttctgaaatatttaataggcttcacagaaatttggtgtgtgagaggaggttacagagttacttgttagcacagatttaaaagtcaaataaacatcaatttagcccttggtattagcgtctcaacacaagccacaaagagagttagatatgtgctatttattcctgagaataatggtctaaaggtattctgtaatggacaggccctggtgtgtgttgttcccctccctgtgtccatgtgttctcattgctcagctcccacttatgagtgagaagctggaagccatcatcctcaggcaatttattatgaggatatatgtgcagagttggaaagctgtgaggaactaaagatattctgtaatggattctatctgacaagaaccaggggcaccagcctccagaaacccctacaaagttttactccccgtatttcttccctaggtgcctcaactttctgaatgatttcgacaactggtttctgtagccaccacttcacaatggctcctaagtaactgatatggtttggctctgtccccacccaaatctcatcttgaattgtagctcccaaaattcccatatgtcataggagggacccagtgggaggtaatttaatcatgggggtggatctttcctgtgctggtcttgtgatagtgtataagtctcacgagagctgatggttttataaagcagagctcccctacataagtcatctcgtctactgcaatgtaagacatgccttgcttccccttcaccttctgccatgattgtgaggcctccccagccatgtgaaactgtgagtcaattaaacctctttcctttatatatttatcagtcttgggtatgtctttattaacagcatgagattagacaatacagtaaaaaactaaaatttagactttcgttttgataaacctacacagttttacaaagaaagatttagtaagtagccaaggtaacaaagcaataatttcaaaacagagcagaagcatattgctgctataaaaaaaaaagaactggatttggaatcagaaatttagattcaaatctgaatacttagctgtgtgatctttgaaaggttatttaccatatccaaacctcattttcctccagaatataaaagtgctaattcttagctcatagaactgtaaagaggattaaatgaaacactacataagaaagtgctcagtacagtgcctagcacacagtaacttccctggttcattaagtgtgaatctattgaccacatattatagccaagaatatacgtgaggatgcgtttcatttcatattggtttacaaactggttacgttgttaaattaaccatcactttcattgtcctcatcatctaagcatcagtcatatctgatcaaaaacacagcttccgagtttgactggtccttcaatgcaacctagaacagcatgggctcctgagttgtcccttctgaatatgtcagaacactccacctcctcagggcctggtgtgggtcccactgatttttcccatgactttaggtcattcactcagctggatgattgctatgattcctggcccaagagaaatatcttgcctctttcctgcttcttactatatagtcagatgtctgaagaatgttcaacaacccattgaggatactgattccactgttccataaaagtcacgttcttcagctattattcccagctatcacccggtctcagatggatcagctccctctggggaggtttggtttgtgccactgatggctcttttaccatcaggttaccttcctttgccagccacaattccacttcactatcttaaggaaaacaatctctttcttcccatgtgaaaatctagatttcctctaggcttgtccactctgagttcttccccaatctgaggaatgccaccagctttttgtctcatctgcagactggtttgctctgagcataaagaaaagctaaaccacccacttctcactcccattcatgccccctgctcagtcgacaagctccacccacttgccctgattctttgggatgattcatcagctacagtgtactcgctgaagtatcaatttaatatcagcgcatcataattttacaatataaaattctctaagcacacacataaaataatgcaaagtaattcctactgataaagaagcagtatttaaatcatgtctgcacagagtaaatacctgaactaagagcaagaagaggtaaggcggaagtaaaacttgaaattctgaatatctgaatcacttaagacacaattctatcacaggcaagtttgcaaccttgtaagaggtttttttttcttttacaaatcaaccaatttctaaatatcttcacaggactataaaataatcacactttccattgctatttctcaggatcaaagccaccccctgctctatagcaaatgtattctcatttaacaaagtctcagcctccattctcacccacatcctcaaaggtgaagtaaatgctctaaggtccatcctctggaagggcccagagataccatggactatagatgggtggatttcacactccaacacaatcataggaagaactcttgagcagccccagaccaatggggtgatgggttggaggggacagttagaactgcaaaagtgaccagtgtttccaggtacccacctagtgactcacagacatgtacttggcaagttcctacccatccagcaataaaggaactgcgagtctttatgaaagagacaaaatatcctctatttggaggcctatatttcccccaagtctaatttttttaggtctaaagtagctagcatgtccttagttgagtgtgtccatgcacacacctgcacaatattgaatgtttatgtacaaaaatgcagaaatgagtcatctcagatctgtacatgcagagctacgcatctgtcaaatacacatgaggtggatcatggtgccatggcacctaacactgttgtaaaagcagttgtctgcttcttctttaaggtgaacacagagaatcaccttggaacagaagtctacatcttcccaaaagtgctcaaaggcaagcaaatgcctcttttttctcaggaggagtaaaagacttttggagtatgacgaaactgttcttcttggtatgggcacactgatctctggagaagaggtggagaaaagccataaggagccaaggattctgttgagaaaagagagactgatactccaaaccccttcaacattactagaaattcttctgtaccttgatacagttcagactgagaccatggacagcaaagaaaaatggtggaacattccatgagacagtggggaatttgagaaagaatccagctttacataagagactagaggtacatagaggggaactagtttcacacaggataaggctgaatctggaagtccttccagacatacacaccctagaacagaggtcctgccttgggaacactgggtgagcaaatgaactaacttaaaatatcgcaagcctaagacaaaccagaaaaataagtataacagtgtctagtactggaccactcagactgtccagttctctcttcatctgaggtctagaagcaggctgacccatggcctgagtaaactcctagtgctcttgaaaaatctggtgtggatactagagagaacttcagaagggaaaactgcttttctgttaatatgagcagacaggagttttagtagtaaattttaaaataagggatgtgatttctctttataccccagctgataaccagtacaaatgggtgcaaaattgcttacgcaaaagataaagatagaaccactttagtctaatttagataattttgctagtgggtttttatcaaaaagtgaaaaaaatagaagtgtaatgtggtgaaaggtgagcatccagatggtgaactgtggctcattttcctaatacatggaaaccagtgtgacttcaagtcaatgtcgtcaggaaaagctcatccctgggacagcaactaggaataatatgaatgggaatagtgctgagtctagaagaggcgtttaataattttacaggcctcaattgaggacagggttatagcagaagggattactatccactggattactaatcttgcaaaatcaagtgtacaaagcaagagtaaatatcatttttaaatggtgccataacatgtgcagtgcctttggtaaagacattttatcaagagttgtcattgagggacatgtctggcaaacagtttagctttatgtatttccttttaaacgcataacatgcgttcaatctttcctgagcacttaccatataaaaggccctttcctaggcacaaagattaccaaaagtaatgggaaattatccttgatcaaatagagtttacagtttttacacccagaatatacaagtgacactaatgtaaagtgaaatgtaattatcacaaaatgaatgaaaacaaatatatgcggcataggaaaggaagagatcacatgtgatcatgaatcaggaaagttcccatgcaggagaggtaaaatgatgatgatgatgatgatgatgatgctggtgctgccgctggtgatgattattaccaggcattcatgggattagaggccaattccagcagtgggaacaatttaaacagaagtgacgagttggttctgaggacagtaaagcttcaattaggctgtcccttcggcagatatctatcaagtacctaataaacaccaaacactgggttaaaggctgaggatggagacaagagcctcctagatctagcagaggagcaaaagataaacagaagataacataataggtaataactatactggattacaggtggggcttgcgagtaagagctctgtggtaagattgtccaggtagggaccagactccatcatctacaggctgtttattttaggcaagttagcctctcttccaatgtttttccttaactgtgaagtgagttaggaatgcacctgcctctccgggtaaatgagatggtacccgggaagcacttagcatagtgctgggcaccaagtaagtgcttaggaaatagtactgggaggcaggtatttgtttgcagttctctgtctgcctatctgatgtcaagaagaagatagtttcttagaaatagaattagggaagaatcagccaaacatattaacttttcaaaagtcattaatacatttgtatacattgtattcaagaaaatgcatcatttcccactctcataagcagtatatgaaaagtgtaccatgccccatagttaataaattcttttaaattttcactaatttggtaggtaaaatatgatatgtcattgttgttttaatttctataggattacagggaggctaaatatttttcatgttcattagtcacatatattttccctcacaaaaatagtcttccccagtgtggcaattcctcaaagacctaagaacagaagtaccattcaacccagcagttccattaccgaatatacacccaaaggaatataaatcattctattataaagacacatgtacacgtatgttcactgcagcactattcacaatagcaaacacatggaatcaacctaaatgctcatcaatgatagactggataaagaaaatgtggtatatatacagcatgggatactatgcagccatgaaaaggaatgagatcatgttcttggcaaggacatggatggagctggaagtggttatcctcagaaaactaatgcaggaacagaaaccaaataccacatgttctcacttataagtaggagctgaattatgagaacacatggacacactgggggaaataacacacactggggcctgtcaggggttggtcaggggaaagcatcaggaagaggagctaatggatgctgggcttaatccctaggtgatgggatgatctgtgcagcaaaccaccatggcacacgttcacctatgtaacaaacctgcacatgtacccttgaacttaaaataaaagttaaataataaaaaaacttcccattttataaattgggaaattctgaattttaggaattttggaaattttggtaacagaatttctctttgcacttaaagagtcaggaaagatatagtccttgaaaattactgaggagaacaaattaatataatcttacacgacagcacacatgtgctagttcatttcttatcatattttagggaaaaaacagaaataaacaagattaatactaaagcaagtgtgtgggatttggggagcgggaattagtggggattagagcggagacaagagaataagcagaaaacctttcagataaaaagatgaatataggtaacaaaacaaagaaaaaaggaaagacagtgagaggaacatgattatcaaagcaaggcaaagaaatggaggagaggagacaggagcccccaaaacttcttaaaattaatacatttattattttatagcctttcatttcctacctctgtacttagaaaagtgtagctttggctgtgctgcttgtgctgcacaatgagcaataatgcaggcaggagagattaataatacagcggggcagagcaaggggacactaatgggtgtccctaaggtgcaagttctcagagccaagggaatcccaagccctatcccattaacctagtggctccctctctgtcctgacctgaggtgaacaagaagaatctaagtaagaatcgcttctgaatatggatgtttcagcccacatcccctttggaatgtcccctcctggtactagaaacgcaagggccacacagaaaataaagagttaaaaatggggccaggaatgggcatgaattgacaccaaaagctgcttcctctcaccaacttcctggagaagcttcttttgctcaagagtgatcacctggccaaactctcatctacatcctgaccactcaatagtttccagactcctctagacctcttcttttccatgtcaatttcagtccacctcacctgtgccaggaatctgcaggaaaggcaagttgggaaaagggaaagaggcagaaggaagagttaaaggaggtcactatccacactgcactgaagtattccgcaatacccatcttcagaataaggacctgggaggaggcagggctgcagctgtggctgcaagatccacaatggctgggattcaaggcccctaaacaagagaaggtgcctaacgcttggtgcctttccatcactggctcctggagaacatgggtgatttctcttccaaagtcttaggattccttagcctttctcctttgttctccttccctaaagaacactgatattcagaatagatgcatcacatattaaaggtgctaagtatttgcctgcagctcacaagctacaggtgctcctccctcttcttgggcagtcttattggttttggtccaaacatcaactctgaggctagcacaatctctcctaaattttttacaatatctgtggtctactttttctcagtctctttccaatttcctatgtctgccttgattgtctgctatggttctacctaaaacaattgaaattcaaagtcaagccttaactggtttctacacaaaggagaaaaaaatctacctgttgcatccattctgtgagcttaataatcttgcagacttgggtagacccagggaaagaccgtgttgttgatagagtggactttccctatctccatggttgttccacacctctgacccgctcctttcttcctcaattgtcctcccattcttgaagattaaatatatggttttcttatttttatcttattcatgtaattctctatatcaagaacagcttctcccactctgaatcccctcaaactctcagcttctaccccaggtggatttttcaagttgtttcttctgaagaatgtattacactctctgaaaggtattctggagaacacaactttcttcgatcatattacatgatggtgcaaatcatataaaattagagaagttacaagttacagttccccataagcacggcacctttaacagccaaccagaacagaagccagccttagggaggggacagggtcttgtggctcctattctgccaggtatttgccctttaggtgctgacttacaagaaagtctgggggaataacagggcacccagaggcctcagagcagctgccatttactaactagtatagagagttccttatcttaacaactgcacaaccacatgagtgcttaccagctaaactttaatcaagtggctcatcaagaacgatcttacttgattccattttatttggccaaaaatctttttccatctctccccagtcttccttgttgtcaaatcacctgaaacccgtacttttaagtaatcctgtccctcacttgatcgttcattcttcgttttatattttggtccaagaccagtgctctgagattttttggtttctaggaaatcaatccattcttgatcaaatatttttctttaatttgaggaatttctttaattgagaaattaaccccttcaaatgacccagaattgcctctgtaggctttctaggttacagatataatatatcccataaccagcttcctttccttaacgcgacccaacccctgctctgtaacttgcattgttcctctttattttattttatttatttgagactgagtcttgttctgtcacccaggctggagtgcagtggtgcactctcactgcaacctccgcctcctggcttcaagtgcttctcctgcctcagcctcccaagtagctgggattacaggtgtgcaccaccacacccagctaatttttgtatttttagtagagacggagtttcaccacgttgtccaggctggtcttgaactcctgatctctggtgatccatctgcctcggcctcccaaagtgctgggattacaggtgtgagccactgtgcctggcctggtcctctttatctttatagatgttttttggttttgttttgtttttggtattttgccaaacagcaatccttaagaattaagctctagaatggcactatccaacagaaatataatgcaagccacacatgtaattttaaatagcctggtggatatattaaaataaataaaatgaaataggcaaacacattttaataatacatttcacttaatatatctaaaatattaattcaatgtgaaatcaatacaaaaattattaatgaggtaattcatgtgcttctgttcatataaaccctttaattcctagtgtgtattttgtgtttacaacacatcttagttcagactagccatatttcaagtgctcagttgctaaatgtggctcatggctaccatactgaacactgcagttagagccaaacgacctagtccagctactgatagctccaccacttcttagctgctcaagctcgggtaaataacctctctgtgcctcagttgccccatctgtcaaacggtaataatgatagaacacacgtcgcaagagtcttataatttagtgagaaggcacaattcctgaaacagaataaaacgtcaataaatgtcagctgttattatcaaatgatcattattttgctatttcttctcccaatactactatccattgttccaactttttattgaatatacaaaagaatgggtgtcaccatatcaggaaaattctctctccagaaactcatttctcagccactgctttttctcagttgcggaaataattacctagaagagtaccatacctttactaactagatgatacctttcctggcctagatggaccaaaagtaacacaaaagtaaattcacccaaccatagcccaagtataggacagtgataagcacaatttttatttacctattgtatgcatccttatttaccatagagctatttaaaaaaaaaaaagtctcttcatttacataagcaacttcaagctctgtgcctgaattctagccagtatttcatgaaggttcagccagagaaacacgttcattataatttaccctcccaaatattgcagaatgttatttgtgtggcctttaagcagttgtcatatccattcccaaccatggcttcatttcaaccacaaagaatagcagatgcactatgtttcccgaaattcctttaaaaacagtcttgtagattccaaaagaaatgggaacattaatgactggagagttgggaattaagggctggaggtagatagtgggaagggaatgtaaagaatccagtcttatcaagagccaaattgttaacagagagcaagggtttataacatgacgtggcaggagaatttacaaagatgaaagtcaaatgtcaagagtgagaaataatctaagaaccaaaatatttgcagaactagatagtatgacattacttgtggagaaaaaaatggattcttttcaaggcccagaaaaggtattgtaagggcaggttttgccaaaaaaaaaaaaaaaagcctttacagagatgtttgcatagttaagtggcatggtttataaaacttgcaaaaaagggaaaaaaatggaataaattttatagatgtagtatgaaactatattttatttttcttaaggagaaatattttctgatcacagatgtagaccaatattccagcaggacactcaacaaagttccttatgtagttctggtagaaaaaataaaaaaataacatggagagagatccctgatagataaccaaaggaaacttactgagtcctgttttattcagcattttaatcaataacttggggaagaatatttatactaattttaaaaatatgcacatggccagatggtagaaagaataatgaaggtgtcagttggcaagaatcaaacttcaaaaatacatgggtaggcacgaaagttgagatcaacataatcaaatgatattcgtctgggttaaatgtgaaaccaacttcataaagaacacatgagaatgtttggcttactttggatattagattattgtaaatttgggaaacccggctgtcaaacagctaatatgatcttaaactactttaataaaaagatagcataccaaacaagggagatgataattctattgtacttgactgtaagtggaacacactgatacactgataaactgatcattggtagcttgatcaagtttccagcatgaaatatctaaaaaatcatttaatttgaaagccagctaaagaaatttaagctgcttagtttgaagaagaaaatactcagacactgcctgagatgtataatgcacccagaggcaatcacatgaaaaaattgttaaaagtaactccaaagagtagaatatgaccctaaaaatgccaattatagcacagtagatttttgtctcagtataaggaaaatctcttgcaatctgaatggaatggattctcctcatgatccaggtgagttctctgccacaagaaatgttcgaagaaaaggagtcacggggtcagctgtcagggattccttcactcagtgagatgttgaactaaatgacccttaaggttccttctaagactcttaatatggtatttatgtagtaaaatataagcaaattgagtcagttctgtctgacatgataacatgaatgtgaggtcattacatacacatagccccatcacagagtatgtgtgtgattactagagacaaaccttagctcttctgtgtctgtagatcaattatgtcaacagagttatgggctagactttgagctagtgaggttgaacgtaaaacggtgtctgaatttattcaagttgatgttataggcttcactttttccataattagaaagcatatgtcagtcagcaggaaggctacagagaaaaatgaagagttttcagttctcctgacaatgggggtcacacaggggaaaggaaaaaaggtggccactcagaatacacacacacacacactctctctctctctccccgctccctctctctttatatatatatctctcttctgctaacagcccaagaccaggcttctgtgactctcaacatttctcagcagcttgtgagcaaatcttcctctttaatatccagatgatctttgccactgaggttaagaacagtaatatacttttgctcttctcaagggacaaatttcccagattgtaagataccatgcttgtctttgagttgaaactacaataaaatacagaaagaattctagattatctctcagctcttgttttaagatcaatgattcaacatggttctccttctgacagtaatgtaatgagacatgtttcttgcagatttgagaatataactctcactactttatagttctgctatgttcatccttcttaagctgtctttcactcaggcgaatcaaactttgagaggctctttgctctagacccagctcacccacatatttttatctccccatcacactccttgcctcatcttacctctgcaccaaaggtcaaagctgcagcccagcagtgggccagggactctgaaagtacagatatggaaagagtccacccactagcctatgcagatggggaaaatggatctatctagtcttcatgggaatggggatacactgtgtaaacacctggagctcttccacatttagaggatgccagtgacttaaagtcactgtccttccccccaaaaaacctagactttccaaagactgggaaatgttttaaatgttagtattaaaaaactataatttatacacttaatgtcaaatttaaataatataaaggtcaattttataatacactaccaaaaaatagcaaaaacttcactttactcaatgtctttactgaaaattcattcaactctcttccagatgaattcatctctttcgcaccccaatcaccaaggggcaggacactgaaaagacaaacacacacacacacaaaaataaaacacctcacacaccagggataaagaaaagagtaagttagtgatttcatgtacaacatctactttccgcttataggcaacaggattccctatgtaatgagttacagacattctttgatctccaaaatataggacaagagaattggtaacggaaataggttttgttttgttttgttttgttttttgaaaaccacagataggcagcagggtgaaatgccacctttgttccaagcaataggcagagttaggtgggtgttaacagagacatatttcaaaagctaaaatactgcagtaataagacgcgatgatcttggcataagaatctggggcacatggacaaagagagctgactgaagtctgtgaatacccagagaaattgatgaaggtctctgggctcttcaacgggataaaagtatgtttcattgtaatgaaggaaaaggaatgtcaaatgatcagaggaaaagagtgtgatgaaattcttttaaatagacaaagaggcctgctccaagcagcagaactctacaatctacctgctggccagacttggtgtagattagctgaggaactagaagaggctgagcctgagagttcagtgttttcagaatttgcaccttagcaggtcagggaaaggcaaaattgaatgtatacctaataaaaaaacatatcccggccgggcgcggtggctcatgcctgtaatcccagcactttgggaggccaaggcgggtggatcacgagttcaggagatcgagaccatcctgactaacatggtgaaaccccgtctctactaaaaactacaaaaaattagccgggcatggtggcaggcacctgtagtcccagctattcaggaggctgaggcaggagaatggcgtgaacctgggaggcggagcttgcagtgagccaagatcgcgccactgcactccagcctgggcaacagagtgagacttcgcctcaaaaaaaaaaaaaaaaaaaaaaaaaaaaaaaaaaaatccctttgctgtcatagctatctatgtaggtgtctgtctccctgctaaataggaagcttcctgaagtcaggaacaacctagaggagtgactaaaatacggcaagtgctgaataagtatttgttatgtgggcacaatagctcaatttgaggagtccccacatgacaatttgagctgtccccaggtgacagaatttcaactgtccccaggtgatagctgtcccactaatgatggcctccctgtgtccacctttttgcaatgtgacttcgctgtctccccattgagagctatagtcaatttccacccccctgcccccttgaaatgagctggcctaaagactcatcttggccaatatgatgtgatagaagtgtcactgtgctagttcccagcttaggcctccagaggctttgcatacttctgctttctcccttggaagcctgccatgataggagaataagtctggctagcctgctggaagatgagagaccacatggctaagagcccagctgtcccaactgaggttatcctggaccagcctgtaaccagccaacactgaaacatggggcaacccaagcaggatgagcaaagaagcctaccaaccaaagctgaccacagatgcaggagtgagtccagttgagactagaggaactatccagttgactgctaaccttatgagaaacgagacatggttgttattttaagccagtaagttttgtatatttcattatataacaatagcaaactaacacaccccacaaaatgttgcttttatgttttatgttcttcattactaaccttgtttttaaatgtttatgatctgttttagcttcgcaattcaattcaaaagaaaaagccaaaggaatccttatcattaattcaattataacatgtctgcatgtgtcatttccctgttcccactacttgctactacttaataaattcctcatttatttcttaatttttccattaaaatcagtccctagatgttcccctggcatccatccttgttttaaccccatctgcataatatgtaagggttatcttgataaaacatgggtgtgatcatatcactcccctccttaaaaagtttagacctttcctatcacgtacagaatgaagtgtgaactactcagatggccaattccatctctgacatttttgcccaaacacccttttccaggctggtctcacaccacaactcccacatgccttatgtcccagccaccccagtctgcctccaccctttaccaagcatgtctcctactctctcaccttcatatttttattcagcttgtttcatgtgcttgcaatcactcaccaaagtctcattcaaagcctccaattctaaaaaggtatcctaattctccactgtatcttcatgtaatgaaaagaatgtaataacaccaacgacaatattaagtgtgtactatgagctatcactctgctaagcactctatgtgcattctcttttaatcatcacatcaatcttgtgatgtaacaaatatagcaacagataacaaaatagttatgattactattttccatatgtaatatatgggcaactgagactcaaaatgttaatccgttgtcaaatatctactaagaggcagagctaaaatttgaatctaagactctaggagccagtgtgctgtgttaagtaatgttttcatttgaactttccatatttatggaaataaactaaactaggccacaaagtagttaaatgacttgcccaaggtcacagagtcaccagcagtactacatcatgaatcaaaatattttgattccctcaatcttatgctaattttctgctgcccaggaaaggataattgctgactggtctctccagtaaagcttgagagttttgcctttgcccactttttcagtaaagaacgcctcgactaaactaagcaggtacatttcattttctcctactgctttaatcatccatagttattcagcaaagggtcccaaggctagagggagaaattaagcctaaaaccaaattaaaataatttggggtttaatttgattcaaatgtcagaaaaattccacccagtaaccctgttaatatacaactgaactaaatgtcctatatacccaattgtattcaattttgctgggaccaccgatgccttaaacatgttaatctcattctcattctatcctactttatgcacttgtctctcaaagagtgccacatagctgaacttatttgcttttcaagaactgcacgccattttaattacataaaatgtcaaccaaggcagtcctgagtcctggcggacacacttacatacttaagaaagcagacctgccattggccgtggtgatcagggtccggaggctaggggctgagaaaggcctggtgaaccaggaatataccagatttttcccacaggtatcagggctgaggggaaaaaaaaaaggaaaagaaaaaatccctgattgaattgaaacccaggtgaaccatgtaagcttggaaatagctcttttacaaactcaaaggggaagaaagggaaactgacacagcttgttttgccgctgtgcctgttgtccactccctttctttgtccatgcaggctgcgctgcaggtgggggctgggagggagcaggtaaaagggcccgttcaagagtgcctagtcctcccggtttgagactctgcacaaaggagggacaataaatacaggcttcaaaggagaaaaaaaaaaagtatgtagcacgatccacctcctccaaggaacctttgatagacagttcttacctgctgctttctgttcagcttctacctcccaaaaccacaattcatctaagaaatatctttttaaaattgttttttcttaaggcctattaaaataggcataactgttaactagatgaaatgcaggatcatgtctaacctaggctaggagaagtggccactgaatattatttgaaaagctgtcttaagtctatgagaagcccctgcataaaagaagatgaacttcagtggaattccccaactcttcagccattcattgcttatcggacacgtatcatcagaaaaggtgaagattctatttcatatagtctaggagacagaaaggaaatggcaagtacaatgggacttggctgctaccaatggtctgaaatagaaaaagtactattcaaattctaggactatacctgccagaaacatctgcattatttcaggtgacttaacccccagcgcctctccctgtgcaatgttatagcttattagcacttctgcaaaagggcaagccgtaccagagaactgaaacacaaagatttgccaattcagctagaaaaagatctcatgggcggaagaaaaaaagcaaggaatttaagtgttcagaaaatatgcaaattatctaaggatttcatacatcctattatggtcgtttaagcctgtaactaagattccaatccatgtaacaaactcagagacaattgtgaagatacaatttaggccagtgggagccatctttcatggaacctacatttttaagaataaagatcccaacttcttcatctcactgattaggctgatcaatccccaatccataaatacatcacattccaaaaattcatccttaagctagttatttagaaatccaaaagcattctcccattgatccaatgtaataaatggggattgcaaccccagaccagcctgcaaataccaacttatctcaaatacaccaggaagattcttcatagcagccccacgcctctctggggcataagccaatggagccctcgtgaaccttaagaccttttgggactgatatcctgtcatctcagaggcaagggaagaggaaggaaggataaaatatcaggttccatctgaatagcttatgtggcaggtagagggaggctcaagtgggagaggtctaaatatataatttttctcccaaagtcaggtagatattagaagagagattatgtgtgatgaagctttccactttgttccaaagaaaagatgttgaattgcggggacagaactggactctcagaacattagaagggccactatagggaacacatatagtattcaacagaatggactaagtttccagcaaatataaccattaaaataacacatttctctcatttctactgattataaccattactgatactgtcaatcagagaaaaattataaaaatctaggcataaagaccttattaatatattcaactcttaccaagcatttgctagaaccatagaatgcttgctcacaagagagccttggaagtcagccacccaacctcgttttaaaaatgaggttaccaagggaaggaaaaattaagtggtttcctgttacttagacacagaaatcacctggtgcccactgggaaaacaatttcacgtgcctcttatataaactttggtttcccttctttccttttcgaggaacccttaatttctgtgtattgatgtttcatgtgacagttaaacctgcttgcagccaaaatgattgttttgctgagggaaggtgttaagtttcagcccaagcatctccctttgaactctggggactttgctagaactatctttgctgctaggagagaccacttccctttttctccaaggaagacctgccttggcctgagcatcattaccttccctctgcactggctgactgcaagcaagtggaacatgaaactggcaatggagatacaaagctccggcaaatgtcgaactcacttaatttgctgaccatccgattaatggctggtcaccacatttcaagtcagctctagctaaacctctggagcttcttgccaaaggcttcttaaagagtcctggttgttgttttttttcctatacacacttaaaaacctcattaaacaagagagaatgtttttaaaacagtcaaatcatgttttatccatagacttgcatgtcagaggttataaactcttatattcaacaacagcctctgtaggatccatgccagagtatcagaataaaatgaaaaaccactggcaacggtgcaataatggtatcccattaacaactgagatcttaagaggcaataactgcaaaagcatgttaccattaaactaagtgcatgtgccttccacattccagcaaaaaggtttcagaagatggctgcagcttaaaggacttggatgagggaaaaggatgtttctagtttaggatgccccactcccctgcatcccctgggcaagttttccttaaatcacaagagaccctaaaaggaagactattttgatggcaaataccctagtgtaagaactgtcagtccaagatcagtttttttttagtcgctctgaatatttggagaaattatctaagcactactagccttagttttttcagctataaactggtgataataattatgctcatgtaagaattgttggaaggattaagcgattcagggctatgcatcagagttgggtaaagtgaggagtataagtaagtgctcaatatatgttacttgctatttttttaagaaaacctaattaaatagaatgtcttgcagagtcccccataaccactgatatcaattgaaattaacttgctgttactatcacccagaagtaaaattgggagacactgtgagtggcagaagcaatcttttgctcctctagcgtctttactaaaatgtgcaagggccccagaacatgcatgaccatagaggtgaggtgaattggaagtagatttttacgttacttagcttggcatgagttgaaagcatccttactcttcctacatagcccctgatacttgaggtatgagctgagaaatcctcctcctttgagacaactgctcactttctcagttctgatctcccatggaactgagggatgcaaatatccttcagtacaggcctggattaatcctctcctctcctggcctccatctgcctatccatcacagacgcagcccctctgtagtaaatctctaagccttcggcctgcaggaccttggtccctctttcaatatcactgcaggaacctccctccttcacagcaccccatctttctgcactgaccttccactctcctgtgtcctctcatcccctcccatcctggctcttcagactttcctgtcccacacatccccaaacccttccaatctgagtcacctctcttattatctttactttccttgaatgtgtagacacatttaatagaaacaaagaagcttaatttttaaaaacattgttccctaatcataaatccacctgacccagatgaaaatgttttcacttccccttttgagagacccaaatagatatgtacaagttaaacacagtgacatgaggtctgccgaggtccctcattatattttccataacttttggggtaattgcattttataatagtcatctcccatgaatcctctgtggagaatcacttcttttctttcagttggtttgaaggggcatggtcactgttcattggtgctgagtagtgattttataaaatacacagtaggaacttcagacttagaaaggaggcccactcttgttgatgaagctgttaaagtgaaattaggaccattatgaggacctatgccaggactgaaagcaagacctaaggaaggcagtttggtttgggcaagattgaggttgaaataaggacccagagagcggggccaagagtgagaagcagaacaagtccagaggctgctgttccagtgggagtgacgaggctggaacccttccctgcagacacagaactagggtccagaagggacacaggggtcacagcctgtgcttggcatcagggaaaggagaaggtggcttggggcagccctcagggtggccttcacctaattcagcataggtcataatatcatagctacagaaaaaaatgacagtacacagagaattaaggagctgaagtagaatatgtttatgacagcagggttaacattccatgtcctggcgaggcgcggtggctcacacttgtaatcccagcactttgggaggcaaaggcgggcggatcatgaggtcaggagatcgagaccatggtgaaaccccgtctctactaaaaatacaaaaaaattaactgggtgtggtggcgggcgcctgtagcccagctactcggagaggctgaggcaggagaatggcatgaacccgggaggcggagcttgcagtgagccgagattgcgccactgcactccagcctgggtgacagagcgagactctgtctcaaaaaaaaaaataaaaaaaaaaaattccatgtcatgtgaaaggcttacagaatttttaatgacagaaagaaccacagaatgcaccatggacagtatgttgcactctgtttcttattggggtacctataattttcctacaatattctgagttaaccacatgaataaacacctctattagctttttcactttctcaatagccttatgaggtaggaattttttaaattaactaaataattctttattaatatgtattatatgtacatattttaagggtacaggtgatacattcatataatgaaatcaaggtaattagtgtatccatcacatttaatatttatctcttctttaagctaagaacatttgaattattctcttgtagttattttgaaatctgcaaatggttagtgttaaccgtagtcaccctgctgatctatcgaacatcaggtctcatttcttctttttaattagatatttgtacccaataattatcttctctttgtactccctctcccctacccttcccggcctctggtcacaactaatctattctctagcttcatgaaatccactttttagctcccatagatggatgagaacacgccatattcgtctttctgtgcttcgttgtttcacttaacataagcctcaaatgtctgccgtgactgatggcagcatctcaagggcagccactggccattggccttggacctatgaagggcatgccccagcttaagccagtgccagcattttgagtgcttgggcatgtctaagaaactaaagggatgggctctgcagaagtctattttcatgagaaacagaggagctccctagaggagaacttacttaaaggaaaggaaggaatcaaacaagctcaatcaattaacagagctatagtcataggatgagagaagcggtttagaaaccaccatgatggctatcccttgaagctctcccagcctggcctgtgggtcctcagggaataagaaaggagaagatgtaagtaaaaaccaaaggagctttttcattaaaacctttaggagatattgtgacatgaccatccagctttggtgcctaacataattggggataagaatctctctcaaatacttcaccccagaccctgttgaagctttaacttcatgaaggcttcaggctccctgaggaaggtgactagtgggaaactagtatccacaggggtctgtgctctcaatggaagaagaccgcagggtctgaaagaggccatggtgcaaggcagatgctgtggcacctgacagaagcagcagccatgcctaacacatatagtggtccccactgcaattagaacaggaaacattggcagcacccaggaaaaaccaggaaacacacaaaaagtggcaggcattctcagcagatattgcacctgaactgtctgtgaatctgtaataggccctcctgagaactccccacagcacatcagggaatagtgattttgtggaggattgtggtcttaaatgagtaggaagaagcaagaatcaatgagatctggactcttagtaatattatacaatcacaaagtggtgcagcctggggaagtctgtgttacttgtaatatttccaactgcatttgtcacgtctgtaattcagatgaaccccaaagcaagtctgaatgtgctggataaagttattcaactcagggcaggcacagtggctcacgcctgtaatcccagcactttgggaggccgaggcgagcagatggcatgaggccaggagctcgaggccaggagctcgagaccagcctggccaacatggtgaaacccagtctctactaaagatccaaaaattagccaggagtggtggtgcatacctatagtcccatctactcgggaggctgaagcttgagaatctcttgaacctcagaggcggaggttgcagtgagctgagattgtgccactgcactccaacctgggcaacaaagtgagactctgtctcaaaaaaaaaaaaacgttattcaactcacaaatccttagttctcaagaaaatttcaggatgtgcttatcctctaaccaaagatgtgttcagtacccttcctcctttctgaacagaatgaagtcatcagccctaatggccatgccaattgtgattctgtttttctcctacttttctttggcctatgattcctaattcgaatccactcctcatcagttcccaaggggctctagtaacctatccttagcacttttcccactggttacagtttagaaaggcctttctggctattgctattccagctgctttctccatattttgaccccttatctgaatggtgtgttccagggggattcttcacactctgtcttagcctctgagcacaatcagtaagtcatatcttcaaaatcagactttttggaagaaggaagtgggagagggttaggtttttaaatcctttaaaatctgtgtcttcaagtccttcatggaagtggataaaaagggcctagtgcagtggctcacacctgtaatcccagcactttgggaggccaagacaggcagattgcttaagctcaggagttagagaccagcctgggcaacatggcaaaatcccatctctacaaaaaaaaaaaaaaaaaaaaaaatacaaaaattatccaggtgtcgtaacatgtgcctgtgggaggctgagacaggaggatcgcttgagcttgggaggtggaggttgtagtgagttgagatcacttcattgcaccactgcagcctgggcaatagtgtgagactctgtctcaaaaaaaaaaaaaaaagaaaaagaaaagaaaaaaagaaaaagaaaaatcaagaaaaagaaagcataagaaaagttaaagcaaaggaaagcagagtagtttccccacgtctacattcttaagtcagaaccacctccattcctatggcaagatgccagtattctccagcagcagatccatttcaatgcatttgcaaaggcactgctctactaaattaaatgtccaactagaatgagctatcaccagaacacactatcatgcctcagctacttccattactgtgaaccactccccactaacctcccccccggacccgaaatacccaagaggtcacaaagatccagtggcatccaagaaaataaaatagttttacatcaatatgtctccagcaagaaatccctctacagttgtctgatagagccatcatttttctcatgttcaagtcaattgagtaatcagaagaaatgagactaaaaataaataacgttagccatggaatgggaagatataactcagcaaaatgctggcaagtgcttctctactcgccaagcctcagaatgcacaatgcccctttctgttcagccatgacaatctaattcaggttttgtcctcccaggaggtgatcagtgagtccagatggacaccaagctacctcattgtcctgggcatcgaagccagactgcactgcaggtgtgtgctgaaattcagttccacttttctattgccagcaagcctcaccatgagaggagctgccacatgcctagagccagctcctgggatggctggataaggccagagccctatgattctttgggccattctgatgttttgagacttaaaggagcaattaaagcccagctctgctcactcatgagaattcagaatgactaggatacataatcatgacataattagaaccaaacaagaaaagtttaacaagaacaaatgagcttagtaaaaataagctgtgtccatctatattgggtagagaaaaaatatctaacaacatttagtggataataagctaactgagttaatactataagatagaaaaaaagttaacacatcagggtatctaaattttaggtggcaaggtagatataagaaggcagttattaaaacatggctgagatcttttctagagaaggaactcaggttgatgcagtggcgaaaaaaaaaaacgttttacaattggaagaactgaatttgatcttgccatgcactttcactatgctgcttggcttaactctgaacttccgttttctcacctgtaagatgggcatattgataatgcataattttattgttgcatatgttgtaagaattcaactagctaatgcatagaaataccatttgacccagcgatcccattactgggtatacacccaaaggattataaatcacactacataaagacacgtgcatatgtatgtttattgcagcactgttcacaatagcaaagacttggaaccaacccaaatgtccgtcaatgatagcctggattaagaaaatgtggcgcatatacaccatggaatactatgcagtcataaaaaaggatgagttcacgtcctttgtagggacatggatgaagctggaaaccatcattctgagcaaactatcacaaggacagaaaaccaaacatcacgtgttctaactcataggtgggaattgaacaatgagaacacgtggacaaagggcggggaacatcacacaccagggcctgtcgtggggtgaggggatgggggagggataacattaggagaaaaacctaatgtaaatgacgagttaatgggtgaagcaaaccaacacagcacatatatacatatgtaacaaacctgcacgttgtacacatgtaccctagaacttaaagtataattaaaaaaaaaaaaaaagaaacagctttccagtgtatggtatgcaataagagttcaacacacattggctatgaatggaacatccgtttctgatataaccaaagaagcataaacgaaaatgtagaaggtttttggagaacaccacacatttttaatgttgtaaaatatggcctctcctgaaaacttgaccaattgcagacccacaaagctgaggatcagaccctctgattttgggccccaaccccagtctctgaggctccaactgggtcatcagccagactccttggatatctttctttttagtctcactttgtgagtcagggggaagaaggccagagggcagcataattgggaccgcaaggcacaggcatgatcaactatagcttgggtttacaaatcaccagacaagcctttccccaattcagagaagcttttagggccatttgaaatggaaatgtccattaaccttgaaagcagacaatgagtgatgcaaatattaaaccatcttataaaggaaaaagacaatgatcaactcatttaaaaaacctttgtgagataaacagactttatgctgcatatctagtgtcttccatctggccagcgaaacctctccatccatcactctaacacttgatctgccattcccctgcaggcttgggagcatgaactgaaagacctgaaagtccatccaatccaaacttctcattttgacagatgggaaattgagacctaaagaaattagatgttttctaagaacacaaattcggtggcaaaattggtaccagatcctagttttcctaattacctgtcatgcctgccttgttcattctcacctcaaagattttatttgacaaacaatatgattcctctacctctatctatttagattgtgagtccttaaaggaggctaaattatccagcttttgtatttctcactcaaagaaataaatagatgattaaaaatactgttttagtccattcaagctgctataacaaaatacccattgactgggtaacttacaaggaacagaaatttatttctcacagttctggaggcttggaagtccaagatcaaaatactagcagaatcaatgtcttatgagagcccatttcctggtttacagatgatgccttcctcacatgatggaaggggcaaaagttctctcttgggtctgttttataaggtcccactcatgaagactctgcccccatgacctaatcacctcccaaattccccaccccctaatacatcatcaccttgggggttaggatttcaacatatgaattttgaggggccacaaacattcagacaatagcaaatactataagttgcacttttactaaaatgataatggaaagtagagaaatctgttcccatttgggcagggattggtttattctgtttcactcacatcagacctgcttatagttttgaagaatccctaatggttctcagaatgtgggtaggacctgctttgccattttcaaaaaggtctactttcatgcaaataggtaggaaactacatactgttttgactaatgtaacaaccaactggtctccatttccttataggattaaaagctattaaataaacaaaattcagcaagagtttcatgatctatgaggtggaggtaatattcttgtttgatggacttaaaactctataaacagactttacataatctttatccttagaaatcttataaaaaagtgttgtctaaattggatggttcagctgttctccctcacgaaagcacaggctggatagaagcccttctgtgatcctttctctacccacttgctttctgctcttattacagtgatattctagtaatatttaattctctaccatcacacatctcctacctataatcacttgcagacttcagtttgtaagaagactttctacctgctcaaagtcaatctttaagtcacaactatgattctgaagcctaagattctgtatttctaacaagtcccagataacattgatgctgctggcctttaggccatattttgaatagcaaaactctagaatgtatcccatgatcaactatatggatccattagaaccattcctgacccattctccttcctcagtaacctctctactaaaatactaaaatgtttgaaatggcttttgtgtgtttatttaaaaatgaacatatgattgtagagttatgaaacaaggaaatagtatcattcattcatttactaaaaaaaaaaaagtcagtgttgcaatgcatcataccagcccctagggattcaattatgaataacacacaatcatatttgtagttagatgtcttggtcccacaactaactagctcattaaccttggataaaccatctaatcagtttctgctaattttttcttacataaaatgaagataacaatgttcaccatatagggtagtatgagtacaatatagaattatgtatgtaaacatacaacataccccaaaatatactataaaatgtttgatatgcttattatcatatgtatttattatttgttcaggttcctctcttatattgtaatctgccttaagataacaaatgacaccacctgtatcccttccaccaaaactaagcatttaaaatacttctttacactccacagaatttaaattctttttcattaaatgtctaatctcttttattcccacgcttggacaatcagttcattctagaacatttcaacaggaaaaaaaccaaactagatggatcttagaacatgtcctcatgacgatctctgttctgaagggtctgtcattccagcattgaaggcctccttacattcaaaaaggtgcctcctttccctgttgctcttttcttccattgatctgagaacatttcccacaaccactagtattcaacatatattcattgaatgaattaattaatgttagtgtttgacatttgttaaatccaagaaaatactgacaagtttgggtactgggactgcaatttgtaggcatctttccttcacgaacaatttcactgctctgggtcagagcaaccacccattgcatcccctggaagctgttctgaggcctttattttgtggcttggaagtgcttattatttgtacacctgctccttaagaatcatggccactgatgtaactgacactaattagcccttccccctgcaggtccccacacagggccaaaggctaaataggactaaacacattctgcctctcagagtggcaaaggatgggtgacatgttttggcagaaggtggagaggaattttaaactttccttgtggttccctcagtctctttcgcccttgtattccactgtgctcacatttctagggactgtcaatctggcaccaaatccacttaaggctgagacacagtcacccatgaggctgagaccaaatactttcatatcacaggacacctgaaagattgctagacctgatctcagggtagaaccccagggcatctcttgcccattgccttctccaggtgctgttcctgctgccgccacagacaagattaacaagaaggttatatttaaacttccaagaggcactgctgtgccattatgggtctatttaaaatcctccgggcagctgcagtacataataacaaatcagcaggagagagggggggaaaggaggagcagggaaggaggactgggggtggtcaggagcatggtggattgtttctgagaaaaattgactgtcaaaagatggcagggggtacaggcaagttaaggatgccacccagggtgagagtgagggagagaatgcatcaggagaacctgctaggcagggcagggagagaactcaggctcctaatatgaagatctgccagacctaaaaccttgctgcctgcctggaagaaaccgctccatagtactctatttctcccaggggactctactgaacaataccagccattcttcagtgttgatgaaagatcagcaccagaatagaaagagctctaataatgggaacacaaagcagctccctcaaacccaaccgatgtgtgccattttcctcctggaatcactgataattcaccccatgggaggactatgtcacattcccttaaagaccattctctagtgcagcagtcttagaacctgatgactaacctacagctgtgctcaattttgacgttaaggacccatcccagtctctggtgtctttgctaagtttgggcatagtgtttcttagcctctacttgccttctcctatcaaagctctgtgggtactctggaacatttacaatcttccctcagttgtatagcacaatcacattcattttcatctcccagcctcttcttcactgacagtgtttgttaaacttagtttaactgacattatccaaactcctgaccatttttatcactctttgctaaagtggcttcatagttattaatgtctctcctgattattttctgcatgcacaaatttacttaaatttggttattaaccacggtttaaatctccattaattgtctaaactgtcaccccttggggcttccatatagtatcaacatctctgaactcacaagcacagaaattatgagacaaatgaacatggcatccttgttcagcatactgttacagtgaaaataatagtctttcattgcctgattaattttgcttctatggaggaccaaactggatgtcacaggctaacacatttactatgaatgtacgtcatgatttggatgttcacaatgatctaattaaccaaatacgtgtcaaaaattcactttgtattgtatagagatgtcttaaatgtcatgctatgctatattctgatgtaaatacataagaaaatgatataaatgatgtaagatgctaggtctatatatgttatttacctgaaaagaagattgtagtagatcagcaagtattaacagtttatacaaattaagaataaattcctcaaggggatttatcttctctttcttttgtttctggttgaatgcctaatacgccggagatttataaaactgtctgtccctactgcaggaacagtaggcaaacaatacgtacaatttgtaataaaccaaaacctgccatatcaacatatacttattgattgtaaatactgacttaaaattaagttctatataacgaggacagtacgtgatcattaagcgcactatgtggaatgtattgtgcaaatgttacaaacatacattggctgtgtaaaacactctgccacatgttcagatcacagtttgtgacccctatataaaaaactgatcaatgatttattatctagtgtcaattccctttcttccattttttcatccctatatctttctctacaactattaggagctcaaaagataagaatttcaaagaaagagagcaagaagtcaagagagtacatctaggaggtacaacaccacaggcccagaacagagaaggacagagaaacttgtactgtcccagtggggcctgtagaaatggctttaccatctaatatgaaaacaaagtcttggccaaacaaaaatgaccttctcaataagaaatacagcaaggacccttgattgatactccaaagaattccttccgggtgaggtgatcaatgaggaaatcagacataacgatcctaaggtgtcactcaggaaaaatcttgacagaaccaaagaaaagcagccctgtgtcaaggagctgtccagcattcagccttcatctgaacttttggagaccactcagctcatttctgtcttcatttactcactgtcttacatgtcatccatctcttgttggactaagcacttcagtctgttccctgggaactgctctgagctctatacacttggtttagacaagacgagttacctacactccagtgacttcactgtctgggtgagcagacagggacacttaccttggttcaaccttccttctgtttgtttggtacccctccattcacgcacccaccagatgcttactgagtccttcttccgtgcttgggtgctcaagatacaaaaaagaataacatataatcctgccctgaaggagtctgaagtctagccaaataaacaaatgtgaacaaagaataatactttactaaatgaaatcatgaagatagacacggggaaaagacagcttccatttgaaaataccaaccagaataacatactattcacaaaggcaaaattaaaatcaagtggctaataagtatatttgaaaagttcaacttcactagtaaatcaactaaatagaaatttaagcacaaattttttttccatattgcaaaggcgggggaagtggatattctcatacactattgatcaacacacatactagtttaaaattaatggagagtaatttgataataaatattcaaagccacaagatgttggtactatttgaccaagtaagtccagttctgaaaatttatgctgaagaaataatttaggatagacaaaaagatttatctacaaggatgtccatcattctattatttgtaaaatctcccaatttaaaaataatataaaatactgaatagagaattggttaaattgcagaattccatgaagccataagaaattatgtagaaagatgtttcttgatgggaaaggataatcatatatgaatacaaataaatttaaattttttacataaatagaaaaggactaatacaaaacagtatgtgcaatatgactttatttttgttttatatattgcacattgagagatgttcagaatgctaactactatctagtgagattaactatctggttaattttttccttgtcttctagtttttctcaaatgttcatgcattgcttttgtaacaagaaaaattattaaagtgatacagttaactcgggaacacacaggtttgaactgtgcagggtccacttacacacagattttcttccacttctgccactcctgaaacagcaagaacgacctcttctcttcctcctcctcctcagcctactcaatttgagtatgacatgatgaagacctctatgattatccacttccacttaatgaatagtaaatgtattttctcttccttataattttcttaataacattttgttttcagtagcttactttattgtagggatacagtataataatgtatgcagcatacaaaatatatgctaattgactgtttctgttatcagcaaggcttccagtaaacagtaggctgttagtagttaagttttggggagtcaaaagttacacacagattttttactgtgtgggaggttggttcccctaacccccacattgttcaagggtcaactgtacttaactttaacagaaaataaagtgcctgtcacatgccaggtactgggctgtgttctgtgcatgcaagatctgctattcacagcactaccaagtattactgagatgaaatgactcagctagtccagacaactagtacctatggagattaaaagttagttctaaaactcctgttctccttgccatctaactagtctataatatttgtttcctagaatttcattttttaaaaatctatgctactataatgttaaaaaagaagttttccatataaatcaaaccaaaatactctgtaaaccaacgtaaaaactgtaataaaatttaggggactgtgaataggcacagaaatacttttaaaaggcttctttcatgttctatttgaacacacagcaaaataccctaaaccctatggtgagatgggaaggtgatggggacaacggagagccaaaaatgaagcaacacacatgtggaaacaacaattcacaaggggttacccacagccaagtctgagctgatgtagcgagtcaacccagttgggcatttgcctttctgcctgtgagcctgcagttctgtttgtcccaaccagccattttatgcccctctgtttctatttcaagtacaggacaaagaatgatattgttctcaatatgaattgccacttcactaagtactttattcaccatttacccattttcgtctttctctgaacttgccaaattatatcttttcaccagaatatgcattcctgggtgatcaagtataaacctgccaacttttgcctctcctttctgatctcactgtaccttgtcatttctgcagctctcttttttttttttgttagtgagatattatttttagataagaaatcttttaaatgctcatttaatcctctgtggactgtttttttttttcaccgtacactgcattacttacattctattaaattgattttcactctctgctcttctcacttcccagggagatcagtggtttgttagtgtttcagattgttattcctaaagtttttactttcatatagtcttatgccttttaggttctccacaatcatttagggttcactatgatcaaccccatctatttttagtcctgtctcttccatctgttcaatgcaaatccaaacataagatatctgaaccccttcatttttaaaaattataacactttcatatttggttgtcctggtccctccaccttgactgcatcccctttgccttgtcagtgcccaagggaacctgtagaattcaaataacattttctccagtgtgctttctctggtcacactaattaaaacttctgatttcctatataacacttagtttttacagttcctgccgtgtttctcatagagatttatattatatacatttggttatttcttgtctcctccaatacattctaaactccatgaggtctagaagagtgtcttgtagcaataatgccttgcccataataggcacttactaagtattttttgaatgaatgggaaaatgaaccaaccaggtttctctaacatcctgctcttgagggcttgggttagtgtgcacagtggcatcttgatccatgtatacctcactgtgctaacccagggttcatggatttactggtcattaagttttcccctgtcatattcgcaatacacagacatacacaaagccttgttgcttttactattagtttcagtctggtctagccttgatttaattgtccccattttatttagaagtcaatttatttcattttttagtatttatttagtactttatgtttgaaaagagcttttcaatcattgattagttattcttctgtgaagtagatctgtatagtcatctctattttacaattaagaaaccaaagcgcagaaaggtgcaatgactcactgaggttaaagacaaagttaataataaaacctatagctacctagcttcttgcccacagattaacctacctcaccgtatttcctagcagaaaccagagttcatggatccgcataagataatctaaacaaagttatatctagaaaagcctgaaggtcaaaatttcaaatagttatccaaaactacaagatggtattgttcttttccttgaaagtggtgttcttcagtgctaactacagcacaagaaaaaaagaagattcttaaatccccatggggaggtgtttcatctttctaagaaacaataagctggcaggctattattatttatgttattaaaagtcaacaaatattgaattcaaattatttgcatttatttattaaatgacaaataaaaattgtatgtatttatagtgtactacatgatgttttgatatatgcttacattgtggaatgtctaaatcaagctaattgacatatacattaccacacatacttatcatttttctgtgtggtgaaaacatttaaaatctgctcttaacaattttcaagtatataatacattgttattaactatagtcaccatcttgtacagtaaatctcctgaatttattcacgtggtctaactggaattttgtatcctttgatcaacataccccaattccttcaactcccaatggtaaccaccatcctattgtctgcttctatgagttcaactggttttagatttcatatataagtgagatcatacagtgtttgtctttctgtatcttgcttacttcacttagcaaaatgtcctccagattcatccatgttattgtaaatgacacaacttccttcttttttaagactgaatagtattccattgtatatacacaccacattttctttatgtgttcatcaactgatggacacttaggttgactccatatcttggctactgtgaataatgatgcaatgaacatgggagtcagctttttctgatatactggttgcatttcctttgagatgcccaaaagtgggattgctggggtcatttggtaattctattcttagtttcttgaggaacctccaaattgttttccataatgatttaataatttacattctcacccacggtgtgcaagttatgttctcatccatctccccatcaacacttgttatctcttgtatttttcataatagccattttgacagctatgaggtgatatcacattgtgattctgatttgcatttccctgatgattagtgatgttgagcatttttccatatacctgttggctttttgtatgtcttcctttgagaaatgtctttttgggtctgttgcccattttaagtcaggttattagttttcttgctattgagtttcttgagttatatatttttaatattaacctttattagatgtatgatttgcaaacattttctccgattctgtaggtttgtctcttcactctgttgcttgtttcctttgctgtgcagatactctctagtttgatgcaatcccatttgtctatttttacttgtgttgctcatgctttggggatcatatttttaaaaaatctttgcccaaatcagtgttataaagctctttcccattgttttccctagtattttttacagtttctggtcttatgtttaagtctttaatccatttgatttgatttttatatatgagataagggttaaaaaatccatttaaattctaatttgagtaatatagtctgccacttaaaattactcaaagtgccatgacagggcaagactccatctcaaaaaaaaaaaattactcacagtgccttgtaaattataacactttatataaacataaggtccatcacaatgttactgtttattttcctgcaaatctcattagattgcttagccatttcgtcttgaaattttgcttggtgttaatgaacagggtgcaagttctttaatgtttttgagaatgctttatgaaaaaaaggtggttggattagacgatttctatggtgaccttctgcccaaacctgccacggctgtatgagtctaagtgacaaccgtgctgtgattctcctgatggaaatatttcaggactgtgagtagtcgctgtgtggacaattgcataaagtccttcacaccacttcatataagagggcctagaaaaattcccatgactttgtgcactagctcactcgttcacatttcacttcacataatgcccttctccttctcacctccctgcatctctctgaccacattcaccttgcctcccctcttctagtaccagtaagtaagctttcctaggcaaaggcagaatctcaccacagcgaaatttgcctcaattgcaatcagcaacagagagggaaaaactgtccaaattaagctgcttgattacggaaattaatcttgtcatttagcgtccctgttctgcagaacagggcctttgattagcctccttgtttcagaatattacaagcagacgtttattaagcagaaggcttttttttttttttttttttttttttgtagtcaggcaagtcacaggaaaagtaaaggtagcaaggggcttcttaaaaaagggcaccaagtcaaggactgtcagtctgcttctgagtccgtctcacagagcaggactgtcatagaatcaggaaccttaaccaacccacccagcttaggatggctcctctgaagggaagtttaagcagcagtagaaagataatccataatctgttatgcttttagtaatggaatgaaccttttgacctagagacaaaggatgattctagatgacattacccactgtaaagttaaatgcaaatgtgtgggacatctgctgcctttctaaggccatatactctggcagctctgaattattatgttagtgtctagactgagaaagccataaagattgcatgagtgcttttgggggtgggggacaatagcggacattctctctttcccatcagtgtgcatcagcatttttaaacactgaaggggtgctaactgatgggcaatttgcttcctagcccatgttctaaatctcagagcttctagggccactttgagtttgctagtaagaacagagttaagtaggacctgatcccaattcacacaactttctggtagaagggctctaatggcccaacttacaccagtccagaggaaacccagcacagagcaatggagcaactcagggcagatccccagcacatgatcagaatggctcagaatgcctgagaggccttgcaatagtttgctgagaatgatggtttccagcttcatccatgtccctacaaaggacatgaacttcactcataggtgggaattgaacaaggagaacacttagacacaggaaggggaacatcacacaccagggcctgttgtggggtgggggaaggggggagggatagcttaaggagatatacctaatgtaaatgatgagttaatgggtgcagcacaccaacatggtacatttatacatatgtaacaaacctgcacattatgcacatgtaccctagaacttaaagtataataaaaaaaaaatatatatatatatatatacatataaaataaaagaatgactgagggggttcccgagccctatagagttcagcgctcaggctatcatgagccaatagataaagcaaggctaggagaaaaccagtcatgacaaaaacaaaaccaaaccaaaaacagcttaataacagattctatcctctttagttggacccaaacatctgcttagaacaagagcaaagaaacgtaaccagagtgatgacctagagtacagtggaggtgtaacagaatttctcaaccatggcactatcagcacttcaggcaagacaattctttgatgtaggggcctgtcctgtgcattgtaagatgttgagcagcatccctggcctccaccctatagatgccagtatcaaccccaccccaacttgccaaatgtcttctggaagcaaagttacctcatcaaggacaactgctcttgaatattaccggtctcagaaaaaccaatttcctaatttcccaagtaagctcactatacacttcagctctttatgagacaacaaggtgtggtaggaagaccaggaggtttagtggccaagaggctatgatcaagtcccagccactttgtactaagcatgtggacataactaagacagttcatctctgtgagacttcatatccttgtttgtcaaatgagaacaataataaccccattgctggacttttaagaggattaaaagagataataatgtatgtctggtgctgcttatataggagatattttaaaataatggttgttatgtgactcaaaatcctaaaatgctaatctaagacagagaaccacttgccaaagatagaattcataaagtaaaatattagcctgagagatggtcagcatgacaatttgtcttaaaagggtataaggaggaaaaaaagaaagaaatcagcaacacccactagaagatgagttcctcaaaggcaggaataagttataactagcagtgctaaatgaatactgaataaatggataaacctatctgaattggccttttgtcccacttttgttcccccactcccactgtctaatcttcatccagcaatcagagtactcttttgtaaacagaagttctccaatttttttctacacacttagaacatgacccagaaatgttaggctgctctgtgggatccagtctgcctcatcttgtgcctctctccccagtctttctgctctagtcaggagatcttcttgctctgccttgaacttccagaatcattcctgcttaggggttctctgcttgctgttctgaacccagagagctccccattctttcctaccctccgggtttttgctcagacaccatcgcttccaagagaccttccctaccatcctgtttaaatgaaaccccaccacccccctccccaccaacctccaatattctttattctcttacagtacttactttccgcatagtacttaattctgtctcaaatcatttttttttttttcgagacagaggcttgctctgttgcccaggctggagtgcaatgtcacgatcttggcttactgcaacctctgactcccaggttcaagcgattctcatgcctcagcctcctgagtagcggggatatttgtgtgtgtgtgtgcgcgcatttggttttccatctgtgtcctctactaaaaagtttcattaaagcagggattctactgtgtctactcagtagcttcgaggtctatcctataatgggcactcaggaaatatttgttgattgggtgtagttttgtgaatatgctcatgaccatgtggtcattctaaagggctttattatttgtgagtggagcctgtatatttttccagcagcctgcctcccttcgtacagggccctgagaaatggaataatcccattactagtgaatgaacaatcagtttctatgtctatatcccactccaaactgaacctgaaggcagattctatgtccttcttcttaatagttattgcacttctaatgcctatacagtgtctggcaaaaatgttgatttctcttaactgtcagatgaatcagaggaacaagaaataataatctttgctactgtcaacactttcaaatcttgggccagtcactcgtactgtatcagaagagggtcacagaaaacctgtcttcttctccttccaatacccctaatacatctctacagataaccatctaccacctggtctgaaagtctcactctctgaattgaattaaggtgtcaatgagcaataaaacattagctacatgtcacattgagaaagattaatttattaggtccagtagtgagattcatttatctgatcattagccactgccatctatggcaactggccaaaaacagaggcctaacttcagtgaaatggacatcaggcatttataagtgttcgggaaggggataagaaaaatgccaaaatagagttggcagtatgaaaaccaaacactctctcctcctattctcatctggtaagggtcaggtgttattcagaaatgacctagtcttctaaagaatgtgatcactcagctgagcatgatggctcatgcctgtaatcccaggttttggttttttttggtttcggtttactttaggaagctgagccaggagggtcgcttgagttcaagagttaaagaccagcatgtgcaacatagagagacctcaactctacaaaagaaaaaattagctgggcacagtggcatgtgcctgcattttcagctacttggaagactgaggcaggaggatcacttgagcctagaagggcgaggctgcagtgtgccattaaagcgccactgtactcagcctgggtgacacagtgagaccctgtcttttaaataaataaatatggtcactattgccacagaaacatcaagaagagtcctccctatgccagtgcaatgacattctggactctattacttacctgagggctgcaacaggcatttcctgcatttcccctcataaagtagaacattccaggcttaatatatgaagctgtgggatcagacaactaacatactagcctgactggagagtggagagtgataaaatgcttctagtttggaattaggcacggagatcttcttttaacggagataaggaatggaggagacattaagggaaatgtatgaacatgtagtaaacatacaaagctcagggtttatgaatgggcctcaagggatccttgaattccctgaaactgcatgcagcatttcgtaagtggatacttttccagaaaaggggtctatagttttcattagattctcaaaggtctccgtgactcgtggccaatctttcatagaagtctcaaaagaaaaaaagtaatatattctgtattctgaagacatactggtgttcacaggcagggttaaagttttgagttaatcaacccctccaacctccataaaaatcgattgaacaaatatgtactaagccccaaattatataaaagacactgtgcagccccacttttaggtgtatgcccaacagaagaaactgcaaaaaaaaaaagtcagaattcttttcttctacatgggaacaaaattcttagcaaaatgttgactgaaataacttctgggtttacaggcatgagccaccacacccagccctgaaataacttctgggctcatgcatttggactgaattttatttgcctattacattatcatttcccactatgtattctccctaatctctgttttgatatgtatttatctttttttttcattgttcctcttctcatgttcaactaaacctatttcaactgtagacattttccatgagcaaaattctgctacactactttgcattcactaaagaaatattagtacaatattcaacaaatgaacactgcaaatgatataaattaagaattctgtttttttaatctattaagtctgaggaagctgtaagagattagagcacaacctctgaaagaaatggaagtgaggaatagaactaagaaaatgaaaggtaagatcagatatgtcgattcagggtgtttattatagacacaaggtatttaaaaccatgaaactatttgcattggaaatggagaaattatggacttgtccttaacgtgacaactgtagacatctgtagaggcatttcatgaatcatggcaaacttgtaaccagatattattacttgcaacaaggtaagtaattgggaagttttgggaattttttttttttttttttttttgagacagagtattgctgtctctccaggctggagtgcagtggtccgagcttgatctcggctcactacaacctccgcctcccgggttcaagcaattcttctgcctcagcctcccaactagctgggactacagacgtccgccaccactcccagctaatttttgtatttttagtagagatagggtttcaccatattggccaggctggtctcgaactcctgatgtgatccacccatctcggcctcccaaagtgctgggattacaggcgtgagccaccgtgcccggcctgggaaattttatatgaaactggaaatcaaaaaaagtaaagaccaagcaataaagctatttagagtcatccattcgaatgctaaatatcagaattatgatataagggcagaataagagtgaggcaaaaatcggaaccagatggcaaaggaagcatgtgaatatgttgtaaattccaaacattactacacttctgggacgctgggtaccaagaattggaaacaggatgaggagaaaatgtttgttggcagcaataacaacaaaagcagtgcaggaacatccaaataacagtaataataatagctagcattaatgagcccctactatgttccagtgccttacacatattctcactgcatcctaatgaccactctacaagattctacagcagatgaggaagccgaggtcagaaagatgaaggcgcttgccagaggtcatttatacaggacttagacctaagcctgcctaatgtcaaaatgctaattcattcaatatgatataggctaaaagtagtgaacaattttgaattcattccttttttgaattgagtccatacatgtcaataggggtgtgtccaatctcacaaaacaagtaataaaattacccgtcttgagttgctttcttttttccttgcttttcattaagttgaacagccttacttttggagatatttgaaaatcacaagactaatagtctgtatgcttctgtgcacatgtattctcatgcatcatcatggattcttcagatcaacatgggcaatgactcagaggtgaaaatgataaatgtgtcaccacttgaggattcccaaaactgattcctcttgggggaaataggaaagttaccatagacaaaaagtcatcaggaaggaagtagcggagatttagagttgggattaaatgttcaggtttctagggaatctgcaaagtgtttagatttaggaacttaatgcctaatgtacaaaactcttacaaaagatgtgaaggctggcaaaggattgctttccgtgttagagtattcctcagtatgcactaattctcagctagagggaccacgaagagagcgaagagccaagccagatctcacatgctatgtttagccattagggttggctggatgaccagcaaaggagagagtcgttaaaaagcaaggttttgtgtgtttgttttagtgtaatgcttattttatatgttttaggacttatgacaaatttcactgggccactaacagttacaaaataacctacaaatcagcttagtacctaagaagaaaaccagtgaatttcagtgaataatgagaattgcctccaagtaacaaaacattttctccaccattacagattttcacaaggaaatttaagctcccttaacctattttttcctccattatcaagttatggacatgaacagccttgcagcactgtccaacagaacttccagtgatgatagaaatgttttacatctgtgctgtccaatgtgatagccaatggtctcatgtgactatggagcatttgaaatgaagctcatactactgagaatttaattttaaatttatttaattttaactaatttaaattgaaatctaaatagccacatttggctagtggctactgtactggtcactacaggaacttcagagcattgagaggtcctagattcttattttctagttcttcttgtctatgaatgttattttcaactcttcccttaagtttcatctctttgattttttaaacctgtatttaaacgttgatctcatttttctagattttgtttatactgtatctttgtcttaagatatgtaaaattcaccttttataggtcaaaaacagtacaatatcagcaatcttatatgattcaactttatataatgtatcataggcttctccaatgtgacctagatgtagcacaatgctatacacataggaaccatcagtggccgaataaatgaaagaatagatgactaaatattggttgaataaatgagtgacaaagtcagataggcagcagacatttgcgcaatactcagggtacttttcctcagatgaattcaatgtattggtactgagattcagccatgaagcaaaaacctctgagagtatgtttcagtcctgaattcagtaaaggcatcattcagaacagacaagaaaaaaaaaaaagacatataggaacttctgacaccgtaacaacaaaacaatcacagagtattgagaaattcacaagttccttgagcagaaaatgatttaaaatgataaagagtgggttgtttattgaggaaggaaatggaatcattagagatgggagatttggggatacgtgctagaaaaacttgaagagactatagaaaagatgtatgaacattctgataaaggactttggggagtgtttctatgtaataagagaatcagagaagtttaaaaaaaattgctggtttttagtctaacaaaataagctgttgctgcagacaaccttgcctggtgttgctcatggaagctcattatgcctaactttgaagtgaaaaggtggggttaaaatactcacgaattttctttctcccattctaaaaatgtgcttgtatactttcacatttcttcttcttgtacttatattcatggtcttcatttgacgtcattgcttacacaacaatctttccattaaaagaacacaagtaggtgataactgtaagtgtaaagcaacatctcatgtcaagagaaccaaatacatgcacatgtgcacacacacacacactccctgcagttcctcaggtatgaaatgatgccacaaacccactgctagcaagagatatacttgagaggcatttgcagagtgaaaaagaatttacagtgactcatctgtgacctttcatctggtccacatgtgtgaaaaacagcacacgtggacaagtcatatgaagggtgagaccaccctacgtggctagatattagagatgacaggtctctaaagggacagatcttgcacctctagttcaacagattaaaaaataggtacaaggacctatcacctacagtactgtgggacttaacaatgctataaaacaggacctagaaaagtagatggttatggaaatgacaattgataagacaaaaaactaatattctccccatccttctggaaaatgtccagaaaatctaaggttcagactttctagcagtgttttgaactcctttttttcccccattttcccatacttaaaagaggccagaataataggttacaatgagatttcaatgataaagtcacagtttggataagataccagcaggcttttttggagcccatgctataagaagcatggaaattccactctgggaaggagtgagcagcagacctggtttccatagcactgccatggaaacagctctctgtgactctgtgcctccaggccttctgaaactaaagcatcgctccaacacccacctccgtatcacatgcccccaaccccctcacaaatgattaaagaatgtcttaagaaagtggggttctaacaagataatatacattatatgtgttatgtgtgtgtacattaatttccttcaaagatgattttaaaattcagatgtttcttcctcttttattggggaacgggctggtaaagaagagaaaaataaaaacctaagcaatctaaacctaagtcaaaaaccctacacttgaaattggaaaaatacaaatcttgccaagcagtttattaaagagatgggcctactaatcccatgcattgggttcttttattttcttttgtctgcctggatgccagcatacaaatacaaaggattcaattaactgttagagccaaggagaggctcttccctatctttatcattgagggtttggtgcaggatttttttttttctcaatttctatcccttggtcataattttgcaagaagaataaaagtttggaaatggttttctagaatcagaaaagtccaacagaaggaagcatgggctctttagctagctttgtagccctcgtgcctccttctctgatgtctccaagggggtaaatgacagtcagacagcggtgcagtggtccagaatctgcctccacagcatgtactctagctgggctggagcaacgcccactgactgggagcaaaccaaaggtcaggaagcctgttagtcagcagatgctcgggaactcgacagggcatatcagaaaggctcttggcccagcagcacggtccacacacgagccacaggattgtagttagaactcttgaaatcccattcctgttttcaactctttctccacctgataaaataaacttgggacattaattctagcacatgtggaatgcaaaaatgcaaaaaagcattatacctgagaagaacctgttgctacagttgctggtcaaattgttgagaggaaacttaataaagggaagtttcaaaaatttgctgattggagaatggttattatttttttaaatgtccccagaataacccaatgatgagtaaagactaaggagagcccacatatataggcaaagacatttcaagtcaggccatgggtttccaaccgctcaggaatggttcttctgggtcaaacaactaaaatgctctgtcattatttctatacctgaaaattctcctgtctaccttgctgagtactgtgaaatggaaagcaaagctgggatcagtcagagttagacaatggggagtaaaataagatgggagttctgaattattcatttttatttatgtattgtagtggcaattgttatcgtttttttgtttctcctatatgttgagattgtaaaaagaggcctgaataattcagcatgactcaagaaatcataaatggagtactgtctgggcagtgaatgcctatgaaatagactcattttcttgttatttttaacatttgtatgatatgttgatttataatttaataacaacctatgatggcactaatgaatgcaataatatttgcaaggcatttcaatattctaaacaggaaaagaactgaatcgtcccactccctttattttaaccaaagggcaggaaggagccagcgacccagtgggaaagaaaaggggacatactggaaccaaaggccattccaagaagaagtcagagcccacacatgccacaggcatatttctgggtactaattcatgccctggttgtttgaacacttgtgctaagctcttcatgcacttttatttcataccactgcaagcctagaggcaaggcaggatttatttttaagaaggggtgttatttcagtctaagagtcacaggtaagttgaggaaacacagaaagtatatatttctcattattcttagagattgagaagccaaagctccaagtcaaacctcatatagttaaatctatttattatacctgtttcacaaagtccaggaatgctgcttgagagaaccaactaaaaggtgagtaaaaaagagagaatagaaagtagttttaagaagagaacatccattctcttaagattactagccctcaactttccatcaaagacagaaccatcatgacagagcctgtcccagagactggtccaaccctttctttggagccttcatgagtgtttcacaccagagatgttgacggccttttgtggcagacaaatcatcatacaggggtctctttcatactaaaagctgtttagcaaccctagccctgcccatgaagagagagtaacactctacagccacataacctcgaaagaatacattcacacatttccaacacctatgagagctttataagctcaactgtgtccctccaatgtctatatgttgaaggcctaaccactaggacctaagaatgtgacagtatttgaagatagggtctttagggggtgattaagttaaagtgaggctgttaatcctaatccaatctgacaagtgtctttataaaaagaggaaattggaacacacaagaagacaccaggacacagccatttagaagaaagaccgtgtgagtgagagagaaggtggccatctacaagccaaggagaggcctcaggagaaaccaaacctcctgacaccttgatcttgcacttctagccttccaaactttgagaaaatatattcctgttgtttgcaccaccacatctgtggtattttgttaccggggccctagaaaactaaaacagggacaataccacctccagctgagaaccaaaacaaggttctatgcatcttcaagactcagctacactcatgttgtccaaaaacccttactaatccctgaaagggaatatataataaatctccacttctttaagatcctaggaacaggatgtgtttcctagttcaaaaattttcagattttgaaaaggtaatagcgtgtatttaccaaatactacctagcactatcctaggggtgtctggggcaagatgctataatcaaacacataaacatttctcccacaaaacacaaaaatatgagcacttttaagatgaaattaagactacaaacagttttacagcactgtatgtcagattttgctgccaaatgaattcacattagttcatattttaatgctaaataaactacaaaaaaatcctttgcatatctgaacctgttggatttcagagtggcaattaagagactgtggacttggtcaacttcccttaataaaatgaaatccagaaggtccagggtccatacataaatggagacttccagtgaacaggagcaaccaataaacaacctaaacttcctgcactggggtttcattttcctcataggattctcccacttggttcctgacccgaggtgggtcctactctccttgaatctctgtctgacccaagtgtagacaaaacctctcccttagtttcccttatctctgatcaactaagctaagattttccaaaagattgtaccaaattccaagaaatgccaaagaggaaacaaacacagccatgctgaccctattcttgctagctaactctcagaggcttacagtccccatggagcccacatgagcccccaagagaaaaagagactagatcaatggccaaataccaatgccatcctaatctccaccacctagggacacaaccctatatatttgatacttctctggtctacagtacagtggagaagacgttgtcatttctctgaccatatatagccacctacccaagctcatatatttattcaataaatatttattaagcacctattagtttccccaaatcaactaagaactagagatacaacagtgagtaaaacactgaatttaccctcatggagcttcttagaaattgtttttctctgtattctgacagcacgcattgttcacccctgttatagtactcaattcattctaattgttaagtgtcagctttccttactacagtttgagcttgttatgggaagcaaccatgttctatttatttttcaagcatatagtacaatgcttggcctacattagggagctaaatgttgattgaattaatgaataaatgaactgggatgagggcaaacctggttgctaaatgctatccattttctcttttaactatctgaaaggaaatccttcctccttttccccactgctgagcctttgctatctcttggctgaattgctttaacagcctggtaactagtctccctgcccacaaaatccaccctctacactgctaccaagaagagctttctataataggaatttgattcttcccccttttgaattctactgcccacagaatgaggattaaactcctttgaataacatacatggccctttacagtctgccccaactggtttttttcttattttccaatttccttctacttgctaccgtacaaagtttgccccagttaccgagaaccactcgatgtgcctaaaataccccctgctcttccatctctgtacctctgctcatgctgttccatttttcttgaatgctttcctactatttctctcttcccgctctgtcccctaccctaaaccacctcccaacctgaaaaactcaagtatttttcagggaccagctcaagtgtcatttcttacacagagtttctctatttcctcaggcagtcatcctcatcctctgaaaccaagcaatagagtaaaggtggatcccaggacagagggctctgttcacacacacttacacataccatgcagctcagaggagctaattcttggccccaaatctgaactgtgaaatgcatccctcatcctttaagaggcagttgctaaaatgcaaatgtctgaaagatgcctcatatgcaaaggctaacctgatgatcccttccatcttatcagggtttagttaatggccaggtgagcaatagaatgggactggtgttaggaagaaggcagaagacagaaaggaagaaaagtgctacataaaaagaggtagcataaaacaaactttccttatttcaccatttgtctgggatcaatcctggctctgtgtagtaatcttgatcatttggtcatttagaaaaatcgtagcaccaggcactgtgcaatgttcttttggagccacatatgattgacaaagatatgtccactattctcaaacagcttacaatctagtgaactattgaattcacaagaatttcaagccatcattctatccaggaccagaagttcttttaccaaccaaacttaaagcgaagaaaatatattccttgaagtttttcagacttctaaacattactttctctattacacaaaataaatacgggaagcaatgaagctgtaagaagcctgccataaatattctcgatctcagccatgaaatatgtcctaattctaatatatataaggtatcaagtcaaagcaaaaccagggaatgatattgaagacaatttcatttcctctgcttttctattctgccttctgaactataagtattccttaaagggctgggcctaaagtcttatgaaatttttagcacaagagtttcaaagggaatttggatgtgtgcaaaaagaggagacaatacctctaggaaaaaatgatggaatcacacttttaatatatttggttaaaaataatgttaccactcttctaatataataggtcaagagaagctgaacaatctaacagattctgaaaggtatccctaaggtaggtccaccctctcagttaggcagtagtaaaagatctaaacataatcaatcgggcacattgtatgtagctgtgagggttagaagtacaaaatgtagttgtgagggttagaagtataaaaaacagtctatgcatttacaatctatttggtaagatgcagtgtgccaatgaagaaaggtaaatatgatagaataagacaaagggtaaagagatgaggaacagttaagaaatgaaggtagggggtaatactaaaaactgtttattgagaagattctacatgccaagcactttacaacacctctgttaagtctcataaaaccatacaaaaacacagtgataaaaagttttcctccctgacaatatcaggacaaacaagaaactttggttaagcaacaaacatttagtctttacacattttaagtcaaaatatataaatttgcatacatccgccaatcttttgatataggaacaaagccttcttttgatcactgatttgatgactggcgttccaatctttcttacataaatgacacccaatcctagttgtaattccttaaagatacttctaagggttgaggatcattttattccatttggatagccaaatatttcaatatcatttattgaaaagccttctttttccattaaattactctggcatttttattgaaaaccaattgaatgcataagtataggtccatttctgagccccattctgttccattgatttgtatatctgttcttatgccaataccacattgtcctttatagcaagttttaaggtattgtaagtcccccaactttgttattctttaaaattgtattgactattctaggtcctttgtatttccataaattttttataatgacatcaatttctacccccaccctgaaaaaaccccactgggctttttactaggatggagatgagtctaaagatgaaggtaaagagagttgaaatcttaaaatactgattcttttgatccataagcacagtatagctttccatttatttaagtcttcaatatttctcagcaatgcttcatagttttcagggtaggggtcttgaatatgttgatatatatgtataattttttccatggttttgatgctactataaatagtattttatttaaatttttaaattgataattctccagtagtatataaaaatacaattgatttttgtatattaactttgtatcttgtaatcttcctaaattcatctaagttctagtgattttatgtaaattccttagaattttctgcatagaaagtcatgtcatttgtgaaggaagatggttttactctttcctttctcatcaatattctatttcttttttgtactttattccatatgctacaaccctttgtataaggctgagtggaagcagtaaaggcaaacatccttgccttttcccaaccttggggaaaatatattcactttttcactattgagtatgatgtcggctataggttttccatacatatctttatcaggttgaggaggatgttctacatttagtttattgagaattctcaacatgaatgagtgttcaattttttcaaactgttccctgcattattgaagtgatcatatatatttttcatattaatataatgaattacattaattttcaaatgttaaaccaacacagtgttactgggataaacacctcttagatatgatgtattatcctttttatatcttgctggatttccattaactaatgttttttgaagatttttgctcctatattcatgagaaatattggtatatagttttcttatagtatcttgtcacttattggtaggaaaagaatactgataaggagttagaaaatgttccctccccttctatttcctggaagagtttgtgtagaattggtattgttctttctttatacgtttggtagaattcaccagtgaagccatttgggcttggcattatctttacaagaaaagattttaccaggaattcagtttctttgatatataaagaatgacttattatttttttcttcttgagttaactttcgtagttttctgtctctcaaggtgtttgtctatttacccaagttgtcaaatttattgacataaagatggttataatattcttttattagccttttaattttgatacgctctatagtgatatccccctttcttgcctgatgttgataatttatgttttatctcctcagttctgagccagtcttgctagagatctatcaatcttatcttttcaaaaattcagctttaggccaggcgcggtggctcacgcctgtaatccctccactttgggaggccgaggcaggcggatcacaaggtcaggagtttgagaccagcctggccaacatggtgaaaccccgtctctactaaaaatacaaaaaaaattagccaggtgtggtggcacatgcttgtaatctcagctacttgggaggctgaggcaggagaattgcttgaacccgggaggcggaggttgcagtgagccgagattgtgccactgcactccagcctgggcaacagagcgagactccatttcaaaaaaaaaaaaaaaaaaaaaaatccagctttaggttttactgattttctttaatttgtgtatactctacttcattgatttcccctcttcatttgttttccttctgtttattctgtttatcttactcttctttctctagattcctaaggtagaagcttcagatcattgattgtttatcttccttcttttgaatataatcatttaattttataaatgtcccttgaagcgctgcattagccatattgtgcaaattttactatgttgttgttttattttaattcagtccaaaatatatcctgaaggcctttgtgatttcttttttgactcatgcattacttagaagtttaatgtttaatttccaaaatttaggtattttctagctatagttctctttaattctaatgtggtcacagaacacattttgtataatttcaatcaacttacacttgataagactcatttgatagaataagacttatttgatagaatattttctaccttggtaaatataacatataaactagaaaagaatgtatattctctctcctgttgtttgatgcaatattctagaaaggtcaatttggtcaagctggtagattttatatatatataatatatatataataaatatatatatattttgtgtgtgtgtgtgtgtgtgtgtgtgtgtgtgtgtgtatgatggagttttgctcttgtagcccaggctagagtgcaatggcccgatgtcggctcactgcaacctccacttcctgggttcaagtgattctcctgcctctgcctcccgagtagctgggactacaggcatacactaccacgcccagctaatttttgtgtttttagtagagagggggtttcaccacattggccaggttggtctccacctcttgacctcaggtgatctgcccacctcggcctcccaaagtgctggaattacaggcatgagccaccgcacccggccaattaatctcttttaacctatctacatatttatatttaacatggatttgtcatagatagcatatagttgggtcttgctttgtatccaatctgtcaatatatgcctttcagtggcatatttaggccatttatatttaatattattattaatatgtttggctctaaatcattttgctatttgttttcttttttatctagtctttgtttcttctttttttttcttgccttttcttgaattgactgtttttttagagttctgtattacttccaccattattagctatactccttgccattgttttgatggtttctctaggactaacaatgtgcttcttgaaactgctacactccttcttcaaatactattacaccaggccaggcaaggtggttcactcctataatcccagcactttgggaggccgaggtgggcggatcacttgaggttgggagttcgagaccattctgaccaacacagagaaaccccgtctctaataaaaatacaaaaattagccaggcatggtggtgcatgcctgtaatctcagctactctggaggctgaggcaggagaatcgcttgaacccaggaggcggaggttgcggtgagccgagatcatgctattgcactccagcctgggcaaccagtgaaacttcatttcaaaaaataaataaataatattttgccactaaatagatagtataggacacttccaacagtaaatttcacccctcccctcattcttagggctacttatggctgtttttaatatttttctctttattgctaattttcagcagttttatttataatgtgccttattgttgttttcttttttttagtttgggatttactgaacttatcatatgttttacttcaatatacatcataaaccccactatacactgtttagttttttgctttacatggctagttattttttcaggatttttaataatgtttataaattcccaccaatttactatgtctgatgttcttcaatccattttgtagttctaagtttatatctgataccatttttcttttgcctgaaaaacgttaataattctgaaatacaaatgtaccattgactaattacctcagctttttttttcctctgaaagcctttattttgcctttacatagataaaaagatatttttgtatctttttaaaagatatttttgctaggtgtagagttctttgttgagaggtttttttttttaatgtttttcagtattttaaggacatcagtccatttttcctgacttgcatattttatgatgagaagtctgctgctattttaacctttgttagtttgaatattatatgtctttttttccctctggctgttttaaatatttttctctttattgctagttttcagcaattttgtttataatgtgccttattgttgttttcttttttttttttttttgagtttgggatttactgaacttcttaaatctgttgatttatagtttttatcaattgttttcaccaaataatttcatatagttttaatcaaatgtggaattctatttttatgcattaattcttccaatatttttctttgcttttcccttctgggtctctaattatatacatgtggactgatagataatttcctatgagtctctaaaacagttcatactgttctttttactctctgtgcttcattttcttttgctatactctagatccttcatattttattacaatgcctaatctaccattaatctcatccagttcatttttagttcaaatattttttctttaagttccactgagtcatttaaaagatgtctttcatttttcttcttcatcatgttcatgtcttcctttatatctctgaacatatttataacacgtctttctttgggtggggggtggggacagagtttcactctgtcgcccagggtggagtgcggtggtatgatcttggctcactgcaacctccacctcccgggttcaagcgattctcctgcctcggcctcccaagtagctggaactacaggcgcatgccaccactcccggctaatttttgtatttttagtagaaacaaggtttccctatattggccaggctggtctcgaactcctgacctcgtgatctgcccgcctcagcctcccaaagtgctgggattccaggcgtgagccaccgcacccagcctataataggtcttttaatattctttactaatattgtgaatatctttgttatttctccgtctgtttctaccatttttttcttgtttatgggtcatatttcctactgtgtatgtgtgtatgtgcatgtgcacatattcatgtgtgtaataatttttgaagctcctgtttaaaatgtgagacctttttggcaggaagtagcattcaggttagtttgttcctctttatggcattatctaataacctttattttagcacttatttatccctgcctctaagatatggctcttctgagatctctattaagtctcaatgagttctttctactctagcttaagagaactagaatggcctctggcccagtgggaattctgggaattgttcttcttatggctccttgataattgtttttttccacagaaagtaaccttgtccagacatggaatttcacctataatatgcacagatttgagcaaaaactcaaaaggaacccagcgcatattaccggagctccttctaaccttaggaattccatcccacaaaactctcatgccttatcctccccaaatgctgatctctgtctcctcaactcagtcagattgctgggttactcctcattgaacctcagtcctggaattatctccaggtaaacagcctagaaaaaccttacttttcttttctcaggaataataatcctgtgctacccattgtccaatgtctaaaagtagccattttcttttcccccttccaattttctagttatttatggtgggagggtaatttcagattgccacactccctcatggctggaagtgaaagtatcacaatttttgtttctaatgttcaaatcagatcatatagttcctgcttataaaccttcagtggcttcatattacacatgaaattaaatccagtctttaccctggcctctaaagaaagatatacattatctggtgcctgtctttttttctgaccttgatttctatcaatcttcccttgctcactatattctagccacatttgcttgctttctgctctacacttccatactggagcccttcaccttgctgttaacccttcctagggtaattctaccatagaagaggccatcacatagggggcatcctcttgtcatttaacctcggttcaaactttaccttctcagtaatggcttcactgaacacacaatacaaattagctattcatccaatcacctttcattaaaagatcccattttattttcttaatagaaattactactgtctaaaataattgtttattgatgtgttttatctgaccactcccagagcagaagatgtaactgccattagatctaagatatgtctatttactccggaatatccaccacctagaagagtgtctgcatatactaggtactcaatatgtgttgagttacatattgtttatttttaatgaaaattcagaacatagagataggcttgtgacctcgattgataagaaaagatggtgcgggaattgagcccttaacgttgccactgccctgtctttctaattgttctttctttgctcccactcctgctttatcatctgcagccctggcctaacagctaatttgagaagacccaatgataatgcaggttaactaagtcttggttgagtatttgagatttatctttatccaaattaaaattggaatcctcttcaatgtccatttctaagagggtgatgtgggagggaagggaagtcctgggaagtccacctgtttaggttcagaaaacctttcttttcctttctcagatgaagatattcctgagttcagagagaaggatagaaagatgacttttatcaaagcagttgctccatgcttatactatggagtccctacgacagctctctgacttaaagaaaggacctgcctcaaagagtcttctccttcttcttcccaacatgttgtgagaaggtaaaggagtgaagtggtaaagtgagctggcaggtaaggcagtaggggtaggaggggctgggaggatggaacaagagtctgtgtggcagttctaatccactctttaaagcacctgagacccactatctggaaggcagagattgtctgtcactgtgtcatcaaaaatgagttctgttaacaagctgaatataggagatatttgacaaaagcaggggactttaaagaaggatgtatctaaggtcagggattataacttgggcagcaacccaaaacaaaagcagggcacagttagtaaactcatactttttgttatgattgaataatatggtttttgtgaattgtattataacctgttagtacacagactctttcagctaagaaaactatcagtactgcaaaaactgaaacaaataaggttaaggtactcatgcttctactttgagaaataagtctttttcaacacatgacttctagatttatgatcctgcagaaatacccagagataccatttctttcatttcttaatgaacatgagagtcatagagaaactatagcaaacatagtaggagaaaaaaacaaatgtcctaatattctctggagcaaacacaagcattagcttttctttcacacatattagcttatctttaaaagatcttatcagaagaaggccaaatgtatctgtgtatatatattgacacacaaaatatgtatctgttctatattacattttatatatatgtacaccctccccagctaagaaactaagccacaagatagcatcaggcatacatacagatcaaaagccctgttaaagcaggcttaattcacgggcaacatttctgcctgaatattccttaaagaatcttttttctgcaagagaagaggaaataaggcctaacaggaaaaatctcaatgcatataacatcgtggtcatctgccctgccttatcacaggtacatatggaaaaatgcaagtgctgtagtttgaccgtccaaacctttgttgaaattcgatccccaatgttggaggtgggtcctaatgggaagtgtttgggtcatggaggtggatctctcatgaatggcttggtgccctcctcaaggcaatgagtgtgttctcaatctattagctgctgtgaaagtcaccctaagagcaggttgttaaaaagagtcttgcaccttcctgcttccgctctcccacctcgtggtctctggacacaccagctccccttcaccttccaccttcagaggaagcagcatgaagccctgactagaagcaaatgatggcgccatgcttcatgtacagcctgcagaagtgtaagccaaataatcctcttttctttataaattacttagcctcaggtactcctttatagcaacataaatgaactaagacagcaggcaagttaattttctgattctccatagaaccagtacaagtaaattctaagttgccccaaatgacaatgacagagctgggagaattctcagtgtttattaactgctggtgatcctctcttctaggatcccctagaagatgccagctcaggcccaacaggcatggagtcacagaagaggttactaaaaccaagggctatggagagggagattagcataatgccagaccaagcaacactcaataaatgtgatggattgaaagggactgaaattgagtaggagaaagggaacacgttaggaataggcaaggacagtagaagaagaaaaagaggctcatgtgggggagcccggtaactgccacccacaattccctctagaccaatgtcataggccccttgtctgcaccaggccagacctggccgcctccttggtgaaaggtttttagtctcttttcttattcagccttataaacactgtgtgctgacatatccagaaacaaatattaatgtgactgttcttaagagaaacaaatcagcaggcccaaaataaatacaataagcagtaccctgtgtttcattagtgttctatcatcttttcaggagaacgtgcctttggaagaaacactttcatatgtctgttccaaaatacaggcttccatatatagatgggcttttctttcttcccctggtggtgaagggcagtggggggcagggtagcatgtttttgtaagtttatttttatttattggtgctggccaacagaagtagaaggataaatttaaagaaaggtggtgtttacaaatgaaaatagagtccatgaaaatttagcaactttctaagaactatgtttcttcttacacgtatttattcttattatgagaacattataaagcatgctcataaatcaaagaattattaaaaagatacagaagaacatttacatcatctgtgctacttttcattcagatataacattattttggtgtctatatgtaatctgctttaaatgctcacatcttcatagtacaaacatgtattcctcctcatctcacccttatcctctgaaatataccacatcaaacatagtattcgagagtgtacaccttccacactactactgaataaaacctcccagagtagagacccctcatgcccactggatgggagtttgaagtctagagtctgtctgatttgccaccctattctcagtgtctagtatagtgtcttgaacacagcaggcactcaataaatatttgttgattataattttaacctgcctttttcatgtatttatagaaatgacattttcctatttcattattattctcttctataacatgatttttaatggttgcttatcatccataccataatttaatttaaccagcccttcatcactgaacatgtaaaatgtttcaaattactcaccgtgataactaatgctatgatgaccacctttcaagtaaatatttttgcattgtcataggatcaatttctgtaagttgaatagcagtgatgggtatacatattttgaggcttttattgccaaactgtcttcacaaaggtcactccaatttatatgtttaccatgaaattatgaaagtctctatttccctgcactcacatcaacactatatattttaattaaaaaaaatcgtcattctgatgaataaaacatatcatgaataaatagtatggaggaacaaagcggatcatgtaaaagtggctctgtatactggatgatatacaaatgttcattgttaaagtacttattacagtggttggaagcttcttgagaacagtgtctagcacagtgcatgacatatgatatggtattaaaaattatcatcccctgaactgaaagtagacagaggatgtagacttgtattaactcatgggtatatcatcaacctgaactagaaagatgcctgatcactaaaacatctcacaatttcaatccttccactcagaggtaggtactcaaacaggagaattgccaggcctggtcctcacgaggagatgaataccctagaacctggcttaggacagtcacaatgggcctcggaaccttcttcccctccatctcctctgcatattggccttttgcttattccagttttgctctccagcccttccctgattcccaagtctggttctttaagttaactgagaatgtgttctgttacaaattcaggtgtgttctcattagttttcctgaaggacctctgagcccaagatactccacatcttgaattcctactatctggcttatctcccactctgacctaaaacgaggctgtcatcatgttgccacctgataggtaacttttaacaaacagcaggtgcaaacatgggactgatagaaacaaacaacatccttgcaaccgaaggggctcaacagcccccacttcactcccattcctaccccattttacagatgcagaaatgaaggccccagagcataagggacttttccacagtaccacggattgttaatggcacagcaggtatcacaggtccttcctactaccccaggattcctccctaatgaagattacagatgaaaaaaaaatgaaggtcattccagcgatgctttctgaatgtggtcaaaagtgtgtcatttgaaagcttgctgcctcgtgatgtacacatgcccactgcctacagaaaaggtgcaaggtgaaaacacagtagtctctttgctaacttcttttttttttttttttttttttttttttgagacggagtctcgcactgtctcccaggctagagtgcagtggtgcaatcttggctcactgcaagctctgcctcccgtgttcatgccattctcctgcctcagcctcctgagtagctgggactacaggtgcccaccaccacgcctggctaatttttttttttttttttttttagtagagatggggtttcaccgtgttagccacaatggtctggatctcctgacctcgtgatccaccctcctcggcctcccaaagtgctgtgatgacaggcatgagccaccatgcccagccctcttagctaacttctagaactagaagaggctgtccacaggaagttccaccagcagctttagctcaagctccagcaacacatcaaagggccacgtcatgtttcacttacaatgcagggtgtcatctttgacctacatgtgactgcaccagtgttatttcccactctgggcccacatatcagcagccctgacactgcctgggttcccatcatgtcactgtctggctgcagtggacctcgtccctgggtcaactcttgtcttgtttacctggctaattgtcttggtgctctcccttcggccctttcacaggtgaatatgcagggaacagaggggaaggtgtgaatgaattaaatctgagaattttgtgccttttgtccaaggatttcagagatagccactttatagccaaacatttggaagccatgatttctgtcttccaaaagcaatcaccatctaagccagtaaatctcaacttctgtatattagagtcaactggagagcatttaaaaataattctaatgcccaagctgcaccctgaaacaattacatcagactctttatgggagcgacccaggcatctgtatttttttaaactccccaggcaattccaaagtgcagccaagtttgcgcatctctgctctaagtgtgggccaaggagccttctctaattggccttcatgtgccaaggacagagcaccagcaattaaaataagaaacaggagagttaaatcggtcttgcttttctcattctctttctttccccatttttataacagactgtaattcaactggctcaaagagctatctacaatctatggagcagaaataatcctgaaggaaaggaacgcctccatcccacagccttctctttttctttttttaaaacattgaccagtttttgtccttaccctcagattacagagctttcttgatttgaagttcatattttcctgggatcctaaaatgagtggtacagaaaaagctgaggcgcatgcaccctcatttatcctgaatcctgtctatcttgtgagcatcccctaaagggagcacgtgcctgggaagaagtttctgggaaataatatttaaaatccaagccacagttgtctcttccttacctcttgccattcacaaaagggttttacgtaaaacagaaattcatttgctaccagcccagcccagaaaaaaaacaggcatcaggagaaaacctcacagaaagggctctcagaaggccacggaaatggcagccccacagacatagacccacgtgcaatggggaaaaggatgagcttggagagaacatcaggaaggcaccccctttagccttcagacctctccagttctggggacaggtacttaaattagcattctcagggagaaaggcagggatggatgtaaagaggcacaggagttgtatgagagggaaaacatagcacattaaaaaaaaaaaaaaaaaaaaaaaagaaagccagcaggaatatgtcctaatttggagaaacaggccacattgccatggcaactctgaatctccacaaggcagccaggcatgcctttaaacatcatgttaaatagttcaactatgaagaagaagaaagaaaagagtgtaagggaggtttgagagaggaggaagagccctgaagcctgctgagggccagagggagaggctgcccaaggcccagccattcttcaagagaaatttcatacagcgaagctgcaagtcctgaactggatcttttctctctgatctgggcaggttggggactgcatttgtatgtagttaacctgtatcttcagaaagattctcccaaagccacacagctgccagcccagtactcctcatcctcttttccagggctgccagccccacagcaaacctgcctgccatactcaggcctttcccaggagacttgacgggcatgtgatcttgtgccgttggggaagtgaacccagcagtcctgagggctgagcacagcaattattcggccacacctgtaaccatgcatggaacactggttaggaattctggcctaagggggaagaaaaaacattttatttattcaaaaaatgtaaaagccacctggaaaccatgcctaaatgaagttatgccatgtgtggtcctttgggatcaagccagtgatgctggcaattcagggaagagttttctgcgtggctctgaacctttggaaaataggaataagaatataaaactgttctcccatctggaacattaattactcaaattatgcacttaatgttcagcattcatttcaccctgcaactagttctcaatcacattgccttccacattactttgtctcttttttctttcagaagtctctcccctagtccttctggcctgtttgcctgctctgcctttccccttttctcttctgttgggacctggagatcttctgacagagccctgtgagctgagcagctccagcaggtgagggccaagccagaagctgagaaggagaagcaaatggtcccatgcctcatggcacactcagatgccactgtgagaagtggtgtgtgtcataggtgtccaggtaacctgatgagccccgtacggcccggggaatggagaatgcattcttctcttagctaaacaacaacaataataatagaagcagatgggtgcactgctatccccgggctctctctttctttttgttcattggcttacatcaaatcattttctctatagatttattcttagcacacaaaactgaaatttccacttgctctgctgtgctctctctgaaactttccattccataaacatcccacaactcagaatgagtccatcttatctgtcctgtatggccctgactcaaggcagaggcctcaaggcctttagggggcttcactatatccctagctaaaggaaatcacacctctcccacaaaacacaccctctcttggccctatctcctccaaccaagagcagatctttctctgagacatgtcctcctctaccacttcacacatgcatgtcctggcccaaaccacagtccccctgagtcctgcatttctgcacttgtacaacaatctctacctcacaggattgttgggaggcatgcataaaatatctgtgggggagggaggcatggtgcctggcccatttgcaggctggcaatcagaagggcgcccttctcagccaagcattggacagagtgtttagtgaggtaaggcatttccttctatgttaaccatacatggctggcattattcctgttttaacagtgaggagcctgaagttccaaaaggttaagtcattgcctaagttcacacagacaggagccagcaaaaccaattttgactttcaaattcactgtccttaaccatggccttcctctcgatggtggtgcaggatgtccaaatagaagggcttggggttggcgatctgttcaaaaggcagggctcagcagctgtgctgaggcagcaccacatagcaaacacatctacattcaacatgtgtatttatttgggatggctgctatggtgtggggagaggaaggggttatagctgatggaaatctgtgaacagctagaagctcctacctccctgcctccctaggagcggccatgggcacactgcgtttctaacaaatgcaaataaatattaaatatttgtttaatagaaaataccatgcattctttgactgcaattttgctttttctctagttggatctccatgaattaccaagggatgtaaagacttagaagagagttacaagaggaaatgtaaaaccatccatttttaccaaaattaaatgtgcaaaaggctacatatcggagggatgaggacaggaaagaataagaggtaaatagcaaatgggaaaatgagaaaggaaaacaagaagtgtttaacaaacactacttaaaattctcctcaagacaaagcctgaagcacagtcagcctcggcccaaagcacctgcgtggtccattttccacccttaaagcccctgatattcccttggatgcttcattctctgaggaaaaaaccctagtctaaatccatttgatcctgaaaacacaaaggtccatatccgaagcaccccagtccttcagtgtaacctttcttaccttcctagttctctctcctttcctcagttgaataacctgcattttaaaaataactgaattatccatgcattgttttatcacattacttcaatggcctcttctgattacagcgccaaccttctggcctccacttcctacactatctgtctcttcctgtctgtcttttctccccaccacccccccatcttatctattccctttcctgtcacctcttcaaggattaatagggtgaaaacactcattccatcagcagtcactgatgctcaggtgtggcacaggagaatttctaacatggcctggaagcaatctaataggaagggcgaggaaggggagtggatggagaagccagatgtcttgcccaagaaatatctgtatttcagggtggtgtgtagaggaaactaccagcttgctcccagtgccctgctgatgcaaagcagcataaatctgcctcttcccctcttacgtattattccaggcactccagcattcacatactcatgttcactgacaactgcccctcttggaaacactccaccagggagctcatcagatagcagtcatttagcaaggcccccagtgcctgaaccactttttttgccagcatattcacccattcactctgccaacacatggcaaaagaggtgccaccaaggactcttctgtttataacacctactgatcacactctgaggttaagtcagctctggcactgtgaagcatacatgtgcagaaaggtgaatgaagctacagcaaagaatccgtcatctctacagtagcctggcaggctgattttctatcatctaaaattaattatatggcataacatgcagagacatccacagaacaagggagacaggttggatcagggctaagaagtacctgaatgagagtgatggagcccagaagcagctttaccatgattacttacacagaggagaggttgggctagaatattttccagttggagaaaatttgaaagtggttcaatcagtgaaatgtaaccacacatacaatcgtcatggtgaaaatccctgagatgtttttcagctccctctagccagaatatgaacaatacctaatgattgtgcagtgcttatagctcaacgaagcactctcatgtatctcatttcagtcattacatcatccattattttatggacaaagcagctttggctcagagaggttcagtgatctgcccaaggtcatgcagctggcaagaggcagagacaaacggaagccccaggtgtcagacaaaggtcttgtgactgcacgcctcagattgatgccaccatggtccacagtgctcagagaaacaaggacaggaacaagaaaggcccaaagaaccgagaacaatgtgtgtactaaagccatccaacagcatcaattgactataaaaattcagcttctttagtgactcataaccaggtcaaagctttgattttattgaacggtccagtaagctcattcaatggacataaaaaaatctccataatagaaaatacgcatatgcatgtatatttatcccatatagaaaccatgggatatttttatacgtgaatcttttggaataaaatgtaatgtttctccccacctagctagaaggagaacaagtgagtttaccttagagtgagggatcaaaccacttgtaactcaaagggtgaggtgtgtttcactccatctctaagagggcattatgcatgccactacagtgcgtaacgtactgctctgtttcagcctgtgcctctcagttctgccccacccagccctccatatcactggggccaacttcactccctctggattttgttcattcggtagggatccaagcattctagaaacatggagctggaaaggaattcaaggtcattttgttgaaaggaaaaacagcagaataaaataggtaaaaattccaaggctgagaaacgtgccttggatgcttactgtgcattaggaggtggcagtaaatgaatgtatcagtgcaggggaccttgtgattcgtagacaaagatacctgatttagatcctggctgcccctcttacctgctggacaactttgacaacaactcaacatctctgggccccagttttcttgtatataaaatgggagtaataataattacctcacaggattatagaaaaataaaaacaagatcattaatgtcatatgttaattaatataatgcaattaaataatatagccactgtaataaaataaaaaataaagcacacagcaaagtacctgatcagttccagttaggttactttctaccttttacctgtctaaaaatcactggatgtttctttattgattggttccaaaaatactactacatagctgacttttatctttcgtatgctacattctctgagttttttgttgttggtggtgatggtggtggtgttctctctgagccctgaattgtttgtcctatcattttttacatatttctaaaaatataagaactccttcagctccattctccagagggcagaaacaagaagtaaagaaaaattgttcctcactatgagtatgaataacgccctatagccatgtgtttattaagtaatcatagttttcctctttttacaaatatatattggagcagcatgagattcctgtacatcaatgatatgacatgatattaactcaaagcaaagaaacatatttttcttagcctaagcagcctagttgtagataaatgtgaagttatgttgggttttgtaacactaaagacaacttgatgagccccaggagatgcaattctcattgtatggctgaagaagctgagacctaatgaatgatttatccaagatcacacagctagccatgccggagcctaaactctaacccagtgtttctaactctcagataagccctcttacctctgtaccacacttttgatataaacttccaaccagaaagttgtgtagattctattttctcagattattgatgaatatgtcacacgggacagaaataaaaggctcgctaaagtcaagacacagtacattgatcacttcccccgcaatcccggaacctcatcagtctgtcactgctggagatgatgatatcccataggacctcagtgccacacttttcactgtgctgtaatttctgtcagagaaacaagacacgagcagagcccttacctgtcaggctctagcctaacagttcaggggacgcatctcgatccacagctcttagaagcaatttccttggaaacactgtctctagcaacaatatctacaccagtgcttcccaaacactagcccatggatcaatgacaatccatgataaagttatcactggcccacagaaaaatgagaaaaataaaaacaatgtattgggttgttgacacagcgagatgtattcaatttaaaggactgttctttattctgagatcatatatttcttagttttgtttgtagtttccatatcctttgtttttttaaaaaaaatatggtataggactattttttaaaagtcgaaattggaaaaataacaattcatcgtgctacatcatgccaccactgccactatcattataaaataattagtctgcaaattgagaaatcagaaacctctcctctaagcaactggcaatagaggctgtgtgcctggaaggagcaaagtccccaccaagactggttccctcttggccaaaaaggaggcttgacgaagggactgccactgccagtatgggtcatgggacatcagggagcttcgtataaccatatcccaatatgacactctccactcaagtatcttgtgaattcagccacataggggtttcattatgttacagttcagacttctgttttaaattatttgctttcatttttcacttcaattaacgtaggtgggtaaccacctaccaggtgtcaacatcaccagcagttttgatatgcattatttttcttagtcctatgagataagcccttaaaatgtccaaggtataccacacccggcttttgtagctcactgccgcaaacttttcatgatcgtcccccagatcttggttgctcaaattcaatcttcctcatctaatttctgtgccattttctccttttgtgatgcattctgcataccactattgattaaaacactatgcatgttcatctatttctccagcttcaccataccctcagtgatttgtaccacatctaacacataaaggatgttctgaatgagtaaaactaatcctagaccactttccaaaaagctaatcattagataatttgatgaaattatcaaaatgttgacttcttgcataaaaataaacctgaaaagtaggctaacttctacagttcattatggaaatagggtgaaaatggggtctagtgaagtgatggcaaaattaattaggagaattataacgagataattcatataaagctcttacacatagcaagggctccatacataatagtcttccttttccaactccttttctgattagttgctcattggaatgttgtgaagattggtttttcttttttttttttttttttttttagaaaatcttattgttttcaaaacactgctttttaattttttgcggtgttttgtttttttttaatttttactttttaaaattttttattatttatttatttatttatttatttatattttattttaagttccaggatacatgtgcagaatgtgtaggcttgctacactggggaaaaaaaaaaaaaaaacactgctttttaaaaacaataatatcaacactgggcccaggaaaaccacctcaaaaacaccattttggcttttcttatgttctcctgaatccccatacacatcacacacacacacactcgcacagacacacacacaaatactcactttccaaattttggttgacatctgattgctgattactatgagtgtgatcttccagacaactgtgtctgcatcaagtacccctaggggtcattcccatttgattctgtgttaatatttttataatttttgtatttttataatattttcacaaaatttcataatttttccatgaggccaaatcagaagcttcttcaaagtaaagattaaatatacctttttttcttaaaatgtctgcaccttcaggctttcacaggatattaaatcagtgtgacagcacttttaggagcgtaggtaagctactagaagattagcacaatttaattctaagaacagctggtagttgataaatattaaacagtcagaagacaatttagggctagaagcaccaacattctaagaatcatgtacaattattatgtctgtttttgaaagaggcatttttaaaaatattaggaacacgttgcaaatctatcaagatcccatcatttgtgaagtccaacatgacttagattttaacaatttgtttccagccaatcaccaaatctctttgaaatgtgtcatgttatattggcatgcttgtctctttctgtttgtgcctatgtattctatttacaccacccagggtaaagtgatgtttaatactcattttaataccaatgttatcaaaatatattttagcctacattcaacagctctggagtaggccaaaaccttttctcctcattatcacctcagtgagagtcccttgccaggatctggctaggaggcttatatctgacaaagcttaatgaagtgttaatgaagggaaaccatcccagcccatttagagctttattcagaacagatttaagagtactctggtaaaaggctttaatagtggctctttttcttccccaggaggggacggataaggtgagaggctgtagacttaacttggtcatatttggcttgaatggttttgccttttgttcactaaactgaggtttaatccttctccttattttaaaattcctctgtatgggtccattcctctgtatgggcctatgaattcctcattctagatagctgcccaacctttccaatcaatgtctaggcccttaagcatgcactgttaacatacccatagcttctttttcttccctttaagtaacttcttcatcctctctagtcccatcaaagctattcatttaacagaaaaccatcagccaaggtctacaaagaattccgtggccaaatcctctgcattccatttgactcccctgtgctgacatggcaccactcatcaatcatagccattcagcactcttcagtgtagcttacatggttctcttctcttgcagccattaacttaggggccagaagacctacattctagtcctagccttgccacttagtatttctccatctttgacatatcatttaacttctcagagacttatggtgatgatggggatagtgacaatagctatcttcacttttcagagagagaatttgagatgcagtttcccatactgcacaatcgttatgagtatcaaattaaggtaaagtatataaatttactttgaaaactgtaaaacatcatgaaaggtaatattttgttatctttatctcctacctccagccacatgtactgtagtgttccttcctgttctctcttccaattttcctttcctttctttctggaagactccctgcttttccagtatgaatttctgctgtacacgaatttctctgcatacttgagcacttctttcctaagtagctcattagaagaatgcttcaagatgaggagtaaaggggctgacttcagggtgccacatttggaggaaataaaagaactatctatggcctgtgagtagttgggacacaccagtttctggagtgttctttgatcattgaagagtctcacccaaatagaatttagattatccaaattttctttccatctgtctgcctacgattatcagaagttcatataatctctaatatataggctttctactatatacagccccaaatgtcattaatattaacttttatcaatatcaatatatttcattaatatactttcaatcaattatctcaaaccacattaaaatatcatatcctccctccctaccctagtcctaatttcagtttgcccttgtcctcacctctaatcaggagagagaagagatagcaattcattacatcatattatctgtagactatgaactattagagaggactggtattttgttgactttaaagttctactagaactgatctggtaatctggaaaagtaggccagctccaggagagaattgagatgtggcctcaggcaagtcacttaatctttcttggcctcagtgtcctctattgtaaaataagggcatgagactagtctctaagatcccttccaaccttgatggtctttgataccatgtagtaagataacatgttcatctggatttttgtggaggggtgaggaatagagtggagtggggatgaaaatagagtgtgccttattaggaattccctttcctttccctactgcatgtaaagagcttcaacattctctttgcaaccttttatgtgccaaatcttaaaatctgtcagcaaggatgcagtttaaaaattcataattggatcatacatcttcagattttaccaccactgctcatttcctttgtttactttaatctactcaccctgaaccctgtgcatttttgatggctttccacctatttattcactcacctttccttcactcaacattctcttctcatggacatcataccagaaacttcttgaatagattgtaaatcccaacccctttattttcagatgaagaacaaagaaagattaagggacttgcccagagtcaaacagctatatggattataaagcaaagatgagaaccagacctcttgatttggtagtttagtttaggctctttccactctaacatctacaccatgcaatgaatatttccattcaaccctatggagtactccaaagaagaataaagccctaaaaagcgagtagcagcataccatccgctacattgcccataagacttaaattatttttaaaaatattagccctactctctttccttctatttcaaatattggtgacatataccttccattttatataatcctagttgtgaataattgcatatttttcgcagttgctttgacaaatgaggttgagacttctatagactttattgttgcatctctacctcaaatccacccaaaccaatctttttcttgtgttgagactgcctgctgatattcgactccaccaccatttagctcagtcagtgctgtaggatctatgtgaaaaagcaattaaatcatttctgtaattattctcccatgcttataaataaataagaattgcacattcccccggaagccacgaagggcccagaaacagtgaatgacagggaggaatgaatgaggaaacatatttgcgaaggcagtaaaaattcagtgaggtgatgataaatgagaaagttggagagtgaaaataaggaaatggttaagagtcgggaaaatggaaagagaagcacaaaattgggagaaaggaggggaggattcctaggaacattggtaaaaataaaaaacaattaagaaagaaagcagtataacaaaatagacccaggagcgagagagaaagagaaaggagtgcaggcagaggaaggttaaaagaggccaaacacgtgtcgcggttgctattattttccttattgcaaagctaaggaaactgaggcagagaagagttaagcaggctaagaacatagaactaataagggagagccagaatcagtccaggtctgtctgggcctgaattctatctattatattgagctcaaactctttttcaatttttaaaattacaaaatgtgaatctatgatgatctcacaacaaaatgtttaatctaaaaaatttatattattattcctgatatcccttatcaataaattagctacagctcctcacccaggcccccactatgaccaagcatatggatggggaaggtggctgctggagggaatctctgccgtgggatggaagagcactacaaggtcccacagagatagggcattatgtccttgggtggcctcattacatgctaagttctaaccaactgaaccaactggccacagacaataaagctaatgtttgatagctccaaaagtcaagagcagaccacctgggaacttttaactaatgccaggtccaaaggtaggctacagaggggcctcagcactgacaggatgaagcacgatgatggctgcgtgtaccacataaggtagaagccgtgtggaacagtgggtcacaggagatgggggggaggacaaggtgggagaagggcagagagacacgaaccagagatgcaatgatggagagcagggagcagggcaaggagagaaaggaggacagagagaaggaacaatcagagaagccaagaggggaagaaacaaagaaggatgcatgcacaggcaggctgagatgagtccatgagggcagggaaaagcagctgagggttcttagtgcagaaagtagggttaagccctctctgtagtgtggatggttaaaacggtccataaatcgtcggagttcaccaatttatgtggacttccctcctctgccagattctcttctacttcccagagcaggtcctgaagtccttctgccttaatagacaaaattctctccaggctccagagcaggtatggacagtcccctgctcagctgaggacaactgacaccctcctcaagcagctccccttcagggtttctgtttgcagcaaggtatcccagcagagccacccctcatgctaggatcagagaggatccccacaaacggtggaatctgtggccatcaggaaagtaccttccgtttaaaatacatatttcccttatggtccaatggggtatctgaaattccactattacaaacttctttcactaagttagaatacaaatgcccctagggagggaaacccgttagttgctcttgtctatttggaccctggcaaggacttagtgttacagactgaaaggaggaaattctggggccacgtggaggacagacccaggactgaatcgaacactacttcctggagaaaccccagcagtgccaggagcagagggaagcaggaaaagagtcctctgggcaggcaaagggcagaaaaaaggcactggagaattagaggtaggagctgtcaaatgacagaaaagaacatggaaaaggaaggaaaaaatggttaaaagtagattcttttccaattgcataacttttccctgaactgaccatcaagatcaagatcacaaagtggccatgattgctacttggaagttccagaagcacacaaaaaaacccttttcaagccctaatgcttcctcccacagacaaaaagccagctccagatacttccaactcttaacagcttcagaagcccccactacaatgactagttagcctctttcttgaacccaacagagcacaagagtggaatacaccaacgtgagagaaagtgctcttctcctagagcatctagaaagctgaacggtgtccttatccccctctctgctttgctgagtagttttcataacaaccactgaactggtttcccttctggaagaactgaaatgacaccagtaactacttgctgggttaccaagtcttccctttcattgaccagtgagacttctcctcgggcacagaaactgcagggccaaatgggtgaagttccatgaccccaaatagtactttcctcaataaaattagtcaccaatttgttcttggagaacaacagtgatgagagaccagggcattcacgtctgtatcagcctcttctgatacagatgtgctggttagatgtctggaaaaaatgacatggcaggcaagcaggcaagcaggacaagaactgggactctggccgctgctctctttctaccctgcagagcagcccggtcttgagtcctgctactcagccagtccctgtatttggccagagcaaagcttccgtggcttatatgagtgtaactggacctacagctgtcacagccgttggacaacttcaggtaatgttggtctgagccatcagttcccctacttctcccctgcttggtcctgggaattgttgcactcacacttcctgccccaattcctctcttcctgggctctgactccaggcttcagaccttatttcctgttttcagtatcaactctggcttctagagccatccttccagaacagaagactctctatgacctccattcagaggggcggtgggggaaaggttctggcagagaccccaggcaagcagccagcttgggcctaggggaagagaattattcacaggatcacagatgttagagatgaaaagaacttgcaaaaacacatctcactcatccatcccaccttgtaatgtaggctgttttccaagagcatatggcctgttcccatctgatttcaaagaatctatcattaccgacaaatacacactgagcacacctcgtgtgctctgtgttgtcccagtcatgaggggtggaaaccaaggggctctctttctctagaaagggcttgcacactgtgtgataaatttacttctctcatgcattgcctgagcccgcctagatatctgtcccatcatgctcacacagatatcttccaaacacctgaatacccctcttgcagataagcaagcctctgattatcctgggaaaataatagggacaatagatgctgaaggaccagcaatgggaggaactatgggagggtgctgagggggacaatggaaacagcctttgggcaacaccaacactgactggtaaagattttggtctgtggtaacagcaattacagctgattctctaagactattcaagaagtaagaaggaaaagattgctctaagacctatcgccatccaggatagtgaggaaaggatactctcttccttgtcaacttctcatctactgagatggaatcctagaccttagactgatgtgcactcaattttattttctcctcacacacaccatggtacagaaaaaaattcccccaatccccagggttattgaagagtttcagctgatccaggatcaaatcctggggcatccagttgaaagtgttctgggcttgaaggtctcaggttcactctcaaccagagtctagagtttggagagaattggaattcccatgcagctgcagctcccaggccccatcagactgggggtggacctgacagttttgcccaccctacatcctttcttctctaattctctttccctttctacttcttgtctttcatcccactcttgtctctcccttggctattcccttattctgaatatttaggtcttaatcaaggtcaactgggaaagggaggaagtcaactttgccaggctccagttagcccctgttgcaatagctgggatatcctattactccaaggctaaatgcttgatgtcccaggagggctgaataaataaaagtgttcaaaataaagtgaagcatactggtgaaatccatggacttcactgtcatttagataagtgttctagtttccacactgccattaatagtgcgggccagttgctttcctttctgattctctttcttcatctgtaaaagaaggagaataatactactgtctaaatcctaggtctcctttgaaggttaaattggctcagtgcaggcaaagcaccatttcgtataaagagtggcaccagaaatgcagtaggcatttggtttttctaaaggggtaataaaatgaagctgacctcttctgaaactccaaatttggcccaccccactctcctcccaaccagggcaaatccaggattcaaaacatacccaaaagagtatgttaatcaattctgggttaagacccttaacaacctgcactcccactgaatatcagagacaagagagttgttgaactgacatctgatggtggatttcagcgtctctaattccactgactttctttgtcattttcatggtgtttcctcccttctgttttcatttcctttcctcatctccattagcttcttttcatttttctccaactcttctttctccttcttaatctttattaagcattcactcaatgacattgcactggaaaccatgatgagaaatctcaccaaatagagcctgacctgtcacagactttataacctaaacaacatgacatgttctactcaccagtggttctcaaactgggaagtttataaaaacagtaattagtagggctttgctccaaacctattaaatctaaatccttgggtatgaggccagagtacctctattaaaataacaataataaaataaaatctcccctgttgatttcaaagtcaaccactaccatacactaaaataaactataaattctaccaagctcctttctctctttcttgctattttttaactccttcgttctcaccatcctctcagctcattatgtcaaactgttttatttttgagaatttacaatatttgctttgatataagcaatgagaatacaggaatggtaagaataaaaggcaaagaggttggaaggagatggaaggggtatgcagacagtagatctgtgaaggcaaaagaagtggagcgatgcagatggaagacagcagaaataagagtaggcagaggaggaggagggtgggtgggtggaagcagcatgcagaaaccacagtgcagcctggcttcctgggaagcctgttgccctagcaacgtgatgctgaaaggttaaaggctgcttgctccctactactctggattacatgttgccaaggcaacagaaggcacccaagacacgtggtggcaggccatgaggacttgggggtatgccaggaatcctcagttcaagacaggctaccctggctggctgcaccattgtgctaccttccactctcaacccatacctcagaagctcaccccagatgcagcattccctgtgatactcttctcagtgccaccaccccactttgggaagggaggaaatgatattcagctgcaactaggtagacaaatccaggaggagtcaagggacactagtgcatggaaactccaagaactcaaaaggagaagcagccatttagttagaggaaagccaattataatgtatctaacttcctccattgctttgctcaactgtttgcaagcttgtaaacaaattttgtaaaaataacaaaacaaaacaaaacctgcataatacacctatcaaaagaaaaggatgccttttcttttaagaggaatttgtctttcaatactagtagataacagaagccatttattcaaaaccaggtgtgtacctggcagagtaatgagtgacttaaaaggttatttcatttaatcttcataatagttctttgaggtggaagagtattaaccacaacagagagatgaggaaaaaaaaaaaaaaaaaacagatcacagaaatcacacgtggcaagaggtcaccgggctctgaaaggtggaaccagaactcaaaatggctccatggcatatgctccatccacgatactatactgccgccatctgaaaagacactatatcaggtaacatggccccattcttacacccagaatgaataaaaaaacagcaccctgccaatacctcaggccctatatcagccaactccggagcacctcctcagcctcagctatactgaccctcctattactcatcaagaaacaacagcaaccaaaacactttcccacttgaaggccttcacacctgctgttctctctgccaaaatgctgcccctcagatcttcaggcatcttgatccttctcaccatgaaaatctcaagggctacctcctctgcggccttccctgacaaccctaactaaaatagctcacaatacctctttctgctattttcattaaagcattcaccactatccaaaataatactgtttaattgatgtgtctgtttactgtcagtcaatgctccatgaggacatgtctctcttactgatcacatctccagaacctcaaatagttcctaatacccagtagataaaagatattttgtgaataaataactgagaaagtatgttgtttggagaggaagttactacctttgaaaagttaattacattgattaaatatagttgggtgataccttgacaattagcatataatatgaattgcatatgtttattttccaaaacatttaaaactgtttctttctgctcactcttttgaaagagcgctaataaagtcagggctatcactggcacttaaatattttcatgataaaagtcttgctctgctacctcagatggcacccctaacctgaagcaggccttttgccatgtctgtctgctaaaaataaagtggacacaaatgtgataactccagctggaagtgccaggttgctgattgctggtatctggccctcatatctgtgaggaagggaaaggtgatagagctagcagcccagagagacgtaggaatgtatctgccagtaaccacagagattaacctatcagccattttcatttgggtttaaaatacttttctcttaattgcaactgacatttgctgccccgaaataattaattcatccatacatttaataaatatgtattaagggcttactctgtgacaagctatatgttaggttctggtgatacaaaaatgataaagacctagtccttgcccttgcaaagtctgtagtctagcaggacggagaactaaaagaactactaccattacttacagttgtgatatggactatgtatgaaatgaaaagaaataaagggaaaagaaacaggagttttgaactgatggtagagaagaaaaaatatctgagggcatgaggaccttgggtgaggagtacagccctagaggagatgtaccacttgggccctggaaagtagaaaaatatcagcaccacacttaaacacacacatgcacatgcacatgaaacaagaagcatgccagaagcagtggctcaggcctataatcccagcactttagaaggccaaggtgggcggatcacgaggtcaggagttcgagaccagcctggccaacatggtgaaaccctgtctctattaaaaacacaaaaaataactcggtgtggtggtgagtgcctataatcccagctatgagggaggctgaggcaagagaatcattcaaacccaggaggcagaagttgcagtgagccgagatagtgccattgcactccaggctgggtgacagggtgagactccacctcaaaacaaaacaaaacaagaagcaaaaagcaaaaacaaaacaaggagagaggcatgcagaaagggaaacactagtgctaaaagacgaacttcaccttgccagtcccaccaagggcctcggtagtggaacagctaaagggaacactgacaccctttcagcattgtcccaggcctggagtgaactagaaagagcatcacctttggagagaacacccaaactgcatgtccaatgaccacagagctaggtgagttcaagatcatactgttgatggtttgtgtttctgtttacttcattcatttattcaatggagacttaccaaataactctcatagacccatacttgctgattcctaccattttcaaggccttttctaggtactttgaacaatcttacttaataacctcaagaaatagggtctaggccaggcacagtggctcacacctataatcccagcactttggaaggccaaggtgggtggaccacctgaggtcaagagtttgagacctgcctggccaacatggtgaaaccccatctctactgaaaaaaaaaaaaaaaaaaaattgcctggcgtggtggtgcatgcctgtaatcccagctactcaggaggctgaggcagcagaatcacttgaacctgggaggcaaaggcttcagtgagccgagatcatgccactgcactccaggctgggtgacagaatgagaccctgttgaaagaaagaaaagagacaaaagagagaaaagagagacagagagtgagagagcaaaagctctatttgtatcactattttatagatgaggaaactaaggctcagagaagtgaaggagttttctaaaggtcacacagtaagtggtgatagaaccaggaaacagcaaggcagtgagattccagaactccctcacttaactgtggtgtgtgtattcatttcctaaggctgcagaagactcgggggcttaaaacaacagaaatgtattctctcacagttctgaaggccagaaacctaaaatcaaggtgtcgggagtctcacactctaaggctctaggggagattccttccttgcctcttccagtttctggcggctttcctagcttgtagctcaacaactaccacctctatctctctttatatgggcttctcctctgtgtctgtgtcttctcctcttctgtgtcttataaggacatttgtcattgaatttagggcccacccaaataattcaagatgatctcatcatgacatctttaagttaattacatctgcaaagaccctttatccaaataaggtcacatttatggttccaagggttaagacatggacctatcttttgaaggatcaccatgctacccagtgcagtgtgtatagagtgcacagtttaatgagtgttaattgtttaatcaaagttagctgtcactatgcacctgacactatgtgctaggaagacgaaattactaaagcatagccctggcccacaatgagcctactctacagcaagagagacagatgtgttaacaagacaggttacaataaaagcacgaagagggcacaggtgacgcacaagaaaagaaatgccaaattctgtgaaggtgggagtcaggaaagtgtgcacagaagaaacgccatgaattctcctataaagtggacaaggggtgggcaaggaagaggacattctaagaagaggaggtggcaaagacaaaagcacagagatgtaaaacaggcagaaccattcggggagctgtaaataatttagtgtggcttgacattgctgctcaagggcagggaggttaagagaaatcctggagaggtggcctgggaccagattaaagaggacgcttcattctaagctgaaggaagccagggcggttttaagcaaaaaagtaataatagatctgagtttccaaagaatcataggtaagcttccatgtggcagcacagacaagagagaatgagtgccagcccttgggtcactgcagcgtgtatggagttgaggggacaaattggagctacctacgaaggtggaactatcaaggtcccgttactgtcggaggggaagggagggctctaagttgatttccagactgagaaataactccctttttagaactcttggtttctataatgcttctccttccttgctcttcttgttcttttcttatctctctgataattttgtctcagatcctttatcatctgcaccttgcacctcccctggccatccctcaaatggtggtgcacccagggttctgcccttgacccacttctctcccctttccactgttcactctgagccatctcatccactctcatggtttcagctatcctgtccccgcaaataaggcttatagctacatgtccagcccaaatcattcactctacctccaggcccaaatccaagtgcttactagacatttccacctatatgacccacccatgttctaaattctatacattctcattgctgctgtcaccaaatctgtgacaaatctaattactcttgtcatcataatttttgtgactagcactaaaagggtcaacagtattcagtgctgcagaaggtcaagaacaacttgaaaagtccattggatttggcaccttggagaagtgagagatgaggaagtgcaaaaggcaatttcagactaccctttaaggagctgaactgtgaaaagaaggagacaaggagggagaatgagcatcaaggaaagctttcatgtttgtttaataagatgagagtgatttgagcatatttatgggccacagtgatagttgatattttgggtaagactattcttgacagtgggacactaacacatatattacaggccacttaacatgccggttctctaagttctcagtgcctgtggcgcacgcgtgcatacacacacacacacacacacacacacactctcacacacaccagttattatggcatccaaaaatcaccctcatacattcccaaacatcttctaagaatccctaaaagggaagataccagtagagaggaataagttgaaagttaagaaaaaaagaaaataactgatgaaccaagatcctaattctggagaagactagactaaagacacaaaagagggtttggcgtgagacaagggaaatgcaccatgtttgggctttgattcctacaggcattggttgaattcccaggatgtcacttcctttgagacacagtgtactacactgtctgttgactacactgtctgttgactagccccaaagccattcccactcctttccccccttgtcacctccaccagagagacttgcaacgtccacagagttgcccatgtgacattgtttgggctcatgaaatcaaggatgtggggaagacttcttctaatccaataccaacccacttcttcttccttcgttaagtatgagcatgatggatgactaacgctggagcagccaccttccaaccatgacaaaatgccaggcgaaccccagatgtcagtactgacatcactgagccagtgaaccacccccagcagcctctgtctctagactctttgttctgagacacccacagactcatttgtttaagctacggtgagcaaatcactacctaaaggtattggacaacatagttaacctctctgatctatagtttccttgtctctaaaataaagataaaatatgtgccttctaaattcaatgaaaacattaaatgagataaaatatataagatgactagctcatataaagtgactaactcagagtttgacaaaaaataaatgatcagtgtcagtctttctcatcataacctcaaaataacttacaataattagatcttctttgtccgtgtaaaatagaattatagcaataaacctttattgtactcagaaaggtagaataaaaataaccacctttaatgttactctcctgcatgctagacctttaaactacagaatcaaaatacaattttgaataaaatgtagatctaacagtaagacaaaaagaatcacagaagtctcagaaaggggactaaaaatatactctttgtatagaactcataattcagggagtttttttcagcaatatcaatgtgatgtaaaaattggctggcaatatttagtaaatttatgttttcttgtatctgtaacattttactacttcccacctagtaccacgaatattttcttcatgtaataattcacttttttttaacatattaacacttccaaatctatgagtgactctgattcaaacactattttattccgttatgtttttagaaaatgatcttgacttgtctttaatgcttatatcctatgtgtatcagtttgttgaaatcactttatgtctctgctttgaaaatcctgataagttctgatcaagtcaatatcagtaattgcatcaccaaagaggtggaacctactgagctgttgtttatccaccatgtctaaatggaagcaggttaacatccccaaatcttctatttctgttaataggaaaaattagaatccattttcctcaagtgatttaggacaagtctggtttttgagaatgcaagatggcatatactaagcaccaactgtctaccatgcactgggtacattgcgtcataaggcttgctaccctttataagctgggtgttatttttgttttcactttacagaaggagattttgaggctcagagagtctgaagagtccaactaaggtcacatggctgagaatgaatagagctcaagcccattgactccaaagtctgcattctctccttgtgctggtaccttcttttagacaccatcacgtccctggaaaatgtatgacaagtgatggctggtgtgttactttccagcaccaagtgcctgtatttctatgaatgtcgaagcaatttctgggcttcaattgttacaagcattaacactgctcctaaagaaaatcctagctccaatttttaaagacaggatgtgctggccaacaagaaacacatttcacagaagcaggtggaaagagccagccagacagagctacatcactacaaagtttccagtgccttagagagcactgcctacccatctttccccaaaatatagttcaagtagggaaaattggagagaagaaactgaactccaggtaattttgtcctggcttttttttcttactccctcatcgtatgcactgggaaaaagtcttaaagtcaagcatgtctgaattcagatttcagtcccactattgttgtagatgtgtgactttggccaacatacataaacgctctctgatttagtttccccatcaagaaagaagaaatactactacttccctcatgggattgcataagaattaaaatgctcattaacatcatgcctggttcaaaattgacatattatgttagtttttttcctctcacttttcctacctctatgtcttaatacccttcatccaagaaatgccataacattacagttttctcccaaagtattctgtcccgaggaatattatatcacagacaactaaaagcaaggtaacaatctaacagacaccagaaattagtgaagaagcgtagggtaaggcatgagtaacatgtagccatcttggtttcaagattatgttggatatgcaaatccatatgagccaagggaaggcaatagtctactcccagtgtcacacaccactgccagcccatctactctctccaaacccactgtcattaagcaagtgggggtagaggataggggaagagggccagaggatgaagccaaagaagagtagggccatcttcctatccccaattagattccaaaatgtggctctcagtacagaaaatgaaaagtgctattgaaagcatccattcccaaagaagcaatttattatttattttattttatttttgagacagagtctcgctctgtcactcaggctggagtgcagtggtgcaatctcggctcactgcaacctccatctcccaggttcaagcaattctcctacatcaacctcccaagtagctgtgattacaggtgtgcgtcaccacgcccaatttttgtatttttaatagacacggggtttcaccatgttggccagaatggtctcgaactccttacttagggtgatctgcctgcctccgcctccaaagtgctgggattacaggcatgagccaccgtgcctggcccccaaagaagcaatttagaaaggaaagaatcatagcaatagactccacagtaagaatatttttgcatgtcatctaaggaagaataagatccagaatgtgatgcacgttttagctaccatgctacaccctgatcaacatgtctatttccagatcctgaccctttactcagcatacccttttcttccccattcttggagcattaaagttggatcttgaatccttttgcctgctcctactgtaacttctacctttctattttccttcctaccttctgctcaagccattttcattagtcctaatgccaaggacaaaacagttgtcattgactctgtcattccctatcactactccttatttccctcacctaaagtgtctgtttgccacggtactgccctaaaatcttccatatattttatttcattttatcttcaaaatgtaaggtgtatagggcagaacacaaaatttatatctcataaactataaactgagtatcatgtagtataactaatgtgtttgtccacattttcaaagctcatcagaatggagactaaaactcagggatgtataattcttagttcagtgtcttatgatgcagaattgtataatagaaagcataggtttcaaaacaggtattcctgagatttgaattctagtcccattgctaatagtgggctgtgatatcctggattagttacttaacctttctaagctaaaatctgaaaacccagggaagatttcagacaatcagtagaaaaacctcctagaaataaatggaaatacatctagcttcagttcattatttggattcagatgggcatcttaaatccaggatctcagggagaataaaagcaattataacaaggcaaaataaaataggctctttatactcaggtggggaactgccaaaaagcacctcatacatttttaaacattctccattactattcgaaacagtctctgttacaagcacctagcagttctttccaggttagagattttctttaagggaccccgtgtggctgcagcaggcttccatactacttgtgagcctcagcttccctggtggggtgagaccaagactcccacctcacacttcagagccttcccccagattttcacctttcaaccatatgcccttcttgggtggtctccaatttagagttttttctacaatggtccatgctgcttttcgattctcattcttttcctgcatcatgatacactctcactcccttcaaactgctccacatggccttcagcttcacctgctgaatgttaggctggacacttcagtgaagcacttgccatgtatcacctcatttaatcctcgacaaccctgtaatcaacatattagtatccccattatacaggcaaggaaacaaacgttgagagtcagggattggtgacttgtcctgattctaacatttaggaagtgatgcccgaatccagcttggactctaaattctgattttttaatagccctactcagctagcccccgtgcttctttccaccataatataaagctcatttcctctttgggaaagcagagtgctaattaatgttcttactgattaattagcatatgcaaaaaagtgagcacatgctatttgacgaggtgctgaactgctgaactgtgtctgtgctgttgtcaaaagtcttcagaagaatgctgtccttccagcatcaaaaacttcttgaatacaaactttatccctgtaatgcaatcatccacaagagcacttaataagtgggttttattggaaataaactaacaacaaaaacttaagttaaaacagactgacaattacctgtctccgagaaggggagaacaaaatagaaggcttattgatcatccttcagacgattactatgagccttcagtgtggccaagctacatgtcttagatttactgcatcagttccactttcaaatgttttttgtcctattcccctgttgttgattaatagttgtccaactgtgtgtccccattctatgtttgtaaaatatggtcatggtacttaaaaataaacttctattaaaaaaacaaaacaaaacaaaaaaaaaacctggccttagttttgaggtgttttatctttgaaatttgtcccaaaggcttttttctctgagatttggggactctttttattggcctttatgcaaatctgttaagcccccaaacattcctctgcatggctgctgggaagtttgctgctggcactctctctccaggtagctcctgccaccacccattcagcatcgaacgcctggggctgagcctccaactttccaggatctccattactggatctttttctttcttcttttccctcttgctgcttaccttttagaaactattctttccaggtcaaaagtcagatatttacgctattttagaaaagcatctaaaagtcactgcccacctacctccttatttggcggagagaaagacatgatggaatatttgggtgtggtagcaatgaaggaaggagcaaggggaaagtgatgagaggaggtctcattacagtgacctagaagaattcactttactggtgtcagttctcctatttactcctggaaggcagtagccagtgggtcctctatggaactgtgctacacttaagcgctccaccatttcatacccttgttatgttctcttgtagttagactccagtattgcctgattataaatcatgtaatagatcactttcagtcagatgacatcccccacaatgccatctaacaagggagaaagtgaagggtagtaagatatatgagaccttaaccagtcattttcttgagagacaagagagtacacagcctttgaagctagcaaccaatgttaaaatcctggcttccacttaagagctgtagcattttggatatgttacttaacctctctgagcctcagtttccccatctgtaagataaagattaaataatatcacttaggtcgctaactggttaagagtattaaataagatagtacatacacagcactaagcgcctagcatatggggaacactctcaaagcccctaagatacatcagcgaaaaaaagagttcagtctctctgcatgctctgcaagttaccttatatttgtataatgatgttgtggatttgtaaaaggtaccagagagaagcaatcagctagtttaggcataactttttctaccagggagaaataatataggttgcacaacagcccacatgagaaaaaaatcatttttacctgttgtgctctcaaagtagatatgtacttattcatggtaattttaaaattcgctcttaaccatatcagaattctttcaaagcaaaattgtgccctcaaattgccactgttaaaataaaatataatttgctaaggacaatcatatttgaaaaaaagaaaaatctacctgaagcacaactcaacgggttctgccacagcagtctacattttccattttgcttatttttcccacttcccttagcatgggctatttgtgctagtgcctattttctaacatctgtacctgcacccacgtaaatggaagaatatgtttctcatatgatactggaatgtcttcacttaacacttttaacttgacctttcctagactgaagggaagctctgaagcagaagctagtcatctctgcctgctgccgacaggtggcggtaacggtcatgcaaggttcctttagtctcggctcagctgctccactgcggaggttgtcaactagccaggcagcatgcttgtggtgtctgtgctaggttttaaggtgtttacaaacattattaacccgaaagcatgtcttttaagtacaaaactaaaggcaggtttgaatgtggtgataaaaagtatgacaatgacaatagtagaaacccaaaatgatgaaaaatgataaacgtagcacttgtggtgaaactaactattctaagacgtgaatggctggctgcaaaggacagtgcatatgtactaagtgctgtatctaagtaatgaacaataatcagtaaagcaaggaaaataactgaataactgatagtatgtaaaaacaaaacaacccaaagcagaataaaacgcttttttctgcagttagggaataagccccagtgtcaagtggcaattagtcatatgacaattagcctaacattaacgcaggagaggctaggatttgttggagatttaaagcagtggttgtcaatcttaactgcactctagaatcacctggggagcttttaagactcccgaagcccaggccaataatcagaatcccgaggggtgggactcaggcatcagcagtgttgaaagctcttcaggtgattttaatgtgcacccaattgccttcaaatctaagcatggggaaaaatgtgttgctacaggttccacggattaaaatccatctggatgtgcagatcaatatgtgtgatgagcgttaataccttggcaagaattatttccctatgacatttgtatcttcaagtagagaaatcacctgccttgagggatttttctttttatagtcttgaaaacagtatgggggagaacacgtattgccaaagaataacagagtatgcctttcatatacctatttgaagaaaaggtatcccagagctacaagcgtcaacatcccttagtcatttcagtgagtccatttacaaacaagtggacacaaaaaccttttcaaaactataggagtttctagataccagcacctttccctcactttcatctttaacagattgctaagcatgcacggtggctcacgcctgtaatcccagcgctgtgggaggctgaggcaggtggatcacctgaggtaaggagtttgagaccaacctggtcaacatgctgaagccctgtctctactaaaaatacaaaaattagctgggtgtggtggcaggcgcctgtaatcccagctactcgggaggctgaggcaggagaatcacttgaacctgggaagtggaggttgcagtgagccgagatggcatcattgcactccagcctggctgacaagagcaaaactctgtctcaaagagagagagagaaaaaaaaaggattaattgctggcctatccacgctgtcaatgcaatctggttaccttccatcattaacaatcaagttttacaggaaaacaaatgcatggtttagtcctcagcacaaaccctcaggcccttctccctgcagcccctttttaccttatctgccattatcatagaggagcccccgtggatgcccaggatgggggtgagagtctgtgctgaaatgaaatcgaggatctgggcgatggcttcctggtctgtgtcatcagcaaacaccaccccctggatcttccggtcagacatgagatcacagatgcgggtgatgatgctctttgggtcggtctcattcatggctaccagttccacccggggtaccacggagagatggtggaaatcatctttctcgtgggcatccttgatggccacctcgtcggaagtgcccacgaggatgacagcaatgccaatgctgggggggctcttctgagaacgagctctgctgcctgacacggccaggacggccaacaccaaccagaacttgggagaacagcactccgctctgggcttcatcttcaactcgtcgactccctgcaaacacaaagaaagagcatgttaaaataggatctacatcacgtaacctgtcttagaagaggctagatactgcaattcaaggaccttatctcctttcattgagcaccaaacccaactccatctaccagcctactctcttatctctggtatttgctctgcagaatgagagaaaatgaaactttcaaaagcctcagaaatccttgaacaaggcaataaaaggtgctattgctatagtcattggcagctacaggcagagacaaaggaggaaaagaggttgtgagtggtccaggtagccatgcgagtatgcatacacaaatctcctggccctcctgttacagcccacccttgtactgttcttgggctgaaggaaagcaaggccagacaaagtgagcagaaaaacgtgctcagcagaggtgagcaacagaacatgggctggataaactggatgtggggggctataagtacacaagccctgcattcttgctgccttcaccttatgtttgcctcaatgaggacaacagccagaaaattctttagtaaccttgttagtatctggctcttaatattaaactacaagaacaactgatacatgactagtagttttaaaacattgcctcaattgatccttacaatgacccagtagggaataaaataagaaaaacattattatcaccatttttataaatgttgacgccaaggctcagagaagctaagtgttctaagaccatgaaccaatcaattaagtgaaacaaacctgaacccagatcttctgacttttgtattccaatatgtgttctattacactacgtggaactgcctctcatataaccaattattataaggaacacatattactccaatctatttatacaccaaaatacagaaacttaaacaaataccattagcagctgaagtaatgttagagccacatttgaaaaatgttcctttttttttcctgatgccatcctatagtcgtgacttccctaaaatgactgataccgtattttcatataatttgccaccttttacctacaaagaactccttcctttttacttccacatatgaccctaaatcttattctatgcatcaaactaaggacataatgctctatagaatataagccttggccatctctctctatgcttctcattattctccaagagctcctcttattttaatataactagttctgcttatgtcgctttattttaaataatcagtgttcactattcaggtgatggctacactaaaaagcccagatttcaccactatacaatatatccatgtaacaaaagcacatatttactgcccgaatccataaaaaattaaaaagaatcatttattgtacatcttttatatgctgcacactgtgttagacatttcctcatatataatctctctgatcttcatggacactctataaattagacattttattcccatttctcaaatagaaaaacagaagctcaacacagttatgtaattatccaaggtcaatggcattataacaccagcatgccaatacataaacacagcattttaatactccaaggcaatactctacaaactgcaaccagaaccaaaaccagattctcattcttctacaaagagagagagcatacaatcaaggttgaaaatgctgcttcagatctcctgcttgtttcaaaaaaaaaaaaaatggtgagagattaaaaatctaaaagtgttgagagattagctaatcatgacagtattgaataaagaaagataaggaagtgttcgagttgagcagtcagtcttgactgcaaagggcattaatgatttgggagcaagatgctggggacattttgtggctgaagaagcacaaaatccaatccagttcttggcagaaaacattttggaacttttactggtatagtcatccttcaacactgccaagaaggagacctgtattgattgccttgtctctctctcacaaataagatgagtagctcagtggttcatgcctgagcaaagtttactcctgacagttttctgatctcagtgtctctgtgaaaacagagaatgactccatgagccctggaaacctttgctgatgggctgtacacaatttagcaggagaaacagggcctgaattcctcctcccagaacttaaaggaaagaaacactagataggcaattgagtagtactgatattcagaggaagacagaaggagtttgacaccacaaagagctgtggacaaagtacacacacacacacacacacacacagttcaattccaatgactggttctcaaggaaagccaaaagatttaccatttggcaaaactataagctaacttcattccaatggtattctaatcctacagttacaagtcactaaattagtttccttcacgtttaaaagtggcccactctgccgtgacagtttaactttaatgcactccactctcccactttgatgttttatttgctctctctaaagtatctcttgtgttcctttatcttgtctcacacaatatattatatttggctatgcagtggctagttgtgacacccaaagaatagcatctggttttacagagcatctcatttatactcaggatacagcaaagcactttacaaagcaatacattatgggagataacagtagcagaggggctgtgagacaaagaggctactttgaatacaaactcaatttccaacattaaaaggggattcattgagggaaagcatgtagtccaagataagcagagtggctttgctcccttcctcacagagaccataagtcttgatgcacctgctctaggaagtcttgctctccctgtagaattgagcattgcttcctttgggctctcaccatagcctgcatgtatctatctaaatacacataaacttttattaccaatatatgatgatgtgtccacctactttaactagttgataacctccttgtgagcagggactttttcaattcagtaattattgagcacttataacctagagaacttttttctttttctttttttttctttttttttttttttttggtggggaggatgcaacagatacagattctatccttcaggaccatggtctagcagaagatacagacatagacccataaggaaaatgttttcctcacttttattcatattcttgagctctaacagtgcctcatatgcaataaggaaggactcaataaatggtggccaatactgagtttctaccattaggttgaaccatataaaattgttaatatttgaccatttttgacctgctagtcaaatagttcaacctgctgggtaccagatattattattgccaggtaaatttcatgcattattagatactcacaaaaacattgtaagtcatactttccttttattacaaatgagaaaactgagggttaagtacatgaccaagattacacagctaataagggatgacatcaattttcaaacccaagtttgtctggctccaaagcccttgctctttcccttctggggcctctcagtataatatgagtgttgagtgaatgaatgaatgaatgaatgaaatccccaaccaaaaccaactgacgttttaataccagttctgtgttaacacagtgcctgaggatgggcgagtcacctaattaccatctctatgctatcatcggtgaaaccaggataatatacctaacctacatacctgaaagatttttgtgaagatcaaatgaaaatatgtatatggaagtgctttgaataatctaaaatactccacagatccaaaggatattacgtttaagcttctatagaagctgttcaaggagcctagctatttatgatagcacaaagtgagtgtgtgggaggtgagggtgaaagaatggcagacagaggctgaaaggaatgttaagaggaaccgcgcatggggcaaaagatgttagttccctgagcgatataactccctgaagatgtcccataatggcctcggggtagcagcgacctccactgacagcttactagtcatgtagatgaattcaataatcactcaggccagggccagtattgggaatcagtggagctcagcatatcgaaatcatgccatgaattcagaaaccagggtgcaccagaaggaccagcaacaaagcagcaggattagagagttgactgttcactcatttggctctttgcctccttgaagcttgggctaagtgatcccgagatccatagcaaacagaaggccacaggagcttatcttcatgctggtaactggtacagggtaactatagcaggaaacagtctacactttgctcagagcaggctcagagcaggctcaaagggaagatacatctgggtgagaagccaggccaaccctgtccttagaaaactgagtcctggggcaaccacaactggaagaataaaatgtgacttaatcaataattaagtcaaaaatattccaagcaccatcccttaatgcagtcaggacattatttggagtgattcaattaaggagactatgactggaatatgacaggcagtgagtgaagttaagattaagatgccagaactatgtatcaggtccagttttccaagctaccaataaagacagaaagttaagagacataggcttaaaatatgtcacattagagagtggggaaacaataattctcatacaatggaagtcaagaagagtataaacgagtataacctttttggaggtcaaagtggtagtatctatcgaaattttaatatcaagacaaaataaaattcaaaggcaaaaaatatcaaaagggacattaagtggtataacatataggtaccaggaagaagcaatcattatgaacacatatgaggctaaaatatagacttttcatgtataaggcaacaactaaaatttacatggggagaaacagacaaatccaactgacaaaagatcttattaactaagacataaaagatttttttaaagcatgagttataagttcgaactagttcagatacctagaaatgtatatagaacagagaatagatgttctttttaagtacatacatgaaaaatattaaatctacaaaaatacatcaatagattaaaaaaatcaatatgaaatcaattgtcatttttctataatgtgattaaattaaaagtactttttaaaggtactaaaaatactacatatccaaaatcttaaaaaaaaaaaacttgtgattaaataactataaggttaaaaaggaaatcataagggaaactaaaattcctttgaacagaataacaataaaaatactaaatgtcagaatttctagagcacaattaaagcatttacagagaaaaatacacttttaaatacatttataagaaaccaagaaaataaaatatgattaattataattaagttttcacttactgcattaaaaacttaacagtcaaccctaataaacaagaaaataacaaatgaatgaaacacaagacaaagaaaagcaaaaaacaaaactgatcttttaaaagacgtaaagtcctgacaagatgaatcaaaaaaaaaaaggagagaaaatgcgaatgaaagagaaaataacatatataatagaaattttgaaataatgaatattatgaaaactagttacttttccatttaatgtgtaatatataataaaaatggcaaatagggaaaggggctgaaaagaatgtagaacatttgaattaagttttagaaattttagaaattgttattaaagcccacacccctaatgtgacaaaactactccctaccctagtcctccacttcccacccaatcatcccaccagcccaccccacctctgccaaaataaaaagaagcaaaagtggtacagatggttttatagattaagtatatcaaacttttaagaaggaaacgagccttgctcatataagtggaacaaaaagaaaaagacggaaagcttgattctagattcagataattataagaaaagattattataaaccccttccacttatggacataaaggaaaaaaaaaaccttaaaaattagtggccaggcacggtggctcacacctgtaatcccagcactttgggaggccaaagtgagcagatcactaaaaatactaaaaatacaaaaaattaactgggtgtggtggcacgtgcctgtaatcccagctactctggaggctgaggcaggagaatcccttgaacaacggagtcagagcttgcagtgagctgagatcatgccactgtactccagcctggcaacagagcaaggctccgactcaaaaaaaaaaaaaaaatagtgctaactaaaacacagtatattttttaaatagtaatcatcatcaccatgatcaattgcggtttatatctgaaatgcaagaatggcttaacttcagaatatgtatcaaaataattcaccacattaaagaactaaatgagatatttacatgaatatctcagaaaaatgcagataacatacttgactaagggaaatatatatgatagaaatgttaaattgtgtttaaaacaaacaaataaaacatcactctttgataataggaaatcaagagatcgtcagcctttacctggtgggtacatccaataactgtaatctatgtaggaattaacaaaagtcttaacaagacctctacagcaaaaatttgaaaactttattaaaagatttgaaagaagacccaaacaatgtaaccatataccacattcatgaatgtgatatcatagtattttaagttctattttctatcatttcaagccaattcttatcaaaataatagtaagattttaaaagaaatgctataaatttattctaaaatgtataagaaaggataaaagtacccaaagaactattaaacacaatgtccttatctgaacctataatgaaactgtgctatgaactaagaagtatggttgactcaattctgcagaacagatccaaaataatttttaattaatacatttttaagaattgtaagttccaagtcaattaaagttttaagttataccttctaaatttaaatctagagaagcagggcaaatgttgaaccaaagaagtgatcttgactcagaatgcttagcttaggcaatacatgcattcatcaaccatctgaggtaggaaatgtgagtatcacagatgacaaacatctacttttcaatatcactattaagtagaagaccaatatctatttttgtcaaatggcatctatatattcagggcatttaaaaatccaatttcaatcctctaaatgcacttagtgtctgctaaactactaaatatcatccaagtctgtagaaataacacataaaaggcaccaatctttgatttgaattgacttggaacctacacttctgtgttctgttattttcctccctctcacactattaccatcatccgttactcttttcaagcttttgagctcccttgccctgctctttcttcagaaaggagcaaggtaagaaatcctgagagtctggggcatggaggcaggggctgagactgtgcccctgtgaaaccagtggagaaagaaatatctccctggacatgctagatacatgcccaattcatttgtcattgagtgacccacatgacaataaacagggatccttggtcctggagttggggaatttactcacctaaatatagtcctgcagagaattaaccccaaatggatttcaacatattacagccacataaataatggaaacagaaaatcaaaaccttcattaaagctgtttcttggaaaatatttgatcagagaagagcaggatagatgggagagagggaaaagacataggctttgattatccaaatctctgagccagcagatgaaccaacaagtcctcttacataatgcaggtaaggacgcccatcctaagccccccagctcctgtagacccttagaagaagatggccccatcactgccaaaagcaaaggtgatactggatctcttggcagcaatatttctgctacatctttcctggaacctctcccgagtaagagccttctcattcttcgttcaaccagacctgtcacctgggctccttcttgtccttacagcacttccagtggctcaagccaggtttttctatctgagctgttctttcctgctgtatgcacaaagcagaagtatcacttctactgtcacccatattcttgatacaaggtttgtacagataactaataaaggattataaatcactttacatgtgtgcattttaatagaaatttgtaatacaaacgtagatgattatcagtactctcaccagcagcaaacactcacgggtttttcttttttccttaatatgttgcaagagcagacatcaaaattgctcaaagttcctctcctaatatctgcacgcagttcttaattataattaatttataggcctccaaggacagtgtgggcactgctgaaatccaaaccttttgaaacctgattctgattattaccatttggcagcagattagggcaattgtgtgtattggtttaacagcaaaatagcattttcaagtgttaataaaaattattggcttgtcactatctattaagagggggacgggcagtgaaaatgagcagatgataaaaggagaagcacaggagcagggcagcaggaaaatctcaactgggaaggagtcaaaggaagatactggaaggactacagagagcagggaataggggacagaccaccaaacctataggcatctacccagaaaacagtggtgttctgagctacagatgaacagcctgcactagaggagatttaaaagtaggagttatataggtaaacgtctgccatagtagtttcctgcagagatcaacccatcaccttggtattaagcccagcatccattagctattcttcctgatgctctctctcccccactccctccccaccccacaggccccagtgtgtatttttcccccattcatgtatccacgtgttctcatcgttcagctcccatttataagtttacctatgtaacaaacctgcacatcctgcatatgtaccccagaacttaaaataaaagttgaagaaaaaaaataaaataaaatgggcgggccctgtggctcacgcctttagtaatcccagcactgtgagaggccaaggtgggtggatcacgaggtcaagagatcgagaccatcctggctaacatggtgaaaccctgtctctaataaaaatacaaaaattagccgggcatggtggcgagcgcctgtagtcccagctacttgggaggctgaggcaggagaatcgcttgaacccaggaggtggaggttgcagtgagctgagatgtcgccactgcactccagcctggtgacagagcaagactctgtctcaaaagaaataaaaagtaaaaaataaaatgaaatgtaggtgtcgaagaaggctatttccaagccccaacccccaaaacaatctgctctgtagcccagacatattccaagccaccgcatccctccacaaagcctcttttgcaataataatcatgttgttttgtaatggagagagcaaagctttagagttaatggactcacttttaacatttagtcttaatttgctgtgcgatctttacctctctaactgcaagtcctttatctgcaaaatgtgagataactactgccttcacagaatcactgtgaagatcgattcatttgataaatgtttgttgaacattttccatgggccagggaacctgctaggagacaggatccaacacagaatgggaatgggatcctatctccaagcagccattagactagtggccaagacaaataaacaggaaattacagtatcatgtgagagggctgtgacagagcatgcccagtgctacctaagagatcaggagagtaatgagctaaggacgaacagataagtaggaaatagtagtgaaaacggcagattgaaattacaaaagtaataaaatatcatttagaagatccttataatcttttgaagaaagcaaggccctaaagtcaaaaagagctagaattgaaacctggctttgacacttatcttgggcgggggaaggaagagagtaacttaaattacctagacctcattttcttctttataaaatgggaattattatcctcaccttacagagttgttgtgaatattaaacaatttacttgaaagcatctagcacaatgcagttacctgatatttattcattgaatgtgaatatattctgttcagaggcagacaaggagcttctgttgactccaattacttagaaaggagtcaaagaacttctgccctcccacctccttccctggctttagcacaatttctactgaccttagaaataggttgttttaaaaagtctgtaagtgacaatctcatgggtaatgtaaacaatacttaaattctaatcccagggagagccagcacctacttcctcactccctccctcctaccagccaccaaatagccaccaaattttatacaactatcatattactgacatcagaatagtcacacgtcagatttggaatcaatatcttcaatcacaaagagtactggaaaggagtatagaagtacaggaaaggcagaagtcacactcactgcttttgctagtaacaaggcttttcttgcaaaccctaatgaaatgaggcagggactatgtcttatttatctatctccagtacttggcaaagcatgtggcataatggtaggtgcacaatgaacatttgttaatgacattaatgaatgaaccagaccaataatgagttgcaactctctaactccactgatcagaaacaaaggcactgttctaggtctttcatttctcaagggttattataacagaagggcaatacaataaacgccaatatcatttccaacttcttgatatatagggatcatttctaggtcaatgttgttagttggtaattgcctatgtatctggatgtatatttgtatgtgtaaatcaatgtttatatgagagttgcatgtgtgtgagctcaaattagccctctttcccttggtctctgagctataggatggttctgctgatggaacatggcacccaagtatgactcagacttcacctcagagccaaggtttaaaacaagcttttgagactatacctcaaagagagccctgtagctaggccagtgtcaatagggaacaaaagctgcattatttcagcttcctggttatcaggccaactataggtgcaatcacacatttcctaatataaatttccatcattattcctaccagtgtacatagttagccacacaactaagcataaccgaattgtgaacttgttaaaatccctctaacattacctgtgtaactgagcacctattcgaagcatttattataagttgaagctttactctttagttgttcttgccttcctcctctctctcctttctcccaaattataggatgggtagaataatggggtaggaggcacacagactgaggaaattgttaggccttgttacagttctaccactgacaagcctgtggctctatttcctgatctctgaaataagagaaatgaactggttcttgaagtctcttccagctttaaaattctgtgaattctggtcttccactcaccacttaagatctactctcaggccaggcgcagtggctcacacccataatcccagcattttgggaggcggaagcaggcggatcacttgaggtcaggagattgagaccatccaggctaacatggtgaaactgcgtctctactaaaaatacaaaaaattagctgggggtagtggcacacacctgtagtcccagctactcaggaggctgaggcaggagaattgcttgaacctgggaggcggaggttccaatgagccgagatcgcaccactgcactccagcctgggtgacagagcaagactctgtctcaaaaaaaaaaaaaaaaaaaaaaaaatctactgtctactccgctctgcgctaagccctgggaagcagacctgtttggactatatggtaaacttcccagtcgtccggtttccaggtgggtttcgccaatagacaacacaatcaggagatgagtaggaacaagaccaagacagggctatcgactcccccgacccacttccctttctgccactcactgtgggctggttgtatcacttgactgaaggtcacagcttccgctaagcaatcctctcctcatgactggctccatacagcctacttccagacttcagaaattgctcccaccttcctccttcggggccacgggtggtggtagctacacccagctgctactagctccaggatgccagttcatttcttgtggtttctgtgcactgtccacaccttggtaaatagccctttgactgaactatcttcaaattaaacaaattgagtgcggcttctgtgttctgctgtgactataaatgatacagattcctcctgagttccacaataatacctatgaggctttctttgattcaaagtggcgaaagcaagacctgaattctgccaccaccactccaccactgagtcgagtatggcctctcctgatgctactccctgcttatcctcaggccctgctgagcagcatcgtaagcagcaatggtctccaggtgcctggtcctcagcaaagaacagataaacagctgaagactatttcaagagaacaaccgtcgggagccagcattttgagaatgagaaatgtaaaagcactgggagtcagaaaaatatagcaagcaattattagaatgactacaaaataaaattcagagaaaggcagtgcattttcactcagggaaaatgtggtcattaaatgggactttgctgaagaaacaaattggttaatgaagccctaactttttattcttctctttgatttggtcggaatctgattcatgaaaaaattgagttttagaatcaatttttactgactatacaaattagaaaccaaagtataaggaaatacaatcatgcgtggcttaatgacagagctatgtcctaagaaatgcatcattaggcgacttcatcatggtgcaaacactatggagtgtatttacacaaagctcgatggtacagctattgcacacctaggccatatgggatagcctattactcctaggctacaaatctgtacagcatgttactgtactggatactgtaggcagttgtaacacagtggtaaggatttttgcatctaaatacatctaacatagaagatgtgcagtaacgatacagtattatgatcttacagaaccactgtcattatagggcacatgaccgtataacaacacaagaaaataaaaaggtgatattgcaaagaaatatataacgttaactttgtggtttttcttaatatgcagaaaagaaattagaattagtaaaaaaaaaaaaaaatgagaactgtttgtgaatcttttcctgtaacagtaataatatagttgcaatttggtcacccttcacatttcatagtgtttttgaaagcaagtagctgctctctctgaatccagcctcttgaccctgctagaatagcacatatatcaggcctgagtgaccatgtccaccatcgccataggaatggcaagggggacaggccggtacagtcagtgcctccttgtccatgccccactgaggccaaatggagctcctccctgacatgccggacacagctgcaggccaggccagaatccatgggcagaattctccaaaatcagataaagggagtacaatcaggatgtctgcaactctcccaccttaaattaaatgttgaaagctgaaaacttgacttacgacttcacacaccagcttctatccctctgtcctcaaaagtccaatgaaccaacatgtccttattgtgtgtccatctgtgagtcactgtaaagtgtgataaggagtcagaattcagccacaaggacctgacacccctgcacagaaaagcacacacactccccaacacaggactgtcagggccgcagagagggctaaggcagtataaagacaagggcacagggactgccctggccttgggtcctggagatgcctttattaggaagcagcttttgagctggactaaagagcaccgagggtatctgaggaaaggagccaaaatacaaaaatgaggctgccttaagtcagaaaacaagtgaggcacaaaacatattggggaatgagaacagcgtggcctggccaggagcaagagcccacggaaggaatgtttggagaaaagctgaaaaggcaagccaaggaattggggatgctcagctggcgctcggacttaacgctagagatgcaaccaaaaacaatggaagatcgggaggaagaggaacagatctcccatcgctaaatccattttatcctcagcttcctaggtgactgaaaccgcagctgcctctgagagctgtttaggaaatcagctaggctggcttattacagcatggaaattccttccctgcctcccaaaaacagcaaataagctgtcactgttgagaagtgaagaccccagtttataatgattaagaaactgaagtgcttaaaaataacattcaatgaagcgttttcaattgaaataatattcatggaaacagttttcttctctacacgaaaacttccctctgctcacatgaacctaagtacaatgaccctgggctactgcctgcaactgccctgtgtacagacgcctctcttcactcatctctagcccaagtcttccttcagctcttgccttcctgtttactgtgttcactctcatgctgtgcaaaggttgttccacagcctatttgagacctcgcatctggaggcagctttgtttcagttttcaaattctcttgccttgctttggctgacaaaggggtataaggttgtgtgtgtgtgtgtgtgtgcgcgtgcgcgcacgcatgtgcgcaggtgtgcatgcacatgtgcacacgagagtatgtataaaaaagataactttatttctattcattttgcctctcctactccatcctctttgttctattcctcaccttgtgtcttaaatctgtcttctctattcttaaaatatgttcatgaacaactccacttgccgctttttttctgctgttctaattttccctggttgtcctttacaagatttgtcacctgtttcttcccccattgcaccatccacctcaacacttaatctctccacatttccgtggcccactagcacctggcggtctccttcggcacctcttcctctactctcttcccttgcctgggccattctctcttgttcttcatcctgtctcttcagcgggtttcatttctagaccaggatataaccatgacccaccaatcccctgtcccccaactgagtcagtgactcaaaagttactcttccttaactagaagaaaggcctggtttcacacttttatccatctgcctagttgcctggcctcactgcaaggttgacccatctaaaacattttcacaagctcttcgcatgcccttgtcattttcgtttgtctaatatatattcaggcctaagtcaaaccctgctattttctctactttagcaccgaattctttcttcatcacccgatgcaatatcctaatattttccaacaaccatcttttctctggcttctcctctcattctacatcaaaatatctccattagaatcattttctcctgcttgccatactacactttccttcctctaaaacctgacatcttctctcctattctcctcttccctcaagaatctacatagagagatagtgatgtggcttgacaggaacatacctgattcagtctgagctctgcagagtttaatgagggaatcactaagcctttacctctgcacctcattaatcatctacaccttaaaatttactcattcttctatcatcctgtgcatatattcattcctacaccaactctctaaactgccatctgtcacctcaccgcagagtcaatatgagtctttcttacacaaatctcccggagatagatgaagaaataacgcagagataaactagtgacataagatacaaacatagtatatgtctcatttgccaagaggaagggacacagttcctgacctagaatgctcttgaagggtaggagattctgagtttatcaggagagctttcccaagagatctgtcctttggacaaaatggaactctggcagaggactagtgaagtgctcggaagctctctggaatttgtctggataaacggaaggcaccaaagcaggaattccccgtcaatcaagaggaggaaagagaagccaagtaagccataacaaacaaataaaaatttttttttcaaaattggcaaatatgatctattttttaaagaggcattgagaaatagtggaaaatccctggattcgagaaagatttactatgtgaccttaagcacatcatttagcctctctgaacctcagagaggctcatctctaaaatataagcaacaatgcctctttcacagcgttgtgagacttacgtgagaaaatgggtatgaaagcagtttaaaagttgaaagatactatgcaaatgtggaagcttgttattactaaatgggcctgacaaagacattattcatttatgtatacatcagtatgtaaattttaatttatgaaaatcttttaagatccagtttactgaggtacaatttgcatacattaaaattcacgcttttaagtttacagttctataggtttttgacaaatatatacagtatataaccaccaccataaccaagatataaaatatttccatcaccccaaatatttccgtgttcctttataatcaatcccttagccctctcctgtgtgtgacaatcactgatgtgatttctataatttgcttctcccagacatcctgtaaatggaataatactgcatgcagccttttgtgtctgactttcttcacctgacataatagctttggaaattcctcaatattgttgtgtgtatcagaacttcatcctttttattgctgagtaatattcctttgtatagatttatcacaatatgtttattgattcactgttgatggacattaaggggtgttaccacttttggtgatcatgaataaagctgctataatgttcacatatggtctgtagtgtggatatatgtttttgcttttcttaagtaggtacctgacagtgggattgctaaattattggttagagtactttaacatttatatttaattgccaaacttttccaaagtgactatcccattttgcattcccaccagcagtttctccacattcttaccattcctaccaacctattctttccaaagtcttgtgaatgttctttttttccttccttcttacctgcctttggtccttctttctttttgttaaatttcattcattttacttggtgttcagtggtagctcattgtagttttgagtcgaatctcctgccaactaatgatgtgaaaatttttttcaatgtttatttaccatcttatctcttctttagtagtgcttgttcacatcttctgtccactttgcaattgagttttcttgctattgagttgtgagagttctacacatattctagatatgtcctttatataaaatatgtattttataaatattttctcccattttgtggctgatcattttcttaacagtgcctttcaaaaaaagaagtttttgtttttatgaagtccagtgtaattaattttttcttttatagctcatacattttgtatatctagaaagtctttgcctaaacaaaggatataaagattttctcctgttttcctctaaaagatttttaatttcaagagttgtataattatagttctatgatacattttcagtttattaatcactttacatggcacaagctatgagtcgaggttcatttagggctgtatgtatgttttgcatatggatgtacaattgtttcagcatcattttctggaaagactgcccttcctccaccaccttgacacatttgtcaaaaatctacttgtggactcttttatgctattaccacactgtcttgactactgtgcttttgagtcttacagacaggcagtgtatgtcctgcaactttttaattccagaattgttttgcctttttggttttgccatgtaaattttagaatcagctgttaattcctacaaaaaaaaaatcctactgggagtttgactgtgtttttgttgaatctacaaaaatttaagaaacgtagacaccttaacaatattgagtcagatattttataaaatttatacctaagaatatcatgtttttgatgttactacaaatttcttaaatttcaatttctaattgttcattgataatatatatacaattaatttttgtatgaccatgtatcctgtgaccttactaaacatttattttagtagtttttgtgtgtgtgtattttttgctgctttctacatagacagtcatgttgcctgggagtaatgataattttttttctccttcctcttctttttctagtccaataacactggctaggacctccaataaaaatttttatagaactagtaacagagaacatccttatcttcttccttatcttaggggtagcatattcagtttttcagcattaaataggatattacctgtagggttttcatacctttgtcaagctgaggaagttcctttccgtttccagtttgatgaaattttttaaatcatgaatatgtgtgtgtatatatatacatatttttgtctttttcctttacaagaaatatttctttccactcttgcttcaagattcattctatgaacttggctgctcaaaaagtagagacttaagaagggagttgtgcacttaaattagcacatgtagtggttattttggttagagtttgagagattgagtgaaggatcacagaaagtaagaaacctcccaaagaggttatagctattcgtgtagaagataatcaggccataaaaaaatgctgcagacaagataatagatttgaaactgatgaggggtaaaacacagtaagatgtgaaaaaagttggagaggaaaattgtgcaaaagtgttccctacaccaaaatttgggagaagttagtggtgggaaacaatgtagaaaataagttctgtgtattttatatcaatttccagattttagcagtagtacataaaaatgcagaagttcctatagacaatgaaagacaaatattaaaccacaaaaaagagcagttagggtgaaaaatctgacttaagtgtcaactaaatgaagacattacaagaatgaaatctatctctaaattgagagtgcaagtatacattcctaagagatcttcctcactagccgggtgtggttagaagccctctaagaggaaccttttctccccgttaatgtgaaagatttcactctttcatctttcatgtccacttcatcctccatataaatgttcttcccctgtgttcttccctcactgcccctgcctataatccaaatcctggtccctctgtcactcaacccagtgctaccagcaatcaggtctgagaagcactggtaacaagatctacaggagcgcttaacaaggcttttatgtattggtttaggaatctaccaagcttcctaaaagaagtagtattctgaagttttaaataggagtctcataaactgactttcagaatacaacttgttcattagacaaagtattcatgcacagaaggaaataaaggtggtaacggtatatagcttagttgagagcacatatctaatgcagtgtttctcaaaataaaatctgcaagcaacctgcatcagaaacacctgagcacttggcaaaattggccaatatttaggcctgatcccaggccaggtgatgtggaacacctggagataaatttggaaatctacattttccacaagcgccccagatgacactgttgtgcactaaagagaagccctgattagaagagtgcaaaaaagccaattgtcccccaacccaatgcaccaagtacacacaagtctcagagcagtgtttttccaaatatgctcataactagcattttttaagggaatgaaatagaccagatcagttcacaccgtgttgtaaaggcaaagattattttcagtttaatatttaccggtgtatgtactggtttgatgttcaatgtatttcttaattggaaatgttttaaaagccatggttcatatagttcatacagaaattgcctccaaagaagcatcctatacatcatctgctcccacagttccatatcaccccacatgctctggctttgagctagggctgggtgcttgaccaagctcaaccaattaggaaaattggaacataaatgcctagaagctaaataagttagctgtgggcaatggacttttgaggccgactaaactgctgggttgagactatcatttggggtgatggattttgaacagaggagtattgatgaacaagcaggaagggccaggtggcaaagagaaacagaaatggcaccatctgagaagcaaagaatgagaagcagaaccgagttcccgcagccagcagggaaaggagacaaggagagcagctgcctggttcctgcagcctgcccaatactcacccaccaccctccccagttcctcttgagggccatactccttcctctataataaacctcctaatgcaagccagctccgggggtatcagtgtttcttaaccacatgtttagagtatgatgcttctacaatagaggttcacagaataaaccctcacccataaacacttatacagtactcatgtcacatgcacactccaagtgctttatatatagtaattcacttaatcttcacacaaccctatggggtagatgttattattagccctattagccccatttaacagacgaataaactgaagtacagaaaattcaagtaactaacccaaggttacatggctactaaatggaggagctaggatacaaaccgaggcagttatctctaatgcgcatgctcttaatcactaccctatatatcctctcagatgttaacataggaaaacaaattagatttcaagccaaaaattattacaaaaataagctgcaatgctttggagaaaccgttcaatgatacaggagaaacaaagacacaaatttttttaaaaagcacagatgtgaataaggggcttcttaaaactttttaataatttgtagtatttatacaggcaagtacaatcatataaatacatacattataaatgtacatgcagctcagtgaatttctattttaaaacccaccattcatatttttcaatacttttgtaattaggaagtgtagtaaaatcttcacaggaaaaaaaagttttctctatcctcaaaactgaaaaaaacccaaaagactaatacgtaggcatgggattacaaggcacagaattcaacagaactcatacaaaaggatcggcaaaagatagcatgaatggaagtagaaaaataaataaataaaaagaaatctaaacttctaacagaatgaatcaattcttagtcaaagtgacctgcttttagaatgctttggggatttatttcagtcttacttatacttacccactcatctaggacaagtaataattatggaaagtgagtaatgaagactgatggtttgtggatctcatgtattttatttctttggagcaatctcgaaaagaagagagggacaactgatgcctccatgggtgagtagctcttaggcatttacttctgaagcttgctttgcagccaggtattacatttacatagtgcttgccctctaaaatgggaagaaaactgtgtcatgtcctcaaatatatggtgacaatggctctatcttagtggctgtggacttagccccaggactgacgcagtgcacagtccaccttcagccacttctacaagcctgttggctcctctgtcctaattccaagtcagttgagcaaacaataaaacagctgaattggtatcagaaagagaaggcagagaaatgagaaagggaaagagaatgagtggaatggacagaatgtaaaaagaaacaattttgtttaacccaaaaaaatcaatatacggccatgtattgcttaacaacggggacacgccctgagaaatgtgttgttaagcaatttcatcattgtgtgaacatcacagagtgcacttccacaagccaagttggtatagcttactacacacctaggctctgtggtatagtctattgctcctcggctacgaacctgtatagcctgttactgtgctgaataccgtaggcacttgtaacacgatggtaagtatttgtatatctaaacacttctaaacattaaaaaggtgcagtataaatacagcataaaagataaaaaaaaaaaaataggccaggtgtggtggctcacaactgtaatcccagcactttgggagactgaggtgcgtggatcactggaggtcaggagttcaagaccagcctggccaatgtggtgaaaacccgtctctactaaaaatacaaaaattagccgggtgtggtggtgcactcctgtgatcccagctactcgggaggctgaggcaggagaatcacttgaactcgggaggtggaggttgtagagagccgagatcgcaccactgcattccagcctgggagagggagcaagactccatctcaaaaaaaaaaagaaatatcatatacagtataaaagattttttaaaacggtataaaagataaaaaaaaaaaaatggtatagggcacttaccacgaatggagcctgcagggactgaaagttgctctgagtgagtcagggagtgaatgtgaaggcctgggacattactgtacactactatagacttcataaacattgaatacttaggatacactaagtttatttttaagagtttcttcagtaataaattagcttactataacttttttactttataaacttctaaaattgcttaacttctgtctcttttgtaagacagctatagaaaatattttctttctgtatatcctcattctataagcttttttctattttaaaaattatttgttttggcttttagattttttgtcaataactgagacacaaacatatacattaggctagttctacacagaatcaaaatcattaagacgtcactaggcaataggaatttcttagctccattatcatcttatgggaccaccgtcaaatatgtggtccattgtacacgtggtccatcattgaccaaaacatcattatgcagcagcacacaattgtacattacatatctaggcacataaaacaattttgccatctactgattaagcttgagataggacatataaaatgcttttatatctgagtctactgaagaaattttaagtaagcacaatataattacccagcttaataacagttagtgcttcatctgccaactattttataacctttacctaattaattttcacaaaacctctgcaaggtatgcatgtattaaatacccattttgtaaatggacaaatcacgagcaagaggttaagtgactaccttaaaatgaataaaaaggctagcatgtggaatcagaaggtgaactgtagtaaaatatttctgttccccaagaccatgccaaactcattttcccccgaaactatcatgctgtcaacctcctggcattatggaatggcagcaaggatggattttcgcactggcaaaattggcatacacctgtctttcattcaaatgacaaaaagcagtacaattttcacaagtagatctgagcccaggaagctaacacgctcaatggtaacagatacagagatgtacaatcagggaaacaatcctccccttcagtgaccgtcattctccagccttgctgctcagaggatttcatcttgcctagacttctaagaaaagcctgatcaaaacaataggctggcaccctccagttagtgaggatcgaaactgtcttcctgctctaattttgtcctccctgtactgagaggatgtgagtccctgctgtccacaagacgtcagccttcctttcagcccctgctgggctgaccctgactatatggctggcctatctcgtttcatggacaataaacattcaggacgttgtttcaacacagatgaagaatgggtgtcctttcctggatgttttgccactccttacaaaatcactgccccctccagtaattttctcttgccctatctctctgttctttttggttttaacatcctgtgaagtctgcccacctatctaccgcctctagtaagcaaactacatcagggattcctcaaatctaaatctcttactgattgctctataggttctgaaagccatattggggatctgtaagctgcagagcctaaacagcatctcaaaatctgatcgtttgcggaggactggaggacaggtaccaccactaccccatgcgcccagtggcagcactagaatttctattcaggagaggttcagtggcagcaatctggttggagaagaaaaccaggggacttggtatagagtagcatttccatagctcacactatttttacttagtgtatatatttcttgagaagaaggggtgcttcacgaaggcttgttgacagtatgggattatatgtttctcccacgacaccccttgtcttattgctgtcccttgaaccagcttaggcacttagatctctaggattgaacatggaagggcccatgaaattaaattcctggtctgcagtctggaaacagtgtgattcctgctcagcttcagagaaggcagagtcctttgagcaccatgcagactttccaccctgggagacaggtagtgccctgggtatcacaactttgaggctgcaaagtccagtgggcccggaacccatctgagcaggtttcctctgcagatgaggcctcttaaggcaatggcttttccaatcttacacattagccaagccagccaatctccgctccctatcagtattagtgatgcagagccaccttcagctgattgccatctttcatcttctgaaatgtgatttttaaatatgttacgtatttcatttgtgcaatgccctggatactggattggaacacaattgcagcagattacactatttattttacatacttgaagacagagcctcttgaactcaatatgcaaatgcatgtgaataatatgcaaatctgtgttttctgccaagactctggcatttttcttttaatgggactgtgattcctattcaagaaggaagaacatcttccttgcatccccctgcaccaatgttctccccctcctcccttcaaggtcctgaccagcttgtaacttcactaagtttcaaagccctgaaaaaattacaggctccactgaattccatttaaacctataatggtcattgtaaggcattgtttagtgcatatctatagatgtgccaccaatgcaatgaggttcacaccatctaactgccaatttggaattttattcttaacctcatggttaagactgtcagcagtctgcttaataagtctaaatttaaatgttctcacctactgtacaaatgtggccacacaacctttctaatgaaaaaaaaaatgcagtttacaaagctttttaaagtgaaatttaccatggtgctggcaaaaggtgtcagactggcaactgcaaaattgaatcctctatttagccttagaatggtgaattataggtatcttacaaatgctgcctgcaccatcaccattatgatcaccatcgtcaacaccaaagccacaaaaagcccaagaggtgctcagacccagaagaagctactgaagaagccaatcaaattcaaaaattatttacctactatgtaaaaggcactcttctaagttgtcttaaatataaacataagacaagccttgccctttagaagcatacatctaataaaaatgatggcaataactaatattgccttagcacttcttttacaccaggcaccatgctccatcactcagcctgggacatgtcatttgatcctcatgacaatcatacttgcccaggattctacagttaataaatgacggaggctaaattcaaagaaaccaccctagtgactcatgaataaataactgttgaagtgaaatgaattgaaatttcataggtgaaacacaaccgtcccaaagaaccaaggtgagatccttaaattaaaaccttctcataataggttttcattcagggccataatgacagaagggaagaaaaaaaccagaagtcccatctcccaatggccgagttctaatttgtattttatgcttatatgtcaaatccaatataatgtccttacagttttccagtcttggtccttttataaagaatattattttaaaaaaactatttcaaattctcataatgaaatatcacacaggctagatttatcctccctatgctgggagtggaataaatgagattccctaagtgatccagggggccagtgagcacccaagattcctggataccataagctgaaacagggcgcaggccagaatgaaactaaactcccattgtctctaatctccaacagcttgcttattccacttagctttgcagaagtggtggaggtgaggcagagactgccaccttagagaaagacacctctccttgtaaatacaaaacagtctcctaagctttgtggtatatgagaataacacgggggcctaaactaccaacaaaagtcccaagagctaactgcagcccacataaatcacatcgttcccttgaggactttgagagagtgaaggttatctacttagcctcctaggaagatataagatttaagaaactgtagagaatgaatcctataaagcttgttctaaacgtgaattcacctgactccctgaaagaacattctctttcatggaacaagtgggttcaaagcacagagtaagcagtcatcagggatgagaacctgaagtcagaactgaatgatgacctgaccaaaaccatccctgtgaccccttgagaatcatttagttagctctagattttgttcagtattcaaattgacttgcttagcattgatcaatgactagcacttggcccattatctaagtaaatttgattaaattgttttgaacagcctttgaattacatctaaacagccatattttagaatagtaaacatgctctatttcaccactgttatcaataaaatattcatagggcttacatacacattgatttctaatcatatggccaactactgaagaagcatgtgtttctatttttcctgtgctggtgaaaaatgatgcagaagacagatagtggaggggagggggtagcagaaaacattaaaaactaatacttccaaaaaaggttttaataaaatagaaaaatccttaaattgtcatatcaaaggaaaagaacatgaaaaattatgattccaaatcaaataatccacatacaaaagtaggaagaaatataccaaaatattggatgataaatgttcataaattatttgtttaatcattattaactaatgccaaatcagaaaaacttaagacttgagaccccacagtgacctggaaatctgtgaaaagatagacaaacgtgaatctcacttttatttaatagatatgtgcctcaaaagctaaacataaaactcaaatctataaatgtattccacagatatttgaaagccatctactcaaaagcacataacttactattttaaacaatgatttcgaagaactgatacaggaaaataaaatcagccaagaatgagcaaaaaagggaacttaaagtgactttttttaaaaaaaagaagggggcttgcatttatctgatttataaatggatgacacagaattatgttcacaactataataaagaatttaaaatatactgtagatatgagcagaaaattcacaaaagagaaaccacaatgaagaaacctggaaaattgtccgatattactcataattacagaaataaaaacacagcggtggagtgtaatttttacctaccaaatcataaagattttttatttagattttagaggggggtggccaaggacatggtgaaacacagcactctcacatattactacagtgaatataaattgatacaaaccattttagaaaagccatttggcattacagatcaagagctttaaaaatgtgcatacctttgaccccgtaattcaatttctgggaatctttcctaaagaaataatgtaaaatacaggcagaaaaagctttatataccaaaatgttcattgcaacatcatttataatagtgaaaaatggaaagtaattaaatggccgacagtaagaaggtggttaagtaaattgtgctatagctttatgacagaatgctaagtagcctaaaaaaattatgtttaccaagagatttcaataacatagaaaaatctgtatgctgtgatgcttaattttaaaaagagcaccaaaaaacggtgtgatttcatctattttaaaatgcatagaaaaatgctggaaggaaataacagaacattagcagcaattgtctttgttagaattcgagtgacttttttttctgtcaacttttctattttttttccaaatatcccacaatgaacttatgttatttttataatcagaaaaaattattaaagttatatgttaaacattgcttaagtatatataccagtcgatagacaaaggaagaataatacaactgaaatgagacagagaaacagattaatggagaatcaaccacttcctgtctccttttaggtaatgccactaaatttttaaggctgtgttgtaatttagcaattactagcatatgaaatatttactccattagttggataaaattaagtgcctaaatctgtctagggtcacatatttcccagtcttgactgaaaggaaccatacaatgaatcattttggaaagaatcatttctgtaaagtaagagtcatgatctaagtttgagttatcacatttatttaaagtgctgcaccctcatttgtgtgtatataaaggcatatgtactttgtgtaatttttgtgaatgtgtgcacattgtgtaaatatatatgcatgaatattagagcaactaagacttgaatggtttgattcagttcaacctcctccttcaacagatgaagaaactgaggtccaaagaaatcatgaggtcaaagaacttgctcaggatcacttggctggccagtggcaaagccggtctgagaggttttccactaatttatattgccacatttacacccagcattatgactgtaagaagctggaaaattgagataaagttgcagtaacatccaactcttaccctacgcaggaaataatcactttcactttaaccattttgtatgttccttcattaaagggacttgaaaaagcagttggaagtatgtggctgagcccttagatatgtatgtgactgtcctggtggtcactaatatctcaattagcagaataaactgaaagtagaggctaaagcacgtctgttttgttagtgttttaagatcaaaacaggtctttccaaagtttgaaaggctaagaatttcagaagttcttgagaaatgacagaaaagtgggttaataatgtaaacggaactctccagataataaatattttactgttcttgtacaacattaggctagctatccctgctttgcaattcttgcttgctgtgattagcatatgtaaagtttttcaaggtgacttattaagcttattatctaggactttagaaaaagttttggaatgtagatctttagatcttttcatgctatgtgagctcctctaacttcaagttctaatgaggtgtgtgttggctcttttttaagagtcctgtgcctattaatcatggtactatggtatgtggcagaggttaagtcatgacttaaaacactttgcagaataactaaactccctttatatctgataggcttttaccaaatacatgtgtgcatacgatagtatatcatatatatcctatattaatctatactatttcaacaaattcactatgcaaatattttctacatatactaactcaatgttgataacaaaatagaaaataaagtacacaaacagaggatcgcagtgtgatttcagaggagagattaggtttaacagaaggctctaccaacgaggaggctcctttaactggcaataaactcaaagctgagaacagcaggatcacaccaggggaaatgagtaatagtgaggaagatggggacaggagtgcagagctgacaaagcgaaggtgcaggatgagcttggctatgacaagtccacggaggattgtaattaaagatcaagacagccatttggaatagactcaagaagaggatagggtgtccactgaaaagagcaaagcgatgggttagtccttcagaaggtctgcagtattaccactggccagtgagggcatgcaaagcatccaaaggaagcaaaaaatggacgattaaagggaacgatcattaaggccatagtggcgcctgtaacgtttgaaacatgtctccaaaatgaatataatgtacaactacatggcaatgatctccttaagtcactacaaaactccattccattttttaaaataatactcatatgatgatctcacagctctgtggacagtaaagtccttgaaaaagaaaagctcagaatacaaaatgtgttgggggattggggagggcctttgggtatttaaacatgaagaatattattgttttatgagcaagttaattatatgcaatacagttcactatgtagcaagcactaccgacagagctagtgtggctttcacatgcactagctgggtgaccttgagtaagctgtttaaactttctaagccacagtattctcatctgtaaaatggtaagaataatatctaccttgcagaactcttgtgagaattaaatgagataatgtatgtaaagcaactcagaaagatgcctggaacatctgccccataatagatactagttatgataatgattatgatgaggatgttacttaaaatattgcaaacattcaaaatcctccttctctcgcccttttcaattaccctaaaaggaagcatcgttctgccactccccctcctactcgcaacgcatcgataaatggacaagaactaggaaaagcctgatgtgttagaaaagtttctcaccaactcagcatatttcctcagaacttctcagttcagtcagcctcactcacgcggggagactagggcccagcctagctagagccccactgcagcacctgtccaaattaccccatcacttactccattagcacactctaaataaaagactccccagccctgcccctgcttcaccggtaaagccaaaatctaccaatgagcaggctccagggagagaaatcttactgtgtgataaagagcaccagaagagcatcagcttagagagactcccaaatcctccatatttgacagagtacagatttacacctttacctaaagaaaggtctcctaagccttccacattctatttcaatctgtagaaaatgtgggttctcccaatgagtcgagagcccttagactcttagaagtaactagctatgagatctcaggcaggacacttatccctctgggccctgggattccccgctagaaaataagaatgttgtattaggtaatcttaaaggtcttttctggaaataacagcctatgaatctttaaatatcattttaaaaattacatcaataaagcagaaagagatggatgaatagatatttagataatgataaatagatgatagatatataatgaaagcatgtttttattgggaaagtcataataattgaatgactcaatgatttcattctactagaaaattttatatcctgggcccagattatcttaataacttggtccttattgtctaccctcccaatatgtaactaacctgtacattctgcacatgtaccctaaaacttaaagtataataataaataaataaataaataaataaataaataaataaaaaagaaagggctacctttatacagcactagctctatcaacaaggcttattgttaatgaggaaaagagaggtggaaaagaaacaatgacagtgaatatagacaggggttaagtgtgttactctcctctttctaagcaaaacaaatccacaggctgcaaatgggaactattagggtctgacactgatctggaggggttttccgagtcattatttctatctagcttcttatattattgattaatagaactagggaaataataatgtcatttattgagtatttaagtatgtgccagccactatgctgtgtgatttacacatataactgcatttaataatcaaagcagagacaagttactagccaaagaccacacaactaataaatggcagagtaaggatttgaacccaggcttgcctgattctcaggctagtgcttttaaccacaggcacttctcttagttgacattgtatgaccactatgtggccagatcatcccacttgctggatgtgggagaatgcaagaggaagaacacaagtgtggttcttccttgtctgcctgttacatttcctggcacattctctagtgcaaaaaatgacgacaactgggctgggcacggtggctcatgcctgtaatcccagcactttaggaggccaaggcgggtgtatcacctgaggtcaggagtttgagaccagcctgaccgacatggagaaaccccatctctactaaaaatacaaaattagctaggcgtggcagcacatgcctgtaatcccagctactcaggaggctgaggcagaagaattgcttgaacccaggaggcggaggttgcagtgagccgagattgtgccattgcactccgtgggcaacaagagcaaaactccgtctcaaaaataataataatagcaacaactattactactaccactattacaactactaccactaccaattactgagaattatgttttgtcagatactgtgcttggtttccataagaattcctttccccattttacagatgagaaaacttgaaattctaagaggccaataagtcaggtcaatctagcttataaaccggagataaatttagaacctaacactgtcttacacaactcaaaatatattatgaaagatttgaattctggaatcaagaccacattaattaaattaacataggagactaacttgtgcaaagccccctattgttttgaagtcaaaaaaacaaaaacaaaaacaaacaaacgaaagaaagaaaacaaagcacacagcttctttaaattggaaaaacagcccttaaagaaaaaaaaaagactgggtaatgttcaataaaaataagacaagacactatgatctggcaaaaggaagtgggtcagtgtcaagttgaagagtgtttaatcgtagggcaatcggggaggtaccttatgtaagccatgttcaacccaaatgaaaatgaaaataggcagcaatgtccagaggggtgttgtctcctcttggcccaggcatttttgttaggcacacagcatagtagtaaaaagtaactgacacacattaaggaacacattaacattaaatctgattatttcctatgtcaaaataataatttaaaccaaataattcattgtaattaaataagtcaaagggggacattgccaactatccacttcctgttagctagcatacacaaagaagagcatgttaagatgttggaaacttttcttattttgtctgatactaaaacctatgaagacgtagctatggccatgctttttttagagaaatccacagatgtgctttatagaagacagtatatgtacaaatttttttaattgaggaataatttcaccatagtctttgagtctatgatgatctcacatgctatatctctaagctgtataacagccttatatcctaccagctcccctaaaggacacccacatattattcataggctccaaacaggcatattttaccactcccatgtggttttcatgatgttcccatcttaggatgatctttctctttctctatttgttaaatctattcatatttcaagaacactctcaaatatccttcctctacaagttcttttcatatcaactcaagaaaatataagcagcttagagcttcccttcttcatcattgtggaatatacatataaaaagttaataaggccgggcacggtggctcatgcctgtaatcccagcactttaggaggccaaggagggtggatcacctgaggtcaggagttcgagaccagcctgaccaatgtggagaaaccccgtctcgactgaaaatacaaaaaattagctggtcatggtggtggacgcctataatcccagctacacaggaggccaaggcaggagaatcacttgaacccaggaagcggaggttgcagtgagcagagatcacgccattgcactccagcctgggcaacaacagtgaaactccatctcaaaaaaaaaaaaagttaataaaacatttatgcacattgttccaaattctgaagcaaatacttccataactatcacccagattaaagaatccataagcgtccaaaaatgtccctgtgtgcccttcccatattataaccttctccctcaccagtgcaggaaacccccattgagtactataatcatattctgagtattatcatcgtattcttccttttctttgtaattttcacataatgacacatccctaaacagtatgttcagttgtttgttttagaacattacgtggatagaatcacttagaatcataccatatgtattatttcccctcttgcttcttttactctatagcatacttctgagatttggccatgttgttgggagcagctgcggttcatttaccttaattgctatgtactgttccactttatgattaaacttcaacttctttatctacattagaatgtagataagacctttgggttgattccaacttggggcaattctgacatgtctattcttgtccaagaatcctagtacaataataactgaagttctctaagattcaaatttaatagataacgccaaacaattttttcaaattgggccaattaaatttccacaagcagtgtagaagtattcctcttctacattctcaccaacattcagtattgccaagtttaaacaatgttttaaccaatcagttgagtatatatcggcaatttatagtggttttcatttgcattcctttgcttcctaatgaggttgaacatcttttcatatgtttattggccacttagacatcttcttctgggaaaggcctatttgtccactttaccactgatttatcttttttattattactcatttatacaagaatattcatttctttatacattatggatactttaaacagatataaatgaatataacttaaagaaactaccctgtatatattttggatatatatttctttataaaatctaaatcagtgttgtctatctaatatggtatccagtagccacttgtggctattgagcatttgaaatgtggctagtgagaataaagaagcattttttaaattaaattaaacctaatttaatttaaataggcgtatgtaatactggctaccgtcttagacagtataatagtaaatatgagtcttgtcagctacgtatcttataaatatattttcccactctgtgatctgttttttcattatctttttggtataatttgacaaataaaagactttaagtttaatatagttgaatttatcaatctcatcttttatttttagaagtattttgctttatacacaaaaaatttccctactccaacttcaagttcatgagatattcctatagtctctgtattttacctttcacatttatatctcaaataaatttttgtatatgctgtgaggtgagaaatgtattttttatacagatatcaaattttttcagcattagttattaaaaagtctatctttttccaccaatctgccatgcccttctattatttatcaagtgactataaaagtggggctctgttttggaagttttctattccatttcattgatatatttgtatacccttgcaaaaatgttacaccattcagctttaaaataatccaatctgataattattttttaattggagcaattttagttaatgtaatgtaaaataaatcttgatatctggtaaagcaatttttcccatcgtattctttctctttaagtgtcttagctgtttgcaatttcaagttaattttacaatctatttgttaaattctgaaaaaaaatctgccgcatattaatttcaattaaattgaatcttacatcgtttagggggcaagttaataattttaaaatgcagtttttcagtatgtaaatatagcatttcctttcatctacttcaattcataatgctttacattattttttggtctttgcagatacattttaaaaaatgaaccaaaaaaacaaaacaaaaaactaaggattatcatctcttttttcattttctgaagagtttgtgtaagagtatactttttcgccgggcatggtggctcatgccgataatcctagcactttgggaggccaaggtgggcagattacctgaggtcgagaattcgagaccagcctggccaacctagtgaaaccccgtctctactgaaaatacaaaaattagccaggtgtggtggcctgcgcctgtaatctcacctactcagaaggctgaggcaggagaatcacttgaacccgggaggctgaggttgcagtgagctgagatcagccattgcactccaacctgggccacaagagcaagactccctctcaaataataataaaaataataatttttctttctttaatggttgccaagacttgccaatgaagctaactaagcctggcacacttttttagaaagatttctattactaataattaaatgttaaaatgatcataatctttgagttttctatttatttgtaaatcaatattggtgagttatattctccaataatttttctatttcaactaatttttttaattcatcaacataaaattttataatgatttcttacctctttatttcatgtagcacttctagtgatatccccatttttcttccttaaaccatttgtaccttatattattttgtgttgaccagccttaccagacatttgtaaatgtataagtttaaaaaaaactttacgtttcatgaatactttgcaatatatgtttatcataaatttcttttattcttactctcatcttgatcatttccttcctttcgtactcttttaattttattctcctcctaacttcatgagacagatgtctagtttatttttcagtctttcttttttaaaatataagctataaagaccataaatttctgtctaaggattgttttatctgcaacctacatataatgatatgtagcattttagttattgttcaattcgaaatagtttctaaacttctattatgatttcatctttaacacgagttatttatccaaaacatatgagatttgctagttgtccttttgctttttacttatagctaaattgcacttcgatcaggaagaacaaggtcttcctggccttaatttcagtccctttgaaattcactgagatgtaatttaagttttgataaatggtcagtttcctaaatgttccatatatgtttgaaataaaagtaatatttggtagctttttactagagtgttctgtatttaccttttcatgtcaagtttgttaatcatattaatcgaatctcctatatccatatcagtaactgagagaagtatttttaaaacctcctatcataatcatgaatatttttatttctcattatacaactgttaactttgatattatatactttgagatttgctactaggttcatataatctaagatgtttacattataatctaaaatatttaatcaattcaagtgaccaatctgtctgaagtctattttatctgatgttaatataggtatattagtgttattttgactaatatttgcatggcatctgtttttccaactttgtatagtcactcagtaccattatgttttagatatgtcacttataaacagaatattatttttaatacaatatgaaaatgattttgtaatttcagcatttttagttagtgtaattattgggcttaaatttatcaccttattttgtgttttctatttgttccacacctcctctgtttcttcttctttctctctttctttcctttctttacaatgactgaatattttatcattttttatttccaatctgctaattgtaaattctacacttggtttctggtgtcttagtgattgtcctagaaattaaaatatgtctacttaatttatcaaagtttagagttaattcatatcattacccttctttcagaaaatacaagcatcttaggacactttaaccccattaaccttcctgcctaatttatacgtacacttttgttgtcattatttttcttacttttaattgcatcactattagtcatctttatctttttgcaaatggctaataatcatttagtttcccattttctactccacttgctcttcactccatcttgcatctcagacatttcatcttgggcttatgttcattagaatatcgtttactgaaggtttgctggtgttcaaaattctagtttttatttttccaaatctttaaaacttttatttcattctaaaagacattttcactggtgtaaaattctaaggtgtcagttattttcttttgacacataaattttctacaatgtcctggcttttgttgttcttgagaagtcaggagttcatctgcctatcatttctcaaaaataatcttccattattctataacttcttttaagatattctctacttagctgattttctgctataatattatgatataattttgaggcagaaaccattttgagatataaatgttacatacatttatttatgtttcttagtgcttattgggccttttgaatctgtagatttgactttttcttcttgtagatctgttcatttataactataggtagataaacagagatattttgaggccatgtttttaagtatgtacaaattcaaaattgttacatagttctggtagaataaactttttctcatgaggatgtgatcatggaaaattctacagcattatttcttcggatatattttttctgcctattttctctcaccactctgattatatgcatggaagacagtggggaaggtctctccctgctgccttctggaaaattcttcagactcctcatccagttcactaattctctctttagctctatacaaatcagctgctagatcaatcagatgagcttttattacactttcagttattttctgttcctagaagttttagttggctcttttacaaatcttcaaaaatactttttgcgctttcctggttcctggagatatttttaagcttcccttttatttatttaaatgtggtaagtatagttgtttcatactatatgccaataattccaaagtctggagaatgtgctgatctgtttctgcactctgttgtttcctctggttttctttgactatactattcactacccttgaaaatgaaggagtggggaggtggttcccggcagtctaggacgtcttccttaaagaagttttgcatttgcttctgccaggtgcttaaaagaactacagaccgagaaccatctcaaactaaattcactgctggagggttcttcaccattcatttatgcaaatatagcttacaagtattctgacgagctgagagccagaaacttctcagggatagggtcttgttttttgttgttgttttcttcactttcccatccccagccccgttctgctcagcctcaaggacgctctccataaaattgcctgtgcatataatcacaggttatttctggttctgagagtccagcttaatatgggagggtttccctaggctccccgcttgggttgagtcccaagatttggttctgccctcttctgccaggccatgaaaagtgcagcttaattatcagcaaataccgttgggtaaacagagctcccaatacttttcttggatttcagcatcatgatgccttatcttcttatagcaatttgatggtttcagacatccttttattgacattttaatttgtttttagcagagggttgggctaaatagccacacagccatattctcagaaatgaatggtcttttttatgcctctgtcacttaacatactccatcttgtacctggccccctaactacaagtaaacccataaatccacaggtagtcaggacctaacctcttgtcctcctatgtcaaagcttaaagtacactgagcactaaagggcaattcttgtaccacttttccatctcctctcatatccttattttacagttttgctgtattcaatcaattgcaagaacaactttttgagtttcaataacaatagggttgtagagagacaatgtctcacttgatctagagataaatggttataccctagaaaatgtgtggttttcacacatttcatgtaggtagtgtatgtctccttatgaatatgtttgtgtgtgtaagaaagagagaaaaagagaatgtaagtgtttaagatttaatcagacaaaatcaattccattttgttatacacagcacttcatgtcttacattaatgaacatgatgacaatgatttccttaactggacaacaagaacaaactgctctagcaatgtcattgtcaaaatgtgtataaaatccaagaagccaggccattaatgaataggattaatttgtatcatattaatttgaaattttagtatttaatataatgtaatttataaaaattcacattttctatgtataattcagacactatgtgcatgactcttactgagaataatgtttgcaacagatttatctctatgaagatacagcatactaggttacttagccattagttaaaactatgcagattacttaatatcttctggtgtcagatgtttcacataaatcaaatgatatggacatgaagctttgtaagattcctcccagcctcacaatttccaaaaatttatttgtagtaaaataattcattctaaatgtaaagcaatctagataaaaaaagtctttgcataaactcattatatacaacaatatgaaagaatctcataggtaagatgctaagaaaaagcctccagagggccgggcgtggtggctcatgcctgtaatccccatactttgggagtccaagatggatggatcacttgaggtccacagttcgagaccagtctggccaacatggtgaaacctgtctctactaacaatacaaaaattagcagggcgtggtggcacacacctgtagtcccagctactctggaggctgagacacgagaattgcttgagaccgtgaggcagagagcctgcagtgagctgagatcactccactgcacctcagcctaggcaacagagtgagactctgtctcaggaaaaaaaaaaaaaaaagtcctccagacacaagagtactattgcttgattccctttattatcacgttcaagaacaggcaaaatttatctcaggttgacagaagtctgaatagtggttataacataacagggaatggtattgactggaaatgggcatgaagaaactgatttgttggaaatgttttatatttttatctgtttagtggttatatggatgttatacatatgaaaaaattcatcaagctgtatatttgagatgagtgaagtttgctgtgtgtatgttatacctcaatttttttaaaaaaaagtatatgaacaagagctcaagacatggcaaattacagatttaattatttcaatgtttcttaaaattcaggataaaataattcatctttttctttaaaagagtgtccatgaatggcattttacttactactaccctaagtgccttaattggaaatgcatacagtattttaaaatcctaaaactgcatttttttattttaaaaagtcctaattcaacttttcagcagggcagaatggcatcctcacccatcctacaccataccccagttattttgaactcatgacgctctgcactgtatactttttcctaaacatcacaggaatatctatgccattcaagttattctgaaagctaagccttctcagtcctccaaccatctctatcatccaagaaaaaactgagaaaatcacacatatatatttcaatgaactacatatttgaaaaaaaaaacagaaaagaacatatagtgctcagttataatgggaaatcctggaaactgttgttaaacatgtatactatcttgagacaattgagactgttaatagttgccagcattatccctgtgagcatcatgctaagagcatggttagctgatgtatggcatcagctaaccataacaattcatgagttaaatactaatattgtcccatattacagatgaggaaactaaagattaaaagagtttttaaaaatgtacccaagttgatatggctagtaactagcagatgatggatttaaattcaggaagcctgatctcagagcaaaattcttaactatcacacccgaaagttcttccttataatgagttgaactctgtctccctctaccttgcacctgatctttgaggagacatagaacaatgttaatctccttccctacaacatttcaaatacatgaaggcaactgtcatgccctgccctgaacctctctactcaagttaaataacactacttccttcaacaggtttttctacaactcgtttcaagtcatctccccttgcttgagacatctcacaaaacacacaccagtatattcagtgattgcatggtattgaagaaagtatatttcaaagtggtctgataagtgcataacacgaagcacactgctgcactgctccagaagggaagagccactatcatggaatctagaaatgtttggtaaagagtggagtgacccgaagaaggagtcctgggattgtgtgtccaccatgctcactataaatggctgctggctcgtactctgtaacaaacgcaggctccaaaaaaatgacatgaatatactttcttctctccttctgccttccacaagctcatcaaagccaatgatcctcggacagcacaaagggcaaaattttggagctccaaattccacagctcaggcaggccatgttacagagggcttcatttaaagttgacttactactgcttacatgtatagaagatcatatgctaagccaggactggttgtgagaataaccgcagcaaagaaagatgaacactaccattcatgagagcttgtctttggtaaggactacctggattcatcccagggtgtttaaaagtctattgtttatgttgaatggtcagtaataacagcaccttcaggttagtacctcgggatagggccgtgtgtcctagtgacgtagaacctgaatgtacgggagggcaggaaataatgagcactgttcttaaatccagtgaaactttctgatcaggcttattaaaatctcagggaaaaatatcaactgggtgtatcataacagacacaggtaccacatggtctggtgcccagcactaatgcactgtgaaagcagattgcatccagcggcctgacggctgacacttcacttgtccttaaaatgggacaaagactagaaagactcgggaagaaaaaggataagaaagtgccttaaggtgtgaaggaatatctagcagcaataaaggtaaatgtgacgaggaagtaaatagagagaaaagggtgctgtaaatcacagacaaatgagtggtggctgtcccgacttatgcaagtatcaggaaagagaggagggacctgaattagaaaatattaagcatcattgtaaaagttcttgtttctaaagacaggtcatcagagattatggaacaacaaagaaatactacctcctacagttttagaaacaatctccaattaagccaactaaaatatttacctagacaaactaagagcagaagccacttagatatttcaggaatgggcttgactatgttcaaaagttcaaataattaagattttcttataaaatttaatcttagccaaattgcttccaaacctggttatttcattactgacaaatataataatgttcctggggctcagatcttattactattaaatacttattaagtatccctggtgtgctgaatgatgcacattacagatggatgaatatgttgtgtgcgccctccctcgaagagcatagagtcttataaaactgataggacacacacataaacacccccaaatttcttccaggggatatttagagtatttgcaagaatctatgtctctaaaatgccttggtgttaggttcctggatgaaaatggacccacacttgcctgatgaaatgggcaaaacacatggacaagattatgctagcaataggcagccttctcttgctttctctctggtttcaaagaaggtgcagcccctcctgtccatagctaatcctttgacgcaagtcctccttcctcttcctctctttgccactgctttggctaaggtcttcatcttttctggccaggattattgcaaaggtctctaaatgagctctgccaccaattcacattgctctaagcaacactgccgcacaccatttcccaaggaaattttttgttataaaatataaacctcactgtgtcattcctctgtttaaagattcttcagtggattcctgcagctctgaggatatagttcaaattaatcctttagcatgactgaaaatgatcattgtggtttgcatctttcatagatttttactttcatctcatggcatctctcaggaacccatttataccaaaccaattgccctttacttcaaggtttccaaatctgtcatgcttgtttgcatctccatacccccgctttcacactgatgggtgtctggaatatcctttccttctctccttgtctagccatcaaacttcagtttacacatcacccttacgtaaaagatattttccaaccctttctgcatctccctggaccaggccctttctcttctcctatagaccccctagatacctctactgtcgcacctactaccatagtgagtcttatcatctcctcaactagacatgaactcctttggaaaaaagactgtacctaattcatttttgtatctcgaacatttagcacagaatttacaagaaaaaaaaataaaggataatgagccaagcagaataagatgatagttttgaataagaaatgaacgaatgatgacataggtgcttcagccagaggggactgtacagaaggatcagatgtcagatctgtgcacatcaagccttgctagaagtcaggggcaaggatgtggaggtctggagaagtaagcaacaagaaggcctcgtcaacgaaagcaagtgagcctcagaagtctgctctgagctcaccacttggcaaacaggaacaacccccagcctctgcagtttgtgtcaatactcattattcttcacatacttctccttggctacctgtttaccccaggcaataaatcaaaatcatgtcttctgtctttctggtgggtcccttttcttctatggctttgaaggaaaaagatttcttctccctcccttttccacgaatcatgatctagacctcggggtctccctccagcctagtacgtacacacgcaccctcaaaatgaccaggcggcatgaaagattccacaggggtgctgtggtccagccctcgcagaaggtggatgaccgcagacacataggggaaggtattcaaatacctgctcacttcggtctctttcattctctgccttctctgtttttttccaacccctcacactatttcttctacgaagaaagcatttagcaagaaaacggcaggcttgattgcctctgccatcagtgcagcaaagctttgccgtactgtgcgtgcagtgcggagagacagagatgaaagcagccacactcggggccagggaatgagtgactagtgcgcacaaattaaccaagcccctcagaactcgcctactgcctcttccctcagcaactgcaccttacacagggaggagctgctaccctgaaagggcactctgctgtagacggttccttagtgcttcccaccccaggaagcatggggcgctcattaagatggagctgatgccgtagctcttctgtcacaggctgacattcactctgggtgcaatctaaaaactctgtgcagtgaataataaccaactggggtctcttgccactcacagagaatcagcagagagagagaagcaaaagagaggagaaacaagcagatgttaatgaagaagaaaggagaaagtaagtgaaacataaagtgagaggggaaagtgaatcactttccaaaggtttagcatttaaaggaaatgatgggtgaacaacgctgaaaggaattaatactcctattgaagttacgtattgaacatgacctacactaaaccgccattagggtttcagggagtatggccggtctaagagagcaatgggctcacttgagcctcctgctcggagctccgtacttgtgggcacagggtgcggatgtagccttgctctgtctgaacctgaagtgtcccatgcacaagagtcaaggccactgcagtatggaaggagtgtgcccttaatatttggaggtgctggttcaaacgacttttttttcagtatgactagacctttaagagtctcagtttcctcatctgtaaaatgaggatgaatgttcttcatggagttcttcgggggagtgaatgcatgtgtattttgtaaagtgcacttttggcgcctcccaatgggaaaaaccagaggcaggaaggtaagaggggtcaggatgcacataaaaaatccctgggtcccccctcctcaatgtctctgcttagaaaacgaagtaggcaggctcctggtcctacaggctagaattgtagtcccatacctcagtgggtttggtaactcctcatgtcactccttagtcctcccatcagaaagaaatgactgagctccccaagcatgccccccagccttccacctgagtcgagagtaacagtggcagtggaaagctactgtcccatgtgaaaaggatagaaactcaatgcccagagtccacatggcctggatggaggatcccacatagatctttagtactgttggagccacgcttaccatgtttccttttctttcctaaaacaaaagtctcatgaaagcacaacattcaagtatggttttagaggccagaatcttccattcaacacccctgatgcccttcctgtactcaccctactcgcacacaaccaaagacacttgtggaatggctgacagggaaacaggtgacagaagagagtttttttggagcctccagaaggctctaacagtgccccctttgagaaccaactatgccaagaggggttaaaactggtgctggaggcagggaaggaatcctaaagggcactgaactgctggcgctgctgtctgtgaggcactgagtgagtcacttcatccctctgggcctctggttcaacctctgaaaattgaatagttacaaactgtctgcttgtctgcaatatgccacctgcaggtgagttttgtctgggcttcattgagatgttgctgaattgttgtgttgtgtagtgtgaatatgaaacactagacgaggcacatactccaactctccctattgccccacactcagggacttctagcatttacatcatctaccttgccccaaggccatctccactgtaaatgcttagtggagataatggtttctcagggaccactttcttgctgtgtgaccttagacaacttactttctctctccaaacctcagtttcctcatctataaaatagacgtaacagtagtatctacctcatagagtagctgagaggattaaataagttaatttatgaaaaatgcttagtgcagtgtctggcacgtacaacagcacctgctacatcatcattattattaattatattttcatctttgatcttagattcagcagatcctcattccattcattaagcttaccatagaagaaaaatttacttcagcatcagcttttaacaacagactttgagaaagtggttgagcacgatccaggctctatgggatgaatgaatgaactggggcaaccaggtcaatttcttcaaatcaattgtctcaccttttcactactggtcccctgcctacctcctccccactcctccccacccctaaagccaaaaaagcactgaactcaagagttagaagcatcaggttccagcttgcacccttttccatggtacttaatgcctcttagtctcagctttttcatctgtaaaaagcagaccacaacacaaggagatatcgtctcaccccagttaaaatggcttttatcaaaaaagtagggaataacggatgctagtgaggatgtggagaaatgggaaccctcacacactgtgggtgagaatgtaaatcaatacagtcactatggaaaacaatattgagtttctcagaaaaactagatacagaactaccacatgacccaggaatcccactagtgggtatacatcccaaagaaaggaaatcaacatatcaaagagatgtctgcactcctgtagtcattgtagcatgattcacaatagtcaaaatctggaatcaacctaaatgcccttcaatggatgaacagataaaggaaatgtggtataatgtatacaatggaatactattcaatcataaaaaatgaagtcctgtcatttgcagcaacatggatggaattggagatcactatgttgagtgaaataagccaggcacagaaagacaaatattgcatgttctcactctcatatatgagagataaaagagtaaatctcttgaaaatagagaattatctattaccagaggccaggaagggtagaggaaagaggggataaagagaggttaattaatgggtacaaaaaaatacctacctagtgctcagcagttcagtagggtttccacagttagcaataatctattgtatattttcaaataactagaagagaagaatccaaaagttgccagcataaagaaaagataaatattagaggtgacggctatcccacttactcggattttatctttatgcattatatgaatgtatcaaaatatcacatatacccccaaaatatgtacatctattgtgtacccatttttttagcaggccattatcttatcttagaggttgaaataaggtaacaaagccaaaagcaaacaacatagttcctggcatacgttagtcacactgtacttagacaccgattggagtctaaaccactccatttccttcctcttcactagctatgtttcgaacctgctagttgtacccatgggcatcacccaacccctggccacaggcaggccaaaaccatttgctgacctcactctctattttaagctgtgcctcctgggtctgctcctggccattcaggaagtcaggatcttgcagaagatacaatgttataggctccaggccccttgtaacaacactgctcaaacaggactgtctgcagtgatggaaatttatatccacagtgtccattatagctgccccatgcagccactggacacttgaaatgtggcttagcaactgagaaactgaatttttattttatttaattttcattaatttacaggtaaatagccacataagaccagtggccactgcattggctagcacagccttaggaccacctccagttgttgccaaagtccatctgaagccactcttccagacaagacatctgaaacttccaagcacctggctggcatctttacttggattttgctactacttccatcaaggctggcgtgatgaggcaggaaaatgagatcactcaatggctatttccagtgcccttcaatcactaggcaactagatgatttgttttttaaaatgcaggtaaaatcaacatctccccttggttcactgtatttggggagtgtacataaattggacctatgcttgtaatggtctctgaagggtcctcctgcagtgggataactctatagagctgtggggcacctaagcaaaaaccagagctttgaggccaggaaataaaagcctgtgcactgactgcagattaggggcaagaggctgggggactttttgaaaatgagatctttgacatttccatttcactcagtcaaaaattccacaagaataccttacttaacaatattttttgcattaatcttgccaagatcagattccaagaagcaataaagaatattaagttaactttcattttaaatcaggaagtttgttaggtttgagatcataaacaaattatcatctttgccaaactgagattggccctaagagagaacagattcattctctcatttggaaggcatgagtcttgtgtggtttcatgatcttcattccataacattaaatgtgttgtgtgaatggttctaaactagttgctctagacaaaaacaaaacaaaaatcttggtccaagtaagaaaaagttgggaatggaaaggaaaactgatctactcatttgataaatatctatcggccaggcgtggtggctcacgcctataattccagctctttgggaagccaagataggaggatctcttgaagccaggattcgagaccagcctgggcagcaaagcaagaccccatctctatctctctctctctccatacatatacatatacacacacacacacacacacacatttgtgtgtgtgtgtgtgtgtgtgtattttaatcctcaatgtacgccaggatgacaatgggctcaaagttcagttagtaacaatgctatagcaaattattattatatatggtacatggtgcacacaagacatctgggaacacagagaatgcagcaatacctggcgtggggaaaagtcaagaaaggctttacgaagaggtaacctttgagttgcaacttaaagaacaaatagaaatatgccaggcaaagatggggaagagaaagctacatttcaggaaaggaacacgggaagaaaggaaagcacaaaggaagaaaggggcattccacactaaggggcaagcctgaatactggccccatttttattttcaagcctgtcagacctgccagtccttcctggctcccttgagcctcttccaaatttaggcaaccagtccaagcacatcatgtccctctgggtcacatcccattaaaacaaggctccaaatggggtcccactaataaaaccccataaccctgctaatcaaaactgcttattttacaagccccagcaacccacaatatatgggaatagtgtttgctgtttcctggaaaagaccacgcactgctgctgcagatagccaactatccatacgatggtgacgcaaaacttccagtgggagctggagaccctctgggtgggccggctgtattgcgaagtgctgtggtacttaaataagaggcactaaatgacagttaatgtacagagagaaatgtcaggaggctaaaagcagccataaagtacagtccaatagagtgacgcacaagaaggaaaaagaggacagcagtgaccagggtaaatgtggactagctggaaaatttcctggcatgccattggattcttaagattgatcttctacgccatgcttaaggagaccaagttttaaggagtacacttaccccaaagtacagaaggaagttagaacattcacagaaaacgatataatatcactgataggtataaagtcaaaaccagcctataatttttggatgaaaaacatttgttccattattgtgggaatatctcactttaagtggcaatttcaaaatatgcaacagtgttctttttttcttttttattatactatatgctagaaaaatatcagatttttggtagagtttttgtttttgtttttgtttttaatcctctgataaattaggtcacctcaccaggctctttggacatattgggtggattttctcaaataaaggcatcacagtggtcagctggcaatatcaatgatagaattcaggtccccagaaactggaaccaagtagggcagcactgtgaaaaaagccctggacttggcatcagacatccatcagatttagctttcagtaccagttccacccttttctccctaagtgcatttaaagatacaaatctcttaactcctctggaccttaattttctaacctgtaaaatgggaatagtaatacctcacaagatttctgcaaagattaacataatgatgtgagtgaaagttagccagacttgtggcacatgcctgcagtcctaaatactcaggagactgaggcaggaggataacttgggcccaggaatttgaggctgtagcaagctatgactgcaccactgtactccagcctggatcacatagcaagaccctgtctcaaaaaaagaaaaggatacggaaaatagtcagtactcaacaaatcttagttcaattgaatttgacaaccaaataccatgcatttatgcattaataagagtttgatgttctgaaatctggacatgttaaaaaaatggccacatggcaattgaaaatcccttttttctgaccccttgcctaattatcagtcacaaatagcagcaaccaaccccagttccctttcattttcaatgcacgctctgcaattagacattggttaggagaaaagaaaatgtattaaagggatggttatttgcttcctctcctaaaatcctgtggatgattgattcataaactacacattatgaagttgaggtctcttttttatacagtagttgtagtttcaaaaatgaatggctttatcaaaacaaagctgaaaatggatttcttagtccctcccttctgtgatgtctttttggaacaattagcttgaaagtcagctttctttgtctaggatccttctcaatccttccacccactcaaaactattagcagttcaactaacttattttcatttacttcatgtatttaatacctatcttgttctcaaaaagaaaaaaatagagacttctaactccagctaagaatagagattcacacccctttctgggaaattcccacagtgggcctgagtttcttttcctccacatgcaaattccaaaagctctacatttatctgcctgatttcaatagttagcgtgcatataaccaaaccttcccacaaatatgcacacggacctaacctcctttaacctccagtcttctgagttagagtgtgtatgttcaaagtttggttcttagagaccttctgaatctagtttatactttatggttctaggagtccccatatatcatgtacgtaaaaagccaaaaaagtcaagttagggattaaaaactcctattcttcaaatattctattataatgattccagtgaaacacccacataaattgaatcatttgtttctctcacaacttttctaaaattcaaactcttttctaaactaacattccctaatatgtacttttggaatgacctcaacgttctagaaatagtggcctgtatgacatgaaagattccaggtagagacaatatggctttttgtttttttcttaagggcttaataatatctctaaaaataacaaatgccacgtgatgcagtcttttaagaccgtgcatcaacttaaactaagtctttgggtttactagtggaaaatgacagtatccatttataagaaggtagggaagcatccaaatgaaccctataaagctgttggccaagatcttgcttgaaaattggaagctgatgcggggatcgtctccctggaaagggtccatggccctccattctgaacactgatgggaatgtgggagctcaggaactcaaaaaaaaagcagacattcttggggtcatatcagaatcaccttgaaaatgagagcaacaacgatgcagatgaactggctggagcatttgacgccctttaccacaggaggaagatcacattcctgcagaggaatacaccacaaagccttgccatcaattcagattttctcccttctgtcttccctaaagagcttatctctgaagaggcctagggtggtaaaaagccctcagaggaattcagtcacaatcctgggactaagagcccgcctcctcactgaaaaaaaggaattagagctgggtgtggtggcttacacctgtaatcccaactactcaggaggctgaggcaggaggatcgcttgagcccaggagtttgaggccagcctgggtaacatagcaagaccctatctcaagaaaaaaaaaaaaaaacggggattgggagaactaggagggtggagagtaggaggtgaagtgaaaaaatgagagtcaacagaattaaatttccccaactcacttacgcttctcacagaagcatcattcattggtactttaacttctcaaggaaaaaattcaaaggaatagaatggaagtagggaaaagatgggataagactgctttatcctaggcaaaaacatcattttgtaactgtgcaggatattgtttgttgatccttagcaccattctcacatctctaagctctcttttgcattccaggtttatgaagcctagaaacttccttcctttcctggatgtttttgctaacaagttcctggttagatcccagcagtgagaggctccagactgaggtggggaaggtggaagagaaaaagaagctgctatgctccaggtgcacctggaagacgtcactttgatgttggcctgtggcaaaggtacagttttgccggtgacatcaggcatctcctgagaatcacccacttgcctcactgtagcccttcgcttacatttttcccaaatgaagctttcctgttcttcactcctccagccttctaaagattgtgtaaaccttgaattccctgtattaaatttcctcttcaaaatacccaaggtggcttctgtgaatcctgactaatacattagtctgccccatggttctcaagttgcaggatttgtaccaatcctaacggcaccaaggatatgtaaaaccctaacaaagcacagtacgtattcttgagccattttactcaatagtaggtaattttggaaatttatttttatattgaaataatcactgaaacatcatagggaaagggcatattaaaataaagttttaggaaccaggcatggtagctcacacctgtaatcccagcactttgggaggccaaggcaggcagataatttgaggccaggagttcaagatcagcctggccaatatggtgaaaccccatctctactaaaaatacaacacattagccagctgtggtggtgcagacctgtagtcccagctgcttgggaggctgaggcatgagaatcgcttgaacccgggaggcagaagttgcaatgaacctagattgtgccactgccactatactccagcctgggtgacaggagcaagactatatctcaaaagtaaaatcaaataaaaaagtttcaggacaaaatataaaagctaagagaaaataactcttgcagaaggctactttaccttgcagtctcaacctgaaggatgagcttccaccctcctctgtaatttcgagtatcttgatggaagagtttgcaacacactgcacatctttctctctatatgtctatctaagtttctcttgtgttccctaagaagggatttcagatggtacagcagtattggggaggttgaaagtctgtacattctctgtgaacagcaagtcaggttcaatgaagtcagagtttccatataaatcttttcttagcctactgggatgccagatccttggtggcagggaagacaccatgtctaatgagctttgtgcccagcactgtgcatctccaacagtccctggcccacagtaggcatgcgatagatatattattccctgaattgaagaatcagtggatagatggataggcagataagtatgtaccaagcacaagtggcaacagaggttaaatgataagaaatatatattgttaaatatgcaaccttgaccaagttattttgcctctaagccttaggttctgtatcaggaaaatgagtgttattatacctatttctcaggattgttagggttggaacgaaggtttgagaggtggcacaagcaaagtacctagtaaggtgtctagcacacagtaagctctcctatataatatttatcattatcaatttttactggatttgagtagtgtaaaatatgcttaggttaaacaagtagactgaatctaattcaatctttcctcaatggttcagagagcactaaagtgcttcagcagatcatttgagacatggtgtctccagttcattagccagagtggcagatagcagggtgccctgggtgtctgagctcaaacccccgcttccacaatggaaggtggagagaaaaaaactagctcatgttttggccacatggcagtcttccaaactgaattgttatttgggttaggattacaagattagtagagaggagcacacagtcaatgaaataatacattttgactccagaaaagagactgatacagcagcgcatgaaatttcaaatgggcaagactgtaaaactcatcacagaggctaaagtctgactaaaggcaaatgaataattatcaacgataatgtacacaggcagaggaatgcctggtggggagcctgtggcacccgtggtaagtccggttttatttaacatcttagttaatgatctggaaaagagacaaacaaaaaactaaagagagatgatgaagtggatatctgttggctttgcctgctgggcacctgatctcctactggtggtaacagcaccaaaactgtgctttgggaaacaacgcctcctccagtggataaaatctccatggaattgtcaaacaacatgccccaacctcccttctaaaagatgggcaagtgacctatgctgggccaaaaggatgctctcttcctggaattctaatcttaagcacaatatcacaaagactttttgatacaaagacattaaaccatctagcatcacttattccagtagcatatctctgaggaaaaaaaataaaaaactattaattcctgctacctacatccttggaagcacctggcatttttcctttcctttttctttaaatctaatatacttctttttttttcctgaaattaggcaatgttattttatatgagctgcaaaaaaggcccaaataatggagatacagcttctactaaatctagggtatgcattctgtttatctgatcgttcagcaattctcaaaatatttttcagacattagtgtaagaaacaccacaatagataaagcagtctattttaaaatcacattgtttagattcaacttggaaacaattcacactgacattttttctggaaaaaaagaaatgtattctaatattcacacataacggaacaaatcacctaaccttagaactaaggtgaaggcagagaatcagacatgaaattgcaatgagatgaggcacttttaaataccattaaagttctatattgcataaagtacaacacatcagacattagcaaaatacatccatggtaagtgacctctatggtacattgtctgagttattaagtacatattttctttaaagagagagagtaggcagagaataaatccaagggagtttagagacgtttactaaaagtgaatcaggttatccagggtaaagggatgaatgttcacaatacacttgctgttttccaacagccctgctctcttgggtagaaagcatggagggatgccgccatctttgcttggggctaaaagaagctccttgtttaagggccatatttgctgattacagaaaatttagccactgtggaccaaaagaggaaataaagtctaagggtgaagccagtctaccctcagcccaaatggatgtttctaccattgaacaaacaccctacactgtctccatgacaactcacctacattgcttttgggccagaataagaaagctactccaacaataactaacaaggccactctcttgtaaggagaatttgaaaaggaaggatgaatattttcttctcagttttggagagaatgaagattcatttcttaccctataaaaaacagagaatcttactcttattgttctttcttcccagaatctataacctgtgcctctggggggactagtcagtgccacattctggttggtgctttaaaaagacccgaggcatacactgcacacagcatgtaaaagcggtacacagtaataggtatattgtatatggataagatatctaggatagtatcagtcagggtcccaacataaaacagatggcaactccaaatgggaagatagaggagagtttaatgaagggactattttaaaaggtgtgggcagagtctaagggaaccaacaaggactggtgaaatgcccaggctctgacaactgtgagagctattatcatccctgctcccccaaagaagaaaggtgagggagctgctaatagaacccagcaggagctggacgtgtatgagtggccaccctacaggagctctggcttttgggagaagaaggcagggattctcaacccacagcacagcagggatagagggagctggggaaagggccatctaacctcaccctcctgactgctctctcctggccaatgctaaccagatccttaggaaatccactgatcctgtctacagggttcagtctcatcacggtcaaagcagagtgagaagaatgggaagaggatctagaagagcaaaaagaggaatatctgtatcttcactgatatctatatctatatttctcacaccatggcaacttttcacgtattcctccaaagtgtgtaattttttaacccttctatttctgtgtgagatctccttatcctctctaaatggtaatctgcattttatttaaatttcacagttttacaccctagagcatagggtgcaaaagtggtattttcctatttcccactatccatgcccagtcacagacatggacaaaaccttccttaaggctataatcatgaaataaaaatgaaggcaatggtagaaatgctaactgtcctccaaaacctcaaaggacaaagaaaatctgtgctttaacaatacataaaaaccagaatccaggtatcatttaatgcacacctgaaacgaaaacctacactaagaggacaatgaaaaacaatggctgaagcgccagtgttgcctttgactatggcactgacctccacttagcctgacttcaccttagaaacagccctcagcagctcccagtctttgactataggcaaagtccaaggcttcctataaaaacttgacccacgaccctggtttctgcaaaatcctattttacgaagcataacagagcaggaataacaggaagaaattaaggagtaatttaggaatgtgatgttagaagagactccaacaaaaggagagctgttatgtcacaaaaggactgcaaaagaaagtaggacagctgtcatttttgagatgtttactgacagaatcttcaaagcacagcttctttttctgatttccaccattttgaaaagaaacatgtttatggctcagcaggtcagaccagcacttcttacactttatctctccctggacagtggcaccagatgctttatgatcaagctgaattcaccatcacctatggcattagcctcacacttaaggaaggacccccgaaacaccccgcacttccctaacagccttaaaactaaccaagcccaatagtcaccttactccacctttcattcctggctattaaaattcaagcatttcaaagctattgaagctattaatagtgcaattttgatgagctagttcaaagtcagcactaatgacctgttgatgattttaatggtttttacaataagtactgcgaatgacctattgttaaaatacagagtgacgggcttttacattaatccattaactcttcttttctcgtcattctttccagactaaactattttcctccgttcaatttgaagagttcatagataaagaaaactaaagtacacagaaagaatacgttttagcaactgacaatcagaggaggcaatggaacggggcaagaatatgccagatctgaagtaaaggccaagtcctgtgtgtatgaaactgtgggttagagagggaataaatccatctggggcacacttagaccaaggagaagaaagggaaatggtgcaaattgagaaggcagaaaatgagaaggtgtcggagatggacagaatgaccaggccagggaactactagaatccagaatctttaaaaagccactccagcttcagcaacacacacccaatgacaaaaagcaacatctatcccccgttcgtcacttccaggttcactgctcttgttctgtaccttattgaatctcggggctatcgacccttgcctggtgtgtatccttaagcccatccacacctaaacaatgtgcattgctttcctcccgggagcagaagcagctactctcctgattggttttatccttctccagttgacagcatgtgctcagagaccaccttgtacgataaccctccttccccagtttctccagcatcatcctgccccatggatggaacctggatgagagctgagaaggatgtccaacaattatagaaggagcagagtgagtctacaaatgagcaaagtcaaggactttaccacctgcctggctctgcctgcatttttaaaaagacaaatttgtggccgggtgtggtggctcatgcctgtaaccccagcacttcgggaggccgagacgggcggatcacgaggagaggagatcgagaccatcctggctaacacggtgaaacccaagctctactaaaaatacaaaaaattagccgggtatggtggcaggcgcctgtagtcccagctacttaggaggctgaggcaggagaatggcgtgaacccaggaggtggagcttgcagtgagccaagatcacaccactgcactccagcctggggacagagcgcgactccgtctcaaaaaaaagaaaaaaaaaaaaagacaaatttgtatggaaggcatttaaggggatgtaaatgtgtatggaaattcaggaaccaggatacatggctgagagcatttgagtgaaagataaaataagacagataataatatcactgtaagagcagagaccacccaacatctcagcctgaaagaggatattgaaaatatttactgaaagaaatcacaaaactggcagaaaggcaagatatgatagcgatacaagatttcaagtatttagacatgctagaagtttaattcttttaaaacagggcatctgatttttccttctaacagcagtatttccctggaggttaagaaatctttgagaagagctgctatcgggggtttaattttccacctcaaggaagccttagtaacaggctagaaatgtttttttctgtaaagtgacagatagtaaatattttacactttgtgggccatatggtctctgcctctgtcatagctattcgactttgcccttgtagtgcaaaagcagccatagacactactaaacaagcagatgtggctgtgttccaataaaactttatttataaaaacaaatagcagaccagatttggcctacagactgtagtttgccaacccctgccctagatggttatatggaactaacgatgtcccagtgagaaaatgaccacaccctaccagtgtttatattagctaacagagagggtgcagccatatgcagtggctcacacctgtaatcccagcaatttgggaggctgaggtgggaggatcgcttgagcccaggagtacaagaccagcctgggctacataatgagacccccatctctacaaaaaaaataaaaattaaaaaaaaaattagctgggtgttgtggtacatgcctgtagccccagctattcaggaggctgaggtgggaggatcacttgagcccgggaagccaaggctgcagtgagctgtgatcccaccactgcactccagcctgggaaacagagcaagaccctgtctcaaaaaaaaaaaaaaaagggggggtatgctgtggaaaggatgataaagaaaataaaaagttggaggccaggcgcagtggcacaacctgtaatcccggtactttgggaggctgaggcgggtggatcacttgaggtcaggagtttgagaccagcctggccaacatggtgaaaccctgtccctactaaaaatagaaaaatttgccaggcgtggtggcacgcacctgcaatcccagctacttgggaggctgaggcaggttgaacccaggaggtagaggttgtgatgagctgagattgcgccattacactccagcctgggtgacagagcaagacttcatctcaaaaaaaaaaaaaaaagaaataatgaatttgagtctatggacacatctaaaagggcaatgtgatttaaaagagattcactgctttaaattatttcattctggctgtataatagataacaattctaattcagaagatatttaaaggagataatatggttacctaaaaagttctgtgatgaaatcagattatgtaacaaaatatacagaagatgaggatgcactcataatatataaaaacagaacagttataaaagtataaggataaacttgtaagaaaagtggctaaagcttagaaaaaatggtaaaagacttgttaaagctatgttcaaaagaaagtgatccaggaagtgatagaaacagttttgtgtgatgatggaaggttacacaatgacaaagagaaggcagaggtattcaacttttatcttgctttttatatcttccacaaaggaaaatgatcttcaaactgcaaagggtaaggcaaacatggtttaagataaaactgaaaccctatatgggaaaaggaatagttaaaaagtagtcagtcacttaaacatacacatcaggtactgtcccaggacaatgacaataacttaacaacaatggctagtgtttactgagttcttaagagatgccaggcattgtgctaaatacttaataagcattaactaatttagtccccacaacaatattatgtagtatgtattatgatttttcccattttatggatgaataactaaaatattaagaaacatgttcaaattcccagttagtaagtatagagctaggtcctgaattcagtgtgtctagcacataagtcttgcttttatagatacttaaataacctgaagatttgttcaagaatcattatcaataatccttaagaaattatgcagaataaaaagatacctaaatgggagaccggcatgggttgttatttttaagacaaacaaaaaaacagtgaaatccataaaatatgaccagttctaacttgcatagattcacagaaaagctctaaaccaaaccgttaagcaaatagtgctgttgctttaaaaaaaatacagtatgtgatcaccaggaatcagcatagattcattaccagtccatttctgcactagccctgcccagctgccagtaataataaccctaacaacatagtctcagcccagatccaatcctgagtttgggaaaggcaggtcttacgttatgctaaagaagatttccattagtgctggatatctgcaaactgtcttctgctgtatacctgctgttactacgctaggcctgaacaaagccctgagtgtctaatggagcatccagctttcctctatcctgtcacctgtgaacaacagcctgccataatgagctgcctaggtccaatttccaaactccatgtcagtggtttgaatctgagctttaccatttacaagcagtcatgaaacttagggtaaactacttcacttccttgataatttcttcatctgcaaaataaagcaccctagaacccagtaacaccgggttactgtgatggttcactgcaatggttaagtgagatacatattaaagcactccaaacaccacaatatgctaaataaataattattggctgggcgcagtggctcaaacctgtaatctcagcactttgggaggctgaggcgggcggatcacgaggtctagagactgaaaccatcctggccaaaatggtgaaaccccatctctactaacaacacaaaaattagctgggcatggtggcacgcacctgcagtcccagctacttgggaggctgaggcaggagaatcgcttgaaccggggaggtggaagctgcagtgagttgagactgtgccattgcactccagcctgggcaacagagccagactctgtctcacaataaatagataaataaataaataaataatacaagttattaaccttattttttaatagaatcttattataacctttgctgataggattattagactggtgattcagagaaatataaatacatgggatcttgatttcaatgggggcatttggccaagtttcctatgagatctttgagactataagagagaatggtgggcagattcatggtgcaatcaaggaggctcacagctagatgaggggaatgcatcttagaaggagcctttgtgaactgatccaaattcacccacgcaacagcagcatccacctgcccctgatcttgagccggtaaaaaccagaccctctgatgttgtggggccttcccaccattaatctgtgtttaaaaatggcctttggtttgtctacatttgaattaatgtatcggtaatttataatttatacccagctacttccacagaatgtatgaagcaggtaacctgtttattcatgatttggataaaggcagagggagctgcttataaaaggatgacatcaatccccgagtgacagaatttggatgtaaaatagaccttggcaagccaaatcaaacaagatgaagtgcaacagtgacaaccaccaggtccagcacttcagtccaaaccacagccccccaacaaaaaaaaacccatctatataataacagggtggagaatttgctttgaaatagcatgtgtgttcaagatttaaagcttagatgataatatcaatcagaagttcaatgtgattgtcaaaaaaaagcaatgcaacctctcttaggctacaactgtaaacatagaatattcagaatgaagaaaaatgttttcctggtatgttctacgtgggacagatcacatatggactactagttcagttctaggcattacctagaagcacttgaggtcgtatagaggtggtttgaacagaaaaaatatttaatctaaaaattttaaattatactagttgaaagacccagtggcatttatttcctaatacttgcagaacatcatttactcacactctattctccctttaatcctctactgaaattgcttgcatagacgtcaccagtaatccccatatcaccaaatgcaatggtcaatttgatctctcatcttcctctgtcatctgcattcaacaatgttgactaccctcttatttgtgaaatgattccttttctaggttcaataacacttcagtatcctggtttcttcctacttcagtggtcagtcttttctgtctctctctgtctctcctccttttctcaccctctaaaagtagaatgctccagggattgatacctgacattttttccatctaactaggctcactccctaaatgactgcatccatatccatggcgttaaataccatctctatgctgacagctcccaagctgatatgtctagttctgacttcttcaaacctcaagattcaaatggatttctaaatcagaaataccttaaactaattcagacaaaaacacttcctgttttcttgcaccaacgttgcctctccctaagtcttccgtatctcagttaataccaacaccatttatgcaactgcatagtcatccacaattcctctctttccttcatccctccatatgcaacctccgcaagttaagtcagctgtacaatgaatatatatctagaatctaacactgtccaccacctccataactgcgaccttaatccccatcatttctcacctaaatgatgaaacagccacctaagtgtctctctcccttacaaactattcactctctagctagattaaaacataaaaagacaacatcctccaatcatcctctttccatcacacttagaataaaatgactttccattatagaataaaaatccaaacctcttgctgtagcctgaaaggccctcatgattcagttcctatctatctttccaattcctttttttaatacacttatgctcactacattccaatcacattgactgtctagctactgctcaaacataccaaactcgctcatgtcctggggcatatgtcctggttgttggttctctagtggcccactctctttgatctatcaggtatctgcacaaatgccacctgctccaatagatcttccatgactacattacccaaaagaaccctaaactctctatatttgttgaggaatttaacattgtctaaatttatatcatgttttacatgattaatatttatgtcctccactagcaagtcagttctacaacagggcttttgtccatcttcttcatcactacattcccagtggctacagcaatgcctaccacttaattggcagtaataaatgtctgcctactaatctgtgcattacaggtagccatcacacccagtcaaaagtctttatttcagatgtattaagcattcaaaaaatggatgggaacatgaaggagaagtcctgagagagagaacacagagaggcctttctatgatgcctaccctaaagcttgtactggaaagactaagactaagtgagagagatttccagaaatgggaaggatccagagaaatgttcagtcaagaaccaaaaggttgggagaatcttgattttagacttctcagaaatcaggatgaagtaggaagcagccaacccttaaccacaaaagcctaatttctacactgttctcttcccagataaggtaagtagaaagacttcatctaaaactattggtatttcttcattggtattccaaaataatggtaaactgttgtttgcactgaaaagggctttgtcgtgtgtgtgtgtgtgtgtgtgtgtgtgtgtgtgtgcgtgtgcgtgtgtgtgtgtttgtgtgaatggccacagctactgttgggcagcttctcttccatagctacagcttacagctctcaccagacccctgaggcatgtttcctttccccttgcccattcaaccaggggtgatcacagcttccagctgttgctagtctccagcctgttagtcatcagctcatgctaagtctcttatttcttcccaccacctctgcaaatagtacctttaacaaactctcttcaattaaaccctttgagtatgccattgtctccctgccagcaccccgactgaaacacaggtaggacccaaaagatgaaacccttccctggggcagcatcttctatccaatcaatttaatgtggctgctatatatctccgttttggtcactacctgaactccaagactggtagattaatttaacaacaatctctgtttctagctaataagccattgaatcaccattcccccagacatctccttgatacggtcctacctgaatatccttacacttacagttctgttctatttttactctccacttaaccctgccttcccaaatgcaacccactagccattccctaggatgcctctgatgctgctggtacctctgcaagaagggtatcaggtatcagccaaagcagctaagactcaaagatgagcatgtggccctgcagagcaattggaaaggaaaccaggaaagtaaagtagaggcccatggtggaactagattgtaagaactgaagggatggctgcaggtgcatggccaagttgccagacactatagatggtagggtgtggagctacttgctgtggtaaagcctggtttgggatggggacaggtctaagctaacagaatgaggttcaccctgcctgaaggtgagcagggctagaagcggtaagagtgaatattttcctcctcctcaagccttcctcttacccttcaatatcttctgctcaccaccaacctactcaaattgctgattctcctaaaatatctgttaccaccaccaagtcctaccacttgaggagactatatgcacatagaggcatgaattctgccttctatttctgctgttttctgtagcatttagcctagtgctaagtaccaagaggacttcagaaaatgtttattaattcactagctaatcttggcagctgatttttcagtgactctcacagactcaaatcctaatactccttgacaacccatgcctacccatgctcttcctctgtgtccaaatctctccagccaactgtttccatgtatgttttattcaaaaatcaaaaattacacaataactaaatttccagaagttgcatgccattgactcttgtccttaggaaactatttggaaacagggttagatactatagtttacatatacattatttccttttcttcacaaaattcgttaatggtgggatgtgacaggcattgtgacttccactttagaattaatgaaaccaaggctcagaaaggttaagtaacttacacaagactgcagggcttgtaagtgattttaactcagattagaatccaggtctgtgcccgctattccacagtgcttctccgttagcacgtctctcttcctaccccaggttgataccctctttcctccacaggctaccaagtgggtgtaacatcacagacagatgcccataacagggcatctggccatcacgtacaacttcatcactggcaggaagccaagaccccaatccacatgctgagtcctgacgcctggcttccacttgctgttgcactcactcctcaggagtgatgctcaccaacactctatatggaaagcatggctccaagttctgatgtcagcaaagccatgtgtgctcatacatcctcagcctctgatcatctgtcaaggcagatatgaccagcagccagaaaacactctgctctggtactcttctaggtctccagctaaaaaatccgatcacaatcagcagcttgttgtcttatttctcctgttcctggttcacctgaatggataagatgcttgtttccatttccctctaaaagaagacccaagttttctgagaatagatagccaggaactcctgggactgtaagatagagagatagaaggaacaattggtccatagatgagaaaagtatgtggaaacgtaagattaacttagggttttaaagagccatagctaagtaagcttgaccctgtcatagctattcaaaaggctagcatatgtgaccagtaaaaaattataagccctctgtatcatacaaatcttgactataagccatagttagtaactgctatgctaaaacaggactcaataaactacttcacaccaacctcagaacataacatgaccacaccttcttttgggattcccatagcaataatcatatgtgcatttatgaagcatttcgtctcatccttagaggagaaaagcattttctccatagtaacaatacactgaatgatcctcccagagcgctgactattgtcaagtcagggaatatatgatttaaaagcattaacttgattcaaactgcctgggtttgaattcagactatgatacttactagttggatttcctgccatgagttacttagccccttatgcatctgtttcctcgcttataaaactgtgataaaaaatagtacctatttgatggcattattgtgggaattaaactaaatcatacatataaagtaaatggaagagtaccctgcagaaagtaaatattcaataaatgctaactattattaaagacaaagataagtggaagccttctgctttttgccatgataaaatacctgatttcaggccagtttcctactggaaacagctataaagctggacaaaagatgtgaggcaactatttccaggcagtggacaataagcggcataagactttgtttcctcagaaaatgaaaactttatgagatgagcccataatcatcctggctttttggcctagagacaatttcctgacagagagctagagtcaaagcataacacagtggctgcactgtgctgaggaggcagaggtcatagtttgtggcagctaaaaaggctagaatctgcagggtggattattagagacacatgtgcaaagagggccccatgagtccaagatgaggtcctctatgaattcatggctgagggctgagttatacatgcgcagggaaagacttccaagattttctagacagcacccattacagtgttaaaggtaaaacgcagttactagaggttgagcactggtggggaaagagaagtgctggagctgattggagttccagtcctgccagagtagaacagccttctttaaatgttaaaacatctgtggcatcaatctgagattccagaaatgcccctctgtaggagtaagatctgtaccccaaaataagacctactatagtctcaccctaataaagactacattcaaactacaacaaaatcctcaagggaacagtttaaagattgagtcttaccaagttagagggacttggaaaatgccatgagttttccacagatatgtaataacaaagcataaaaccaagcctgcaaaagttcaaggtgatcagccagtatttaagctgcaagaattaatacttttctaagggaaacaacagaatctagtgtctctaaaacatattatccaaaatgcccagtatttaattaaaaaaccatttatacatacaaagaaaatggaaaatgtgacacagattttggacttggcatgtgaaactttaaggcagctattataaatatgtcttaaaaagtacagaaaatatgctcaaataattaaaggtaaatatggccctaatgagtgaacagataggaaatctcagtggaaaagcagaaaattacaaaaaaaagatgcaaataaaagttctataactagaaagtacactaactgaaatgaaaaaaaaaatcattgtatgggcttaacagcaaattggagatggcagagagttggtgaacttgaagacagattaataatatcattgatctattcttattcttttatttttttcaccttggctgtctgcctagagacaatttcctgactgcagtaaagagctagagttcaaacagcacagaaataaaaaaaaaaaaggggggggggaagattgaagaaaaatgaaagagctgcatgttaatatttgacacaatattaaataatctaacatatatatatatataactggaggagtcccaaaagatttttttttaaatgagattgaagcagaaaaaagcatgtgaagaaatagcagccaaaaatttcccgaatgccaatttgattttcactgacttacaggtccaagaagctcagcaaacccaagaaggataaataaagggaatcaaacctaattacatcatgaacttctgaagacctggctaaagagacgatcttgaaagtagccagtaagaaagaaaaataaattaagtacagggaaacaaggataaaaatgactgctgaccagaagacaatggaataatatctctaaagtgccaaaaaaagaaaaaaaaagagaaaaaactgtcaacccagaattatattctccaataatgagagaaaagtaaaagcattttaagataaacaaaagctaagtgacagaacagccttcgggctgaagggaaacaacacaagatgaaaacccagatctacaagaagaaataagatgtactgaaaatggaaaataaatgactaaatataaaaggttatgttatcattctttctataatttacagaagataacactgtttattaagacaaaaatgattataaggtgaggtttatagtatacatagaagtaaaagataggacaacaatcatactaaagacaaggtggacagtcatatgaaattatcctcctgcgaagttattacacttctgaagtgggaagtgagaatcaagaaacaggaaataaaaattgggaggtgatgggtaggaagtgagaaacaggaagtatgcaatgtcataccttacgtgtgaagagatacaatgttgactctaaatagactaacataattaagaatgcattttttagccctagagcaaccactaaaaagatactaagtagaggtataagtaagaagacaacagaggaaataaaatagaaaatatgaaatatattttatttaccccaaagaaggcgggaaagaagaaacagagaagcaatgaaaatcagaaatcacaaatgaaatccaaatagcaagacatagacattagcctaatcacttcaataattacattaaatataaatataccaactctccacttaaagggcagagattgtcatgctgaaaaaaaagcaagacccaactatatgttatttataagaaaagcattttaaatataaaggaatatatgggttaaagtaaaaggatagaaaaagctgtaccctgcaactacatgatccagcaattctactttttgacatatgttcataataatatttgaatgtaaatgtcctttgtaggtttattcgtaataatcaaaaactggaaatgatccacttgtccataaatagtaaacaaattgtggtatattcataaattcaatactcaataaaaaggaacaaactactgatatgtgcaataaaataggcaaatctcagtttgctaagcaaaaaaagctagattcaaaagattacatagtgtgtaattccatttatatgaaattctagagcaaagctaatttgtggggatacagataagagtgatagttgtcttgggtagggaactggtgagtaaaactgactgcaaaagggcacaagagaacttccttcgatgatggaaatgttctacttcttgatcagagttgctagctattacagttgcttatgtttgtcaaaagtcatggacctgtacacttaaaatacgtaaatttttgtggcaattttacttcaataaagttgatttaatttcttaaaaaataaagacaattaaatgcttctcttctctttttgccattacatcaaacttcaacttacgctcattcaggaaagaaagaaaagagaaatggagaattagaacaaaataggagctcacctcgaaagactttaactgttccctactccttgtctattctgaatgtagtctttgaattaccatccaatatcattattattgttactaatcaactttgttgatcttcagtagcgtttagttatctataaaaatctagtttttaaaattctgctgtggatcagggaagttcaaaaacacaaaatacattcttgatatggtttggatgtttatcccttccaaatctcatagaaatgtgatccccagtgttggaggtggggcttgatgtgaggtgtttgggtcagggggctgaatctttcatgaatggtttggtgcctttccccaggtaatgagtgagttctccctgctgtggttcacaggagatctggttgtttaaaagagcatggcatgcctcccctccctctcccttgctccttctgttgccacataacacgcctgtttccccttcaccttctactatgattgaaggtttcatgaggctctcaccagaaagacagatgcctgcaccgtgcttttttttttttttttttttttcctttttgagacaaggtcttagtctgtcacccaggctagagtgcagtagtgcaattttggctcactgcaacctcttcctcctaggctcaagtaatcctcccagttcagcctcctgagtagctgggtgcacaccaccatgcccagttaatttttgtatcatttttagtagaggtggggtttcaccatgttgcccaggctggttaaaatgcttcttgtacagcctgcagaaccatgagccaaattttctttataaattacccagtctcaggtcgtttataacaacacaaaatggactgatacagtttttaatccaagaaacatatccagcccacagaaagtacacagaatacaaaactagaaagggttgagtgtgcctgtgcattaggtacggcatcaaggcaggagctgggaagtaaccacagtgacctgtaaacctgtaagtgcaggtccatggtccagtggtatttgtattgcaagcttatgaatatgtggagaaaagagtttgcaatctgtagattctattgctaatttttaccagtccactgagatatttacagtttcaccattataagtgaaaccaagacttaaatattttgcaatagggcctgccttttgagtctgttccatcccattcacccctcagtgccctgatgccacttacacccacagcatctgggaaaacaatacaatttacagttacttagatccattttgatgggctttacctcagactgctttatgatttatggaaaagcagaataaggaaaccttctcacctttaaagaattccacatagctcagcctgaaggcattattccccagcggtttttatttcttaccttgccgtttgtcctccaactcatctccttggcgcacacacacacacacgcacacacacgtacacatgcaaacagataagtctccaaactaccaaaatgacgaagtgggagaaaagattgatttatgagggtaatacaaggggtgtaactaggagataatggggtgaaattgagcaaagggaagtgtaggctgaatatcaagaaacatttcaactcaacagagtgtgaagcaagctcccaggagaagccagggaagccctatggctggaaatcattaaacactcaaccatgggaaataacaggtggcctggctggtagaaaaaaagggagcaggggtgaaatttacatttcactaaaatcctagaaccactttgctaaataagccattctgtaacggatgagtgttccatctctgtattatctctctccctccctgccccaccctgacatataccccacaatcacccatgctctccacacaccttccaacatgatgattgaaactaggggactctccacacaccttacagggactttggggctccaattcacattaaccctctctccaatttcccttcatttcccacattttctttcactaaccattattatttatgctagtgccccactagcttccccagggaaagcagacacacatatgttcacacacacacacacacacacagtaggtaggaggtagataggagggtgggtagacaggggattcacactctctgtggccgttggatagagctgggccagttaccaagaatgaccaaaacagtactgctagatattgagaattagcttatatttcattgccttctatttttagtattttgatactcctttatgttcccacattgaacctggtcaaaagctaaaaatgcctgtaactagcacacagctccccacaaaccttgcagccagaaagttgtcccagaagaaaagctgacaactccagtcatatgcatgataaggctgaggcaggttgccaaaccctcctgctgtgaagatggacaaagggacaagaaaaaaatcacaatgatgctctgatttcaaagccaggtgaggaacgggattgggtgtgaccttttgtttctgagtctgaggtgtaaaattctgtggggtaggatggaggatataaactgtggggagcatgacttgatagtctagagaagttggggacaggacagccacctcagtggctgaggtagatcggcataaactgcccttaaactggacccacagggaagtggtggccgaggcatgcagcattcacagcatcaaacccaggggaccatcactgcagatttccagtctgttagcgtcctaaggacaaatgaaaagtgtcacttctagatctacgtgtgtgcaaaccatggtagccgaaggctgaaaacaactaaacataagattgaaagctgatcaggtgagaatgaaaatgaggcccaactgtgactaattctatgctggctcccgcagcgcagtgtctgctaaggacaactggaaaagcttaaatgttagcatgttactgccctctcctgggcaaaaggtcaaagtcggtacaaatgtttgagtcacaacttgttcaagtttgtgtgccccatagcagttaatctttaatccactcttttacaagcctttgaaaaaaggtctgcttttaccgtcttccacgtgcaaacctctctccatgaccaccaccatgttactttttccattggaaccaagggcttctgagatcacagacttcatcgggggtcataagtaattgtgggaaagggattagcatcatttgccagaagagctgatatgacaggggtggggaggacagcccagaacttcagagctgatctactctttaagcaagaaccccctttttctgtttattgccctgcaactgttctaggcaattctgggtctgagaaaaaaccctcctacaatcttcatcccactacatactatgtctatacttcagcctcaggcacaggcactatttgggaagctaagttgtacaactgaataatgtaattaaatgtaattcattccaaatgttaagggctagaatgtcttctcaaaattaatgaaaactcaattcatttggaaataattatttcacgacttttagttgctgtacaaataacattttaacagaagatacatatgaacaagtaaaataaaatgaggcaaattaattaatgatatcctaataggcctaagttagataatcatctattttctataaagttcccaagtaagttacttatttccaactcttcattcatacaaactactaatgtatataaattaaaataattcaaattagtgggagtttagaatacagtatctttcagtagagacaataatcactttgaaggattctcatcctcaacaaatatttatccagagcctgctgggtacacagcactatatgggagagacacagcacaatctcattatcatctctccctgtgaggataaattgcagaaaatcctgaaagccactgtcggagttatcttgcttggctggcattttgatcacatccttgacccctctggtccctcagaggccctcccatcccggttcatggagaaaagcatctctttagcagcaggtggtatggggtgggggtggagcaagggatgccacagggaattaggggacctgacttctagccttagagcagccactgctcccgtctgataagagcacacccccaggcacttctcagtagatgtgcctgcctgtgcaacagcacttcaggaaaagttcacttaatcctcacaacagccccataggtggatcttcttattactccaccattttaaggatgaaaaaggagaagtgtacaaaatttaagcattttgcccagttacaaaaccttaagaaatagagtcaggattcaaatgcaaggctgtctgagtcataacttcacatctgaaatggaatcaacccatcaggcttgctattttcctgacaataatttgtttatgtaaaggatcctgaagtcagatgatgtcacactcctactcaagattctcccctgactcccccattgaatttagaataaaatccaagcttttgccatggccttcaaagccctacgtgaactggcccttgactacctccgtgatctcatctctcccacttctgctccattcactaagccctaagcatggcctccttgtttttctttaacaaacatgtacatttctactccaaggtctttgtatttgttgtttcctcagcctgggacgctctcatcccaaagaactacattcctacctcttcagttcatttatgcctctctgctcaatgtcaccttatccaaaaggcctttcctggcccctctacctaaaacagaaatttccgtcactgtctagcccctcacctatagtccattttattcacagtactcatcactctcgtctatgatcatatttgcatctcttcgtttattgtctttcccattacgatgaaagcttcaggaggcagtgacctggtctcgcctgctcactgatgtatcccaggcactagaacagttcatggcacatagtagacgctcaataagtatctactgaattaatgaataaataaatgagcataaatccctttatcaatatatccagatttgggtactttaagtttcatttgtaaaacaaatctagaaaagacaatctcaaatttatatggatgggcctattcattacccaatttatctaatttcatccatttctgtctaggtcttatatcattctccaaatctgaaacaccctgttttgaactgccaccatttccttcctataagtgccttccatgatttcctaaaacccttctttaaccacatactgttgaggagaggtaatattccaaagccactatctcagtcatacaacccaacatttcacaacacttcacacaagtctaaatcaccaaatgactcctatgtgttgctacagatagaatccttgtccatgccccaaggtagcttcccaacagaagcagagctgtgtgtacgtctacttgagacgcttctcccagctggctggcctgctgtccacctcttgctctgtagccaggttcttgcaaagctccacatacagagagacacttactgagatgcctttgagaaaaatggtaacagcagctccagttattcagcatctttgtattttacatctacttcctctagtcctcccaactctgcatggtaggcttcctacttctcattttacaaacaattaaaatgagcatcagaaaagtgcaacaacttgcccaaggccatgaagttagttaggggcagggacgtgaacccataactgacttgagtccaaaaaagaaacatttcttatagttttaacatagaaatataaaggctttcacctaataaatcaagtatttttcatcaattgactatatgtctcagaccatgacaggtaatctagaatacagaagaaatgtggaagttcccagctgagagggagagctatgggccattgattcagttatctattttcttacatgcttacggctttaattttttaagttctggactgttggttaagttaatttgtatgattccagtaaaccatgagttgtttatcataaatcacttctcagatggctacagctagaaaaataaattacttttctagggtgatgtgctttttaagaatagagtggttcaatagaagttcctaagttgacactaatcataaataggggctaaaagttcagggtctaaacaaattgtggcaggccaaaaacgaaaaacacaaagcaaacacacaggcccacaaagcaaaatgcaactaagcacctgctactcttcttgttccagattcttaatccattgaaggtatcattgttatgacattagaaagagtgagaagtggcagggtggtaagcatttttatgaggtgttacaatgttttaactaacctacacctccttctgaaggctttgttttccgtatcactccagatccctgtcacactgcagggtgttactgcttgagtctggctctgcctgtgtgatcctggagaaagattatttaggagctacctaccgctgttgatacgagaaccttggtcttacctggcagaacagtgataagttcctgtgaatacaatggcagcagattttctatagaccacttccactgtttcctctccagagctagccttttcatagagcacagtgggcagcaccagtacctacctgtgtgtacaaatcctacagtgagatgggctgtattaagagtcaatgaggggtgatctcttggcttcagaagcaacagtacaaaggcagtcactaaagcaggtcagtctaaccccagctgaagtctgtgagacatgggaacataaacaactagttcttcacctgattgatttcagaggcaatagagtctgatgcagtcatacttggaagtaaaccatctattactacatttaattccaaggaatgactacagatgccaaacagggcagcctaggatgccaagccactgctcatattataacaacagtgcatattataacaatgcaagaaaatggaagaacaagcctcatttgggaacagaagtagcagctctgtgggaaattccagagtatgatgttagacaaccccatggagagataatgagtgaaaatattgatgggtcaaaagaggaaacaaggacagtccagtgttgaagttagtataaatatgtaaattctgtgtgtggagggggtaaataatgtcttcaaacttgtttgctcagttacccactaaaaggattcttaaaaatttgttttaagctgatacctaatttcattcatcataatctaaatagttacaaagtatataatttctggcatataataaatactaacattttaaaataaaattacttcaccactcttccaaattattccatggaatataaagaccatagtaactttatatctaccaccatccatttttaaaatgtaagattaaccctttttttaagttatacatttgatatcattccttcttttccctgacattgaattcctcttccatctcccccacaaaattttattgtaatgtaatatataggttacattatatacatgatgcttgaaagtattttactggtcactattatacttctttgcaaccaaaatatatatatataaaagtttcagtttataattattttttatttcctgtaatcataggtgtttaagtgttgttttctggattgagatagtgttacaataattatttgtaaacatttggtgaaaataaaataaccacattaattttgacagacaaatattaaacataaatggtaaaatcttattacattttatgatatgtgtattttaccacagtttaaaatatgtgtattttaccacagtttaaaatatataaaaatgtattattaggactgttatcttttaataagctggagacagagatagtctatggttcttgatgaaaggatgcttctcctaacacaaatatttccaattatccctttatgtgacccttagaagtgttttcacctttgagcgatgcatatagtaaaatttgggtaagtgagaggtgtgattttctttggtaaggagagaaaagagcaaccatgaaaggagaggtgacactttctctagcagatggattttaggaaagactatagtaggaaactgataatctgaacattaagtcctttaaaatgatccatgccttcatactgctttgaaagtcttcatgtactcacaaaagtatctgttctccagtttgttgctgtgttgcagaacttctcaaacactttagacctgttgcttttcccactgactggtcagtgtagctaataaaccatgaggttgcacgtatgtatcccctcactgtctacaacaccattgataggaaaaaactgaggctcgccatgtgaattgtccttggattatagcaatgtaggctgcatgttgctttcttctcctcattatcttcccatagggatgagtcagcagcttggtccagcaagcagcaaaacccatgaaccagcctttgccagggcagttgtaacatagctcagacagtcacgcttcacctcactggagaaatgtggcccataaagggaaaaaaagacaatcacaagcccatatacgtggttttcccatacatccagtagcaatcctatccacatcctgcaacagaatgtttcaacatccccatgggtgttctacattgtatgtattcttagattttcaataatctgttccatcctctccttttcaacttgaaaccctagcatcaaaagtggctgttgatctgataggaccccacctttggctgtggctcattttccagctgcagtccaaatcttccagtgatgacacgaagctatcaccatggcaaccatcactgacacacagtgcaaagctgaggatgaggcatgagttgttctccaactcacttccataacgttaaaccacgctgtaggctttaacctactaccctctgggtttactgtcctgtcccagaaccagagaagcagccccccatttttaaactgaaattgttctttcactctcctcaggacctctccataagaaaacaatggcaaaggtgaccatatggccacctaggccctgaaagtatggtatttactcactcaaaacccaacaatgttgcagttaattgtagaagtgccattggggaaggataagatggtatctaaaagtagcacatgcataaatatgatacaaaatgtcaacttgttgtctaatagctacaagaaagaaggttctggggcaaatataaccacattgcctcacagaaaaagcctaaagaaagtctctgccaggggggatccttggggtaaatgctttcttttcataaggatcaatccaaccctgccccatatgtttaaatgctaaattcaaaaatgggctgcgatgaaagaacaacaaacctttgttagccctctggggggactaaagatgctgagatgtgttccttgctgaaagagcactgtaaatagcaaggaagtcctatttttctttgctagagataaagcacagtctcacagatttgggtcttagatttttttatatatatcctctcaaattcatttttgccagagtcatccggttctgctctgatgccaaagatttcaacacggttggtggtggcagagccaacactggtgacttaacaaagactattcactcaaaagccacatttctgaagagaagagacctggattctgcaaggagcaacggtacctctaattacaaaatttctgaaattcccctaaatgtaggttacattaatctcatcagcatgccaaggatggtgtgtcttgatttacttttgagtaaagactcaaaagttgtggtgctgcgacacccggaatgtaaggaaggtaactggtgactaatgggaattccatggacagatgggccatttagagtcactggcattgtggtccctctaaactgatgggcagccactcagaaaacccaggaaccacaaactcaccagactactgcagaccgctttttctctgaaagaactaagttcttgggaaaggagggaaagcagtcttaagagagtgttcccagaggttctactactttccctgtatcacaagtcctcagcaggggcaggctattagtccctgcagcaggtgatagcagaattatctgtgtggttgccggactttggagggaccattgcttcaaccctaagagtgcccagagatccaaatcagggctgaatccactgcctgaagaacccatagttcctggacagaaatgaggggagaagggagatgctggtttgcatttcagcctggacagcaagcaaacctcagctaggtaagagagttattagagaaatctcagaagattctggttgctacagagacgtctcaaacagagtttccaatctttccaactcctaggccctcccacatcctccagaccctctgagatcaaaggcagaaactttcctctccctcttcctgcctcttctctccagggttgctacaggtttccaggacccttaatctgaacactcaaccagagggaccacagggcctcctggaatcctttaagtgtggaagctgccgtggcattcggcaatcagctcaaagccaccgacataaggtgcttcaactgtgagggactctatggcctcatgatcaatataacatctacactgccattagcctctacaggagggtgtcaggtaccatgtggtggacatagcatcgttaacaaacgatttcatttacatacatgttctagtattacagaggaagatcacaaaccacgatgccaagaagttgcattcaatgtagtgtatattgatgggccatgagacagagatggatacagcctaaagggaatcagcaaaatactcacttttagatatgtaccaggctgtactgtgtttgcagtacagaagcctgcaagaaccaaaccaatcaaatttatgtttattatgaactttatgcacgtaagcactgtgattctccaaaatatactaaattcattaaggaggaactcaaaagagagcaacaaaaagtagtaaacattatagaacaggcacttaaattacctttgatcatgatgtcgattacagaacctaagaagaaaaaataagagacaaccagaggaaaaagaaaagttaccactttaaggggaagatattgatcaatttgctatttctactgaggctaaggaatggttttatacgcagagggaaaatcatcgtattaatctatggaagaatagccagtcaaaataggggaccacacactagaagttacaaaagaggttataaagtattcttccttgttggaaatcatttaaacagagtagatgaatcaacccaagagtgtttactgagaccccagcccaggctcagccccaaaggactgtagcattggggttgtaagtgggagctctgtagtcagatttacatgccttcaaatcccagtttggtcacttatgggctacacaacctaaggcaagttatttcatctctttaagtttattccttatttggaaaataaggatgataagagtacttatctcattaaattattatgaggattaagtgagaacatacatggaaaagcatttagcttgctaggatgtgctcaataaattcttgctattattgtttcttatatttgactccttgcctatctaaaaattactggcctaggtttctcatttgccagatcacaatgaacaatgaagaaataaacaaaaggagtgctgagatgcctcagattcctgcacgacagtaaatgccctttgctctctgagcctactctcatgcctctgactcatgctttgggcacaattccttaaaaagagtttccacttcaagcttatggagaaaaataagttttaggtaaaatattactttggtaaagcagttcaaccaagggccagaattttaatacctccagaatccctatcagaaataaattcaacatggaatgacaggcctagccacctacaacatagaaaaaagctaagtttgaccagggaagagaaaaatgaaggacaaaatctccaatccagaagtggtgcttctagagataaaaatttcttacacctcccactcccttgtgaacattccaagaagagcaaggccaagagagagtagtgatatggcctgccagataaaatacaggacacccaattgaatttgaacttcaatgataaatatcaaatacttttagtataagtatgcaaatattacaatatttgaaacatacttctactaaaaaattattgtttatttgaaattcaaatttaattgagtgttctaattcactaaatctgacaaccctagatatagtacagggaacctcctgtatgcagactgactgaggccagaaatgaaatagaaacactgaaaaaacccagagtgatccctgagcagtctctgcctggtagacaagctagagagcattcattccagggaaggataggaaccctgcagcctgaataagaaaatccaacgtaaaaaccatttagcctaaatgtaagggtgaagaagtcccctcgggcaaattagcttgtcttgttaacaggatattcaagtcaaatgatccagtctgtttgtagaaagcttactgcatccaaaagccaagcacatgcaattcatggttggtagagctgtataattgcacccatttgtcaaaaatctaggaagacttcatggacacttagcgtccataccacaggctcccacacacactgtatttgcttccatcacagcactcaccacacaaaatatgattaccaatttatctgttcatctctctctctagactgtgagcttctcaagagtggagacaaggtctaatttatctgtgaaaccacagccctaatagcaaatggccaccatactatatagctggttaacctgtgtggcttctgtaagggaattcacaggaagaaggggataaatagactttattggtaataagaaagagaagaggggagaaaaagaaagaaaaagaaagctatccttattaattgcttgcaatagattaatacatttatctgtacaggtcttatacctaagcacaattgatatatcaaaagtggatctgtgtatatatagcagtaagagagaaaattattaaagatttttattgggtttttttttggttgggggtgtgaagaaagaagtcaacgtgtatatggtgatataaaaataaaaatgtatataaggaccttaaggatgtgtctatatgtgcatgtcaggtgcccacacggaatgtgttagagcttccgtaaaggaagtgagagatattagaaaaaagactcaacccaattctctttctaaaaatattcagatctctgaagcactcgattctagaatcagttctcaataacagtccccgttgtgttaatgaaactgtaactcatcttacccactcacctttatacagtgtccgcaggaatccacaaattaggatatagttagcaacggtcctcctgaatggcattacagaaatgaaactaaaatactctgaaagcctaatactgcttcaggaaaatctccaccctgtttaggagccctgtgttctatcccatggaacctctcctcctgtgtttcctctctccttcctgcattcctccggtgagaacctccctatctgtacttcccctctctatcacttgcccccgtctttctttttcatagattgttgaaaactatttaaaagatcctgaatatcaaagtctgtcttcttctggccatgtatttaaggtatataatagcatgaggtttccaatcccccaggagctgggcatgaaaataaaatgttagaacttctatttatatttatttttatctcacccacttttaatttctgtttttttgcgtgctttataatgaacacaacatattagacagtatacacatataattatgtactaaataaacatgctggtcattggcattccagttctgtagggctgcataacaaaccaccccaaaacttggtagcataaaataacaaccagtgtattacgctcacaaattctgagggttaggagtttgggtagggcacagctgtgattgtttgattcatttccatgacttttggagcctcagttgagaagacccaagcatctgggaagtgactccagggatgcatgctagaatcatctgaaacttctcaacttacatggctgacacctgggctcagccaggaccactgaccagagtacctacacatgacctgtctgtgtggcttctcacagcatggcagcagggatgtccaaaggacaaatgaaccgagggaaccagatagacgctgcatggccttttctgacctggcctcagaagtcacgtagagccatgctcttcatactcaattagtcaatgcaattatgaagctgcccagatacaaggggagggggctggaccctccacaccatgatgtgcagtaatgaccaggtcacattgcagaggagaatgtgggatgggagagattgttgtagttacctttggaaaataatctacaccaatttgcttattcactctgagatctgtcccccatcccttctctttactgctctttattgcagagagcaaaaaccttgcagaccacatttccaagcctcccgtgccaaatagattctggctaggatttaccaatggagatactgccaagagatggtgggggtgctggagagaggagaagctacaatatatctccccctttctctctgctttggtcagcatcttcccaggagctgtatctcctccctgactgacattctctgccaggcagccaccacttgttccattctcagtggacaagttctaccttgttccctgtgacccaaaggttcacactggcttcctgctttgctgatctggggttgcacatggggttggccatgccccatttagctttcagctcttcttatccctttgtccctgattcccagcattaaattctcccttttgaattacctagtatgggctgttttcttcactgaataataatatacacagactagggataaaaacccccaaatgttttactcatcaaaatgtgggatttgaaaagcatgtagactattgacatagtttcaaaaccttggaatgggagtcaggctgcctgagttctggccctggaccaggcatagctacgtactttggtatttgcttagcccatcggccttagtgtcctcagccacacaatgagttgtcctctttggtgctaacattctgtgattctatctttcagatataatctgcctactaggtctgggcctaacccacaatggcattgattctgaacgtctcacctcagcactaaaaaatatctcagcacaaacaaacgtaatttgctacatgattcaacaaagggtgctggccaggttagagatactagagccatctccactgcaacaactggcccctgacatttcacctgaggttgaaatgggacagatggagccagcacatccggttaatgtgggagctcagagcacttctacctcctcagctttagataaaagcaagacagcattggtcatcaggctcttacaagtaaatctggccatctgcagactgagtcacatccaagttcaggggaaccactgggtgacattcatatgaaagtactgtaatcccagcactttgggaggccgaggcgggtggatcacttgaggtcaggagttcaaggctagcctggccaacatggtgaaacaccatctctaccataaatataaaaaaattacctgggtgcgatggtgcacacctgtaatcgcagctactctggaggctgaagcagaatcacttgaacctgggaggtggaggttgctgtgagccgagatcttgccactatactctagcctgggtgacagagtgagactccgtctcaggaaaaaaaaaaaaaaaaaactttttcttctttgaagggacaaaaaaaatcttatgacacaaaaggaacataatttgttgcaaaagggaagaaaaattgtgcaactgagacctccaattataccatcacaaggaatagctttagagaaatgctttcattatagaactgatagaaacagggacaaagtcatgtggttgcccttttttaggcacataaatgagccttccccaatgtacccatcctttgtctcttttctattccaggagaagaagatttgacaaaattgatcatgcatttaacaaaacatcttttaagatatttgaagtaaataaaatattataataaactataaacaaatgtgaccacatattttaaggtcaaatattctatttgattggatattatttgaggcaaatgggttacatatttatttagacctagcattccttgttagcagagagattttcatgctatttcttgtagcaggatctgacctatagataaacctaagtactattcagaaacacaagctggcaaaatgcaaatccaaaaccaaaatctgaaagtaatatcaaagatgctgaaagattaacagaaaggacagaagactcaccacacgtctgcagcagacatagaatcttgcctaaatcattatgttggctctatttgaacagggtagaacctgtgaggcattcaaattcaaaactttacttcgatgatttcaaggagcaagaaacagctgaaccggttctaactgaagcaaaatgtccttattctactcagctaaagtcagttatgcatccaaataattttgagatgaaatgagcagaattcatcatgtacactggagccggcttcttcacttaactcaattccacctttgggcctatatatggcatacaatactttgaaactacaaaacaagtagaaaaggcaaatgaagagataaaggtaagcagccagtggtttcaattaagacacaaagagccatcccatttaatgtgcctgctgtatgcaatgcacttttctagagtacgtgcagtgtgaagatcaagaagatgcagcctggctctccagggggccccagctgcatggtggcaccagacgcgtatattaataacttgcaaataagacaagggtgacaagggctgttgcgaatacagagtgatacgtaagaatgcaggagagaaaaatgcgtcccctgtttgaaggatatgggaaggcttcctagaggaggtgaggttgcagcgacaccttgaagaacttacttgcagaactttgacagtgctgggatggagtaggggatatgtctgaccaaaggcaggaacggcctgagcaaagccaaagaaatgtgtcaagggcactaagtgtgtcaagtgtgcactaagtgcacgaatgagctggagcagaaagaggaggaagcaatgcagtgggcaggaggcgacaaaggccgtgagagatgaaccacggacgcccaggcacgctgcggaggaaaacaaggacttcattctgcacgcaataatgagccattaaaggcttccgaggaggcagatatgattagatctctgatttaaatgacaactcgtggcaatttgagttatgttcttaaaatctacattcctcagagaaaattttgcaaaaatctcttatcagggcagtaactctttctctctgtcacagctgccctgaattctcctaccctcattctgttctataagcctctgtgtgaaaacaagcgcctttttctccaagtcgtttcctccaactgttcgttccgtatggactctgggtgccctgtgtgggctcacatctgtctgcccagcaacgagccgcatcatcacgagcatacctggagggtcttctggggactcaccagtaagcccgtgagccacagaacaaaacttccatttccctgtaaacatattcacggcaatgaagcgcacgacggaacatttttacgtggatgaatagcatccatgtcccttaaacagttaactctgaggttaacttcttccacgatttctctagactcaagagagtcagagttcagatcctccctctagtcctgcaattaaagactctgaatttctaaggaaagttctttttcgtcctctacccttaatttctgtgtataaacagactcaatttatctagggcgagaattccaatgctgtatgtcccacaggttaaagagagttcaggttattttcttataggcataaaaaataaattagattaaaattcaagtggagcagaatagtgaacaagaaaagagaaagaaaccagcaaagacagggtcaggccacaccatgccataccatcaacctattgcttccattagctgttctcttggggatctgtcattttctgttgcttccactggactcggctcagctgcaacaagtctgccattgggagcctctcctgggaggtcggcctcagtaaatatagtaactagtatttttgatgtaatgcaggatatgggaagaaaggtacttagggcatttggtgtgtataccatatacatgtgtatgggtacacacacaagcttgagacagagagagagaggactgcaaagagaggcttctaccataaagcactactgaggtatctctccgtggaaattaaagacagaagcacccaatgaactcatcttcatctcattggtaaccttccactgggccagatggagaaggctaatgctataatatattagagccccctccaccccaatctctgagaagcagttcagcttcctcccatgacctgtctcctgtgggaagaggcgagaaccacacaggaacgagtgctgagctcctataaggctactagaagggaagagacccacccaggagctggcggtttctcctccacaaatgcctcccacccagtgccgactccccagcacagcagtcggctccctcatctctcttgcctcccttgatgacgatgcaggctctgcggaggcccatcttgggtgagctcccacattctgaatcttcgtggtttactgtaacctcccagaggatgaaaagggaagggagatgtgaaaacccagattaggcaaattactaaccctgacaaatataaggacataacgaatctggagctgacatgtccaaggaggaaaccacaggctgcatatgactgttggcacttaaattaactgaaattctccattctcactagtcacaggtggctagtggctatcacattggacagtaaagttagacaacatttccgtcacggtagaaagttttattggacagcgctggtctcaagtctcttgggaagaggtctatttgcaccttggattaggaataaaatgtagtgtttgtgataaagtgaaaagagcactaattaggattaattctaggctgagttttactaatagtggactaataatggcaacacaatctgtaaaaataatggcactgaagtggactaaagctttaccttacagagtaagataaggcaacagggttcaatggaaagcatgggaccccggaattcacaagaactgagtccaaacgccagcacagtcctgatgcccaggagcaagtcacatgagctgccctagccttcacttcctcagctgcataatggaacatcatcatctatctcatttgccaaatgaggtcatagatttaaaatatacttaaaagtgtccagcttgctgccaaatgctaaacaaaagctgggtgtacccccataggttagtacacaatatgtttctgtctcctttttccctagggaggttctcattagcagatgcccaggacatggcactggtacctttttctcataccacatgtctcatcccgtgggcaacctctgacggaggcattttgttgcctgtgtttggcaagcccagatttgcttcctcctcctccctccactcttcctcctccatgttctccttctcctctttctccttctcctactcctcatcctcctcctcttcttcccacccactaccaatacaaccacaaaaagacgagaaggttattttaaagtcacccataaaatatgcccttgaagtcccgccttggctttgagagaggggaaaaaagacgttatagagacgtcatttattgaagtcctcctctatccagagcacttgatttggaccgcgggaattagcttaaaagaaaaaaaaagggggtggagggggaaagaaacatacacatttggatattctctaaaaatactaagggattcttcatacacatcagcaagtgtaaattaatgtaggccaagtctaataaatacttgtgaccaaaatgagagacggagtaataggacacagagaatctggtgggttattcaggaaagtttcttaggggagttcaaaattgagccagattttaaaggaggtgacagacagagtttggcaaaaggagagaaggaggctttccaggaaggggaattataacactctaaggtgtagagacagacagggaggagttccaataggtgaacgcccagagactgggagggagtaacacaaaggcaggcagccgccagggtggggcccgcagggagagggaggtcaggctgcagagggcttcctggggaatttccttttgctaataagcagtaatggagagccaccgtggattggtgagtagagaaaacagtgtttaatgaagacaattccagcagctgtgtggagggtggaggagaggaggcgaggtccaggcgggggatgccagctagagtcctgcactaagcagtagccatggaaatggaaaatgaggatccaaggaaaccatgcggagggagaaccggctgacattggcatggagtggaagtgggggattttggagagggggccagtggaaactggtgccaggacagtgtgccactggcaaccatagaaatgtgttggcgaagagatgctgattgaatgaagggagaagggagaggaacagtgggtttctttctttttttctttttcttttttttttttttttggtcttcaccatttccaatattgggagaacatgccaggagagatttttctatccaccactggagatattattattcaggatgatggaactgtagattgcagaatgatcaaaaccagtttgtaactgaaaccaggtgagaaaatgagcattcaagggagtggaggacggagaaaaaacagaatggacgcttgattgaggcttgagaaaatggtggcataagtggagccgagcttttcagcctcagcaatgctgacattttgcgatgcctcattcttcattttcaagggctgtctcatgcatcctaggatgctgagcagcatcccaggcctctacccctgctccccactcatgacaatgaaaactgtctgcagacattggcaaatgtcctttgagaggaaaaacagcccccagtagagacccatgggttagaggtaatattgatatttattagacatttataatatgccaggtactgttctaagtcctctataggtattaatgtatttaattctcaaaactatatttttaatcactgtattactattattctccattattcccaaataaggaaaccaagactcaggagtgatgtaatttttcaaagtttccaccactaaaacgtggcagcttcaggcagtttgactccaaggcccatgtttttttaccaaaaggctctactgcctttttgtggcaagaggattcatatgcaaaagcactttgaagacaccacagggggactgcggagagggtactgggggcatggaggagaccccaaagcatcaggcctaaggcactaaaagaaggctcatactacctaagaaacagggaccccagagagaggggctgggggaagacaatgaattttgttttggatcagtaaaggttttagggtgaccacactgaaagcagcagtgaagaagcagagaaaacagaacttcctgatgtcagggaagacaggaagtattgtgtgacagcaaagtccgtaatgaagagacggattgggtcaggacaaaggcagttgtagctgtaaagaacaaaacaaagtcccctctgaagcatccagcaaacaaaagatagacatgagtgtttatactggaaagagaatgattatggacctttacatcaaagaatgatgatttctcagcaaagtgtgatgacaccatcaactgagaccaggactatggaggagagaatgctcagagagcccatgttttgagagtggggtgggtgcttgtgaacaaaggctggtcatgccgtcattcgtgatgatgggctctggaagaaaggattctgacgactttttttttttttatctgcccttagtagtgtgagtgacagaacactaaaagcagatatgcctgcaagtgggtgggtcagtactggagaagctgaattccagttcgaggaaacagagtggcaggggagggaaggaagggaagcaacaaggaattctaagcccaggagaaggaagcattagagaattccacactgagaggtaaggtcagtgatgtaagtgaagtggaggaagcaaagcctgaagtcacaaggagagaggatccagatcttatgggaggggtgagagagataccatagggaagaaatgctgctggacacctggacaaagaggcaatgtggaagaattggagggcacatttttgccggtaagtggttgatctgcaatggaaatgtgcaagaatccataaatccaacatattaaaaaagttaatttagtgtatattttgaaatatgtaggagaaaatgtaacaaagtgcaaaaatgttgaccattttaactgaataactaaataaacacttgttttattaaaattagactaagttctttccctctgggcaatctgggcaatccacttacaatgaaaaatctaagagtagttatttccacagcatgaggagctgtgtgcataaaattagagggttgagagcatttatttaatcaacccaccacatcttctagaaacgtaggtccagcggaatggcagacaagaatcactggagtcccaagaagtcagaggctgtcttcctcccttagagtggaggttgcaggcagcacggctcaggcacatatgagacaaaggaacgggtgtgagagaggtggtgggagggtctggaagagcaattctcagacttggctgtacattagaaccacctgagcagcatttcaaatatgctggtccctaagacagaaatcagaatcagtgcccttatgaatataccctaaagttcttataccctgtgaagaaatggtttttcatttgtattctcagattctgtctctctcatacatacacacacacacacacacacacacacacacacgtgcacgaagctggctcttccacacagtgagcggcagggagcatggctttgcttggcagctgcttcttcttccagctgcatctgggcttgaacccaactgcaccgaggaaccaggcgggagcagagggaggctcacgctcttcttgtctccacatctacttcatgcccacccctgattccagtaccaaagtgagatcaagacccaatgccttaaatatataccatcccttctcccatggaaacagaagggcttcacaaagatcaatatatccaccagcctgcagttattcaattcagattttagaaaattgcattcgttttgtataaaagtaaccctgaattgcctatgctacaagtaggcaccgtactacaaataacctaaaaccagaaacaatttgaaattgatttatatttgccacttgaatgcttgacattctgtgaactcacaatgcttaattcctttccaaaatgtctgtttgccaccatttacaggcaggagtgagacaaagagatgtacaccaagcaaatatctgcccggcagaggactggattatcacagtgaccgtaacacccaagcaagccttggaggctggcaggcgggcgggcgggctgacctccacaaagaagtcacaaaaactccctggagtccagacagaacttcccaggggggcagagcagctgtcgctttctgattctcccccagaagagtgccaaaattgctgccacctcgtcgtccgctaggcaaggaaggaggaagggtgataggcactgtccctccctggggaatgcagttagacagaccctctgtctccccctggctgtcagagaaggcagacctcctttcagcccctcacccgccacctcttccttttaccctgtttttctcatccttcctcttcctttattctctccctccctagtttttccctccttaacacacaggtggagaaaaagcagagaagctgatggaagttcaggtcctggctatggcactttcttctttttcatcagtgtcaccctctctttttaaaaaatttccctctttccttgctcctgccattctctctaataacccgaggctcccagcccccaggtctctctggatcgcccccttggacacacctaatttctgggcttattctgtaacactcccaatttcctgaggctctcctaggcactcggtttcatacactttactccatctccctcatcagcagaaatgaacgcacccagcttctgcaattctccgcggcatgacagctgtagtggagggtcgttgaggcacaggctggggtaggcatttatgtaagaaaaacaaaagaagatggagaaggccagcaaggaccatcccttttgctttttcctaccgtactgagaaatcggcagcgttactcacaggatatggacaagagaggcagagagctcagttccaggcgctttacatacttcacctcatctaaccttcacataacctgcgttttacagcagaggaaaagctggcagtcaaaagttgaaatgccctacccaaagtcactcggtggcaattccaggattctgaactcaagtccctttgacatcaaagacccagcttttgactcccatgggctgcctctctggggagtggcactagggctcccatctttacttctagatgttgaatattcaagatctaggcttgccttggtgtaaaagccacagcagtaccagcccaggatcctgagggtgccaggactcagctgtccttgtaaggcactgcttggcacccaggacaaaatagagacaaatctcccatggtgggaaaggtaaagagagaatccactgaatatcaactttgagaggggaggagaaccttacgagaaattttaagaaatcttcaccctggggtcctgatggagacttaatctctggctgtggctagaatttgttctcagggccttagacaagagtcagagtccattagggtggactgggaggtggctaacatagtagacaattataaagaaagctagtattcctctattccaatattatctgaatcacattcatcccttcctaagtacttgcatcccctatccctgggcggtcacgttggctcacccgtgtctgggccagatagctgggctcctacattacttgatttctgccaccttaaagacaccatcaattctgccttcttctctagacatttttgcccaaatctcagctcctggtttgtgtgagctcttggaggataggcattaaatttgattccacagcaaagaggccctgcccttggccacaaaccttcataaacatcctataaatgaatccatgcggtgggttaaacttgaaagacaaaaaagtcaggattgcaaggaaaagctgttctccaaagtcttcaccttctagagacaagtaaccagaggaatatttgccagggtgtgccctggacacatagtccagagcaagggctcttaacctgccattcatagatgggcttcagggatgctaagtcccctaataaatacttcatgtggaatttgaggcattggcacaaaagtagatttttcagggaagaggatccagaacattcattttgggaattgctgcttcaatgtgtggaataaaggtcagggtagaagtgggaaggcagcaaagatgaagcgggtttgggggtcaaggagggcagcatggacttcacaggctgtaagccaggctgtttgtgacggcagcggtgcaaagctgactcgcagaacacctcattcctcagcaggagctcagccttctttgttcagacctgagaagcaggcacaatacttaactgttcccacctttgttgagaatgttaatataggttgggtccaagctcccccaggtgagaaccacatagcatctttggcattgccctagctggcagccactgccgtcactccattttgaccaccatctatttaacccaccccattttccctgtttagaaagtagaatctcaggataagccagatcttaaacttttcttacttttccttaattacatatatcagttcctgcagcctgccaagcctgaaatcctcacagagccccagatctaataggatttgttctttaaaaagtcattttgagggttcctagccctggtctctttaaggtaactgaaaggtttgatattttttgcaacctagtatttatgcttatgagtttgtaatttctagccatcatctcttttttcaaagaaggttatacactggctctcagagatctttccagtcctctgtgattttcccaaatggcagcctttggccctgcactggccacttctttgttaaagacattttagaatctgtcatgaagacctggggttatttatcatattctccttaattaatgttttaaaatcctctccaattttatgttggtcttgtgttccctaactcatgctagaatccagattacacaccacacacacacacacacacacacgtgtgtgtgattgtatgttagttaccagttcccaattatatttctaagaaattaaagatatacttcttgttcttatgaagatggcttttactgctttccctttaatttctcatataactaaagtttttcattttttatttcctaatcatcttttctaaatataaaaatgatatgctttattgtggaaattttggaaagtaaagatagagaggtaaaatggtaataattgcatcgctcctaaagtcttaaatcttttgcatgatatgtcaatctttcttctcagatttcacaacttttaccatttctgaagatgcctaccttcccactgaagtggctttctttttagaataagacctttgtttatccgagcaggatccctccagactttctcatctaggagagcaagctgatctcctaaactatctcaaggcacctgcagaggagaaagagccccggacatgagattcagaaaagctgggcttgaattctaggtttttcttcctcttgacggcataattttgggcaatcattagagcactttatatcactagagtactttgtacctcaatttcctcacctttaaaatagggttaatagttcatgcccagaattcctcctggtgagttcttgggaagaccaaataatgtatgaggaagacagtatatatgagaaagctattgacacactatcaagctttagaaatgtaagtgatcaatattattacatccaatttggtttgtctttgcctccgttgtcttccttcattgaaaaccttccttttctttctcaagttttggcttgttttagttttccttacagtttttcatgtgtgatcagttcatggtgactttgtcctaggctcacttgaaactttaaatcctcaattaattggtttccatttgtatcttctgcatttttgtactaaaaattcatgttctctaaatattctagaaacatggcacctcgtggccagattgtcttttcttgccagatgtaatttgatgagatactcaaagaagtcagacttgatctggaagcttctaattcagaaatgactgctggccctctacatgggacaactaagcatcacactgcaccacccaaactagctctgatcgaatacctagtgggttggaaacaggggaagtcacgataattaatatttatacaatgcctactctgtgacaagtattgttgaaagtgaaataactcacctgattctcacagtaactctaaaaacccagaattattaatactccatttgatggataaggaatctgatagtacagagaaataaagacattttcccaataaatgaacaagggtcagaacataaaccctggcactatgactcctgagttcttgctcaggagaaaaaccaccattttctgcctctgccaccatgttacactgcagaaagaaaggtggagaagacagtagcagggaaaatgtaaaaaacccaagatgacagcaaggagctgaggaagtacaagtgctgaaaatacaactcatttcaccttctgcataactcaacaattacattaattacactcctgtgcatttctggaagactgtcttggctgtgtcctatagctaatgagcacatcagaagaaagaggtccacaaatcattcacagaagtccaggtcctaaccacctttcgaatcctgctgtgcacccttctctttctccactctcttcattatgtagaaccagacacacagtatgtttcttttaagtctctgagcatcaagtcaaccataaacatttactacaaagcttagagcaaagagtttaagagtgtgaacttgagccaaaacgcccagttcaaatcctggttgtgccatttaagcaaagcaagcttttaatgtcttcatgtcttagtatcctcatctgtgaaatgcagataaatttacatacctctatggatgtttgaaagggttaaattggtcaattcatggaaagcactaagcacagaacctgtaggtgctcacaacaaagtagcagccatccattaaacatctatggtgtgccagcattctgttaggcacacaccaggacatgagggtggatgctgtttctccccttgagaaattcacatcgggaggtgggatggatagagacacgatagcagtcctttcacatcccagggtgggctatgggagcaggaagaggccagtgattccagtctgtgggcgacaggaagacctggagctgaggatccctgagctgaaacttgcaggcatgaggggaggtggggagggcactgcagtcagagcaagaggcatgagcaaaggcctggagtgtaaatcagcctttcacagtatcccttgcccctgcctgtgtcaccatctccatctctttacttcttggatcatgtaaagataaaagataagcctggaaaaaacagtttcacacataaagctagaaagattagttttgctctcctttctgacaagtatttatctagttttctcaataaaatactgtgaaagagaacctgggaaggagacatagaccaaagattaaaaactgcaggtcacaatgtctaggtgccactctgcattcagaatgctgcgtaccttgccactcacggcatgtcttgcccattaaatattttccattttcttgttcactgagagtggatgcattgaattcaaggccacatcatacattgaaaactggctatttggagcaggatgcagttattaattattatttcatatagcccatgtgtatattacgcttatggttgaggagattttttacatttcctcattcagtccacaaaacgacatctttacaggggtcaacacgataactggctcccctaaagacctcattttacagatgaggaagtgagttcagcaaggttgtatagtttgcctgagtcacacagtgctggccagggtggggccaagatgggatctgctcaacagggccaaagaccagtgcctctctcctcaattccaccttgcttcaaattactgaaaggcctttttaaaatatgcatgtggtaaagttaaggcactccatgtggcaccaatatatatcctctttcataatagaaagaaaagatatggggaatttaacctttgtattttatatttattttctataaaactgccctctgagttaatagctgatagagatatttgaaacaaaactagctcactcacgtcctttttggaatttcctctttaacaatgatgacccctgttaatagtaaaatccaagcacaaagccatacttaggactgccattctcttgcacttaaccattagtctctattcaaaggagtagtttgcaaatgggtttgagaaagaaatagatgcaagaaaatggagaatcttcaaaatgtccaagattacatgatcagagagaagtagattgttccttccctcttagaggaaccagagtcttcaggttcagagttgaaatatatttacagaatggtaggggtaggctaagatgatgatactcaggccttagccatatgtgaaatgaatgagatgcttatggccagtaccatgagtttctcatccttcatcctcactgaattaaattaaggtccagaaatcaactattttgtagggatccattttttcagtttaaaacaactttgccttttaccaacagcaaagccccaagagaagggatctagaagaaaatcactttagctgaagtttccaagtacaggctgtttatgagttccccacatgcaacataaacctttatcttttttaacatggaagcaactctatataatttaaagagtcagggcttagaatcagaagatgtaagttggaaccctagtttgctccttatagctgtgtaacattcagctctctactcctcagtttatctgagaaacagaaataatgtcagccttgtggtgaggattgagtaatgtgcattaatataatctagaagataattggcataatctagaatataattttccatagaaatttgtctccagcaaaggcaaggcaattcctcatagataactatatttagactgacagcaataattcttagcattttcattccacttcttgtctttaaaggatatacaaattctgattacataattccaggaccttctcactccttttcctaatctctgtctcagttgcgtaaatgcagacttatcaataaactagattgcctgcaatggttactgaaagatcatttatgagtttcagtgtcaaacttgaattttatgttgaaatcaaagcagctttgtaaatgggtacataataaaaaggagaggttgagaaggtaaccatgatcccatttattccagacagtccaggctggagtgcagtggtgcaatctcagctcactgcaacctctgcctcccagattcaagcaattctcctgcctcagcctcctgagtagctgggattataggcaactgccaccgtgcccagctaatttttgtatttttagtagagatggggtttcaccactttggccaggctggtctcgaactcctgacctcttgatccacctgcctcggcctcccaagggagagttcacttctagttggggagatcaagcaagacctcatggtggagcctgcctttgagatgagccttgaggaatgaacagtatttacatggaatttgaaaggaagggcaatagcataattagtgatgagagagagctttttgaagaaatgtccatatcgaacacaatgtgaaaggaagctcaaagaactgaggcactaaggaatgagtatattttcacttcatcagcctaaagctggcactaaagatactttcgtctgttccactctagtaaatctcacccaaagcattaagaggtgcttggatggcaaggaaatagaaacataaaaggtataaacatgtcagctttatcttcaatgcacgttcatttccatcatcatctttaccaacaaccaatattttctgagcactgaccatgtgcagagagcactctgctaaccactgaggacataaaaggacaaagtcataaatcttgtcctcacaggaaaataaaaaattaataaatttgatcactttaacaaatttgatcacttttaaacaaaagtgatttctcttctacatgcaggctctaaacacacacacacacacacacacacacacacacacacacatccagtatttctttcttcaaaaatccaaagggtagcattctcctactcaggaaagatctttcaaatctgagcacctgtatttggccagggtagaatttcttctgcagtccttcttcctatgtgaactgaaggaaaaaccaggatacagatgtaaacaaaatcaaataaaaactgaaatattctccattccccctcaagctcagaaacaattctggagcctctaacaaggtgatgagaggaagaaccacgaatcacaaagacagcaattgtggctccacagagctcacgggtgaaactgatctatctgcatggtaacaaattccagggtaaaggctgcagtagctccatgatttggatgttttgcctgtgtggggccagccagtagatatttgaaaaattcaaatcgaggagtatgcgtcttagttttctcctaaatatttagtgcctcacaccaccacacagcccaccaaacaccagagtccaaaccacactcataccctttctcttttatcttcaatggctattagcagctgtccaaaagagaagtagtgtttttattcttttatagtttgtctttttaaagacacggattcataaatctgggttttttcttgcctctgtacatttaggttcacatttattttaaaacagggaagagagtaagccaaaaaggaaggatgtgagaaaactattaacccagccagcctaataatcagtgattaaagttacagtcagagaagaacgacatcttgatgcctcctaccctcttcctcctctgcgtgcctttaatattctacttcaggcactgagagggagggcaacagggctagtgaattccaactagcactcagataattgcaccattcacacccctcaccaatcaatcaaggtctgcttagccagccccatttattaatagttttcctacatttacactgttacaaaggaccgaaatgaggttttttctccgaaacaagaaatggggcaccctcaataaagactaagtggaacagaggatgtttgcaaaaccaagaactgctcgccctattttgcagccacacctgttttaagggcgtcaggaaagcattctccctaagtttcctaactttcaacaccaggccagtgttagtgttgagagagcttcccttaattcaaaccccagttccaccccttgggtgcaagctgtagactaagtaccgtcatatcccaacagcatttttttttaacttctggcccagggaccctccactaatcatagaacagtttaacagtgacaaggtcttaccttcatgttaaaatgctagtgtaacataatgtttagagctaacaggtgccttgtcaatcatcttgcccagtcattctcaaatatggcttcgcattagaatcctgcagggaagttttttaaatgaccatcgcctgaatccctccctgagagatttcaatttaactctttggggtagggtctgagcatgggcatcattcttttctttgttgttattcttgtttagttttttgtatttgtttttgtttaagctctgtggatgattttgttattgaagtggagttcaaaatcactgcttcagactattgtcactttatggaaattagaaaattgaggtccagagtcaacggtttgtacatggtcacagaataaagcaacacaagcagaattaaatataagcttctgactcctaagaccaccacctcctaagaccaccacctctttcattatcatataggcagctactggacagcctggaaaaacctaacatttttaaagacccattacatataagagagaactccggactctgatgctatgtagatgagcaaatgcacaccactggctgatttagggccatgcattccaagggggctcttgggggcagggcacgggaaaggaaagtactgaaatgagggtcagtggacgtggctgaccacattatgtggctttaggccacatggccaaccttaggactattttcacagtttttaaagggtggttgtcgaggaggacacgtaacctccaaggtgactgtcagcattattgttctattatcctgtgccacacacagagaccacatgcattattgtccctaaattgcacacatttaatgcatttaagattttggggcctactatatttggtaggtaagtcactgcacaaacatatccatccacacacaagtctaatatgcacaggtgtgtggggggtgtgtggatttggatacatatccaatacactaatctcgaatccaaagtacaaactgctatggcatctgtgtgaccagactacggcccctagaaggtgggaggattagttaagaatgtcggccattttcacagagaacaattagctatgggaaaaagaatgagcgtcctcacctgagcttcaggcttctgagactctcttctcccttcctgtaaccatgtagtgcttttattcagccattgtttttaagtcccccctcttaaaaagaaacaagatctgatttcctaagaaattctatgtggttgaagccctgagtgggtctatataaagattaatgggaactttaagcttgacatttctttctaaagaaagaaattttcagtctgagtgaggcagtgaggaaagacacagaggatggcgtgtagacagcatagtttgccgttggtgagttgagtgagcagttcagagggttaattcattgaaactttaattgtcttaatctaggaagctcctctactacagactttacgctccccatcaagctgggctccaaggagggccaaagcctgtagcttctctctccttccaggtctgccattcacagagagctggccctgcttcccctccaccgccttctcagggaccctgggcacagcctcatcactgtgcctcccctgctctgcctctcaagtccccttggaatgcctgactcttaggtcagtcaatggtgggaatttactcacccacatatcttcagatccagggtactctctttatatgtaatgcatctttaataagtcatcaggctgagcttaggtttcttctgctaatgaaacaaatacaaaccacaacatacaaagaatggtgaaagtgtagataaatggtaaaaggataaggagcagaaaaagatagaaaataaatttagggaatcatccatttcaagcccatcttcccttaggcaccaatgctatagtttaatcaagaggtgactgaaggtgtctccccagcatctccacacctggacatccccaggagtaaaaacctctaaaatatcaagccactctaaatagactaccaaaaagcattttgtgaatcccctaggaataatgggatccctcttcatccatcactccctttgccattacagaaagcagctggtgtctgaagggcatggcaactttttacctccctactccagaaacacatgggctaggctggtccttcattctgagtagcttggcctgggctaggatccaggtttccctttggacacaaaccaactaacagctgtccctttctttgtaatggccatcaacagagttagctgcaatccagtggtctaagatgaaaactgtatcatttgctcattctagaggcaagtctaataaacaaggctaggatttcactaactatacaatcatgaaagcagaaattagagcctcttccttcttttaagacgaccctggctttattctctaaccttgtcatttgtaatctgaaattcctaatcaaagaagcagcaaattcctgtgttgttcttttccttgagttaagggatgcaaggaagagcgggaggcttgccttttacaccaactttcctcttcatatgctttctgtcctcctaaaatgacctgtctttctgtatcctataaatctcctattttttcctcaagacataatttaaatgtcaacccctccatgaagccctcctcactctcccagatttctctcctttttagatcttacctaaatatataattatctctttatacatgtccacaccactagatcctgggctacaccactagatcctgctccacaccactagatcctggcaggtacagacagagctaactctttttcatagcacaatattcttaaatgttgttgaataattgaacaaagcaaaagacatgaaaataaatgaagttaaaagaacagtgtaaaagagactaagagacattaacaaaaagataaactaaaaagcaggaggacataagaagaaaaaaaagaaagagaggaatcagttatgagaagcatcagaataagagagcacagaatgaaaagagagcaggcaaaagatgtgcataggtggaaagagtgaaagaagagaggagatgggtgaacttaaatatacaggtttctttctgatttaaaaaacaaaacaaaaaaagaagtgctggaatcccaaaagtagaatacaagcacaactgccaatgttctggtgccaaggccactaaccatggtctgtaattaaaagcagggatggtgtagacctgtgaagcgtggtccagcaactctggcgtcaactgatagctcattagaaatgcaaaatgtggagccccagcccaggtttactgaattagaatatgcagtctcacaaaatctccagatgattttaatatacgataaagttagagcagcactgacgtagatatttaaaatccacagataactctgcatttcactctaatcaatggcatggtgtacaaagcactggtgctaaagaagttatacaaccttaggaaaatcacttaatgtccctggatctcaatttctttattaaatgagaagttcagagtagatgctttctaaagtatcacatagctctgatattcttgatctcatctaacaacaaaattttaacccttcctaaacccaacagaacaaacaggtagcatcatcaactaattaatatctcacttcctttctctgttcatttatttaacattttctgataatctattatgtgctagtcactacgctaagtacaaatgattctaagatgaataaaacatctctccctgcccttgaggagtgcacaaacttcttagggaaacagggcatataaacaaagtcaggataaactaagaagcatgagcacatgctggtgaagaccagaaaggaaggcaattccacagcctggggcagccatggagagtttcaccaaggggacaaggtagacgtgcatgaggtcccttctctgccaacctctgctgaaagtactaggaagtgaaaagaccaaaaataaggtggagaacatcaagaaaacaactaaaggttcataaacacaccttgctgggttcacaatcccccaaaatgttcacagcacaatggattctgtgtaatggccgcaggcaccattaacagccgcaggtgaacctcaaaaacccaccttctctgagctatgcctgctctttcatcccgactacattctgttctagctttggcctccttctggaagatatcaattcaaccactaatctactctccctggagacttcctcttgtggttgcaaagagtagatgcactttaataaatgcgaacaattcattagaccagtaactcttttgatctatatttatttacaatgagagacaatactggcatccaatcatgtgcacaggagcagcgactgaaaatgtagtttactgaaaggaagaaatttctagaattcctaaggatggggtagaatggcactgaggaaaaagaggagcttcatttttccagctcagctacttttgactccaacaaaatacacaagatgagtggttttgtcggccccagtcttcaatattaaagacacaagactatcgtttggaacaacagttttcccatctttagaatggtgagttcaaccctggcttttttctcttccctagcttctacatgctgatttgggattatgatttcttcccatacaatttgtcctttcacctgtctccttttatagtccatcaatattatttatagcccataaatattaacaatttttttactttaacctgttagtagtatatatgtcacctttgttttcagattcttaaacaagaatatagaaaaaaaaaatcctgcccccagggtttattgtattcatggaggaactggaagaatgttttacaaggtaatattgtggccaagggatgcatcagctcagtcctgtttctcccaaacacccctcattccaccagccaatttcagtccatttgcccacctcccaggtgccccctgcctctccccacacaagactgggtgaatgtacatgaaggtcagggaagacagtcaagattccaaagctatctttctggaggtaaaccaagaacacaaaatcaaggttcctgctgttcatcccttctccagaggaagtcgctcttctcaatcagccttaaagaaaagcacttggtgtgcaaagtattgaattgaggattttttctctttcccctcctttcctgtcatttcaccttcttattgattctctctgcctgcgtccatccctggcaaaaattgcatatatacattagcaaagcatggatcttcagacagacaggcttcctagggatggaaccaacgggagaggaaaaattagacaatccagtggtactcccggctcctctcctcacatgtaacacctaactctaaactgccacatcactctgtgttcacagatccgccatgctctgccacacctgaaacagacatagaagataaccatgttgttctgcttctcttgaaatcacccacctaatgtccttaactgtgtcctgggaagtctttatttcccattattattacttttcttaattgcacatcatggaggttcctcgattgaaattaaatttgctcttcctcccaccagccgccacctttctttcccatgtcacccacattgtaagggggctggcagaaggagaaaagacaaaatagaacccagtcagctctgtgctgtgagggggaaaaagggggcgagaacaaaggccctgagatggctcagagcaccactgagtcacagcctcacagagactgcctgcgaggatggggaacacctgcttcctcatcagggtctccaaaatggctttgcatggtgaaaaggcacagaccacctgtggcgattcctccttgaatcttaacaagcctcttccagttggattacctctcctttccctttatagcttccccacccactttttcctctcttcctcaactccctcccctttcaacctcgcctagtcttagggacaactaatgatagcctggaacctggcttcatccattggcattcaagataaatgaggtagctgagatcctgtcaaacagcatccttgtcaaacccatcaccaacaaacgaacattccaaaggacctactgggtgtagagtactggtgttgtggcactggggatgcaaaaggggccctgtgccccatcaatgccctcctctccttgtccatctgtatgtatgaaagcattgcacatggagctgcctttctcacccatacctcttttctattttgaagtcaaattaagagttcatcctcctacttggagtggaagcagatggagaatgagttcaggtgtctctaaggtgagcacacaccagataacctcagtcatttgtagacgtggtgagaacatggttcaaagtgggatcccaccctctcactctgattacaccatggttacaaagtagcatttcagcagtaaaactcaaaagaatgaaacctagagaagggggatagtgaatttggattacatctatcctttctggacaatgaagaactatcatctactgtcatgttgagcgacaaagatctttcacctcttccccacatccctttggtattttggattatcaaagaattgttgttttaaaatgccagaaaaaaaaattgtgtgtgtgttggggtggtggtaatacttttaggaaaaataatgatgctaatgattctgctacatgtttttggagatctttatcccaacctgatccctgcatttagacgccttcagagttcagggacatatggtcagtggagcaaggaaaggagcagcccactcaccatcatggccctccaacccatgaatgatctgattctctcaagagttgtcttggattgcatgagtgactagctgaagagtcattagctaagtcttttccatttctcctgctatttctcttctcaagtacattaaaatactgcctaatcacatttcacatattgtaaaaattgatgaaagggaaaatgttaaagtattaattccatttttgagggtacaagactaatacatgcaaacagcacatctctttgtttaacacaaagactcacgtgtcgaattctgcaccccttccacatgcacagcattttagaactctgcaagatagccattttgcaagagtgtagaagtaacagtttgcttggaggatgtgtgggtataaatagatatgtagacagaaggagaaatttacagctcaaaaataatagcacaggaaaaaatacaaattaaaagcagaatattgacagaattcctcctttccgagcttaagatttaagtcgtttaacctgcagcatccttcaattccaggtgttctgagaccagcccgatccccacctagacctacccctctgcaataggcctcccgggatctctgggccccttgtcaaccctttagacagcaagtggatttcagggcaacaatcacagtaatctcaatcattatttttatctgttttaaagggcatagaaaggatgcctagaaaggtaaagacaggagacagggagagaggcatgaaggtgacaaggggaataaagccaacctgaaaaaaaaaaaaaaaaaggatttctagattcccataaaaatcggagctttagttctgggtgaataaaatgctatttaactggaaaatcacacaggtctcctggctggctatgtctatagatatagatacattcccctgatgccatccaacatcttttgtgcctgcatacatccacccccactgccccccaaaagcccaaaacctgttagatgagagaagaaaaagaaaaaacatgggagatttccttctttgtaataagccttttttcccaaaacagcattattttcatatcttgtgaccttttcttccaaaaagatccacttgagggactcgaagagatagataaaatgaggaatccctaccccaggtgaggaaaaaataaaatagaatttgccctaccttggtttgtagaagccaaacctctagacggacagattaagggagtgagcatgttgggaatgtccagtcccttcttctcgcttgcatatccacataagaaagacgaaggataaatgaacggaagataatttaaaatccaatttagcgtaaattttgttttaatcttgtgtcttgaagagatgcaaattcaaaaaaaaaaagatttaattcaaaggtaattcagggtatggagagcagctcacaatgcagaatccagagtaattattccgtgtgcatgtgaggttagtggctggaatagatttttaacgcttcttctggcaattacggtttttggtttttggagcgttagtggaggaggctctgtgtggagaagctgggggccggctccgtccctcggtggagcatggtcattcccaaagcgtccccttcctaagggggaaaaagaggcggtcagggcttgattcgcgtgtcccccggagggtgagaaaaatgcattccgaaaaagatatcaattcgttttaaggaaaggggggaggaaaccccgcatttcccacagagtgcacacgagaggaattgaaaacagctggtaccggtctataaataattcagaaaaggtctggctataccattcctgggacaggcacggatgagaggtgggaaagccaacctgaatggaagaggagagagggagggagcgagcgaaggagggaagtgggaaggaaggaggaagggggggagaagcggcaccatacagcaacacacactcacacacacgcagaaacacaattcccacttaactcgccagcgagtgcggcccccagccccatctgcattgctgctgacttgtctcgctcgctctccccatcgcctccagcagcagcgccgcctcccaccccgggcttgtgctgaatgggttctgattgtgcacggggtgcacactgggcatttcttggaaggggcacactgacgcgcgcacacacgcccccgacgcgcacgcgccccgcgcgcactcacactcacccccgcgcacactcacccccgcgcacactcacgctgccgccgcgctgaggtgcagcgcacggggcttcacctgcaacgtgtcgattggacggatgggctcggcgcgtgggtccggcccggggcgccgctgccctgcccctctgctaggtgaagggatgaaaccccccaaaagaccagagacagccctacccagtcacagcaccccctcccccacaaaaaaaaaaaacctttaaaaaagccacgtccaaattagcaagtgccgggttctgctggatttcagagctttacctcatgccagattcgttcacgatttcacggcttcgaccctttatctgcctgacacccccaaacccctacattcaaaggagagactccaaagcccatctttacgtaccggctccgagcgcctccgcggttgcagtctgcggagaggggtggccggtggctgggaatggagggttttcctttcctgcaaagcaggattaatgatccgtctcgggggttttgaagttcatgactcttctttgcaaggcaaaaggatatgcattcggacgccagcactactggatggtggtgatcaagaatcacccttgacgagcactctcgatagagcgaagccccgagatttcctagaggtgaag

SEQ ID NO: 242 - DNA, 459683 bp, Homo sapiens
  source 1..459683: mol_type = genomic DNA
ctaccccagcttaccatttgctaaacacgcatcagtcaccagtggaacacacatttccaatgctaaaggtcttgactgcttggtgaaaaccactttgcaacactggtgttggaaattactttcttatattaagctgaaatctacctcattggaacctctgctcataagtcctgagtctcatgtagttcagaccttgtctcttctgccccatctggctacttatctccagtttctcctgccagtcttccggtggcatagccccaaaccctttcatttcatagtttgtcactgccctttttaagaggactggggtgctcagaacttattggctgaccctagctcttcctttggcctggtcactatatttgaaaagtgctacctgaaatcataagagcttttttgttttgtttttaacagccattttctattgttgattcattttagttttggttacaactgaaatatctgtctttcacatgaaatatagcttctcatttgcctttcttcacaaagtctgttctaactacacatttccttggcttcagcctcatgcttgatgcagaagtgaggagagtgcaataaaaatttgaacagttgcttggatttttgcaataatagattgtcagttggggtcatatgactctcaggtgctagaaaatactctgcctttcagaacgtaaccgtgggcacactgaatgcaactgtataaaaatgaatgtgaatttttaaaggtagcataattaaagtttgtacattttaacagtttatgtaaatctgtctcatagaatacatgtaattttctctgaggtggatgttgtgatacttgatcaatatttgtcacctacagtaaatgtaccattggtcttggaggtatttctgtgtgtgtttttagcccattctcatatatttcactcctcatcttccgaatgatcctgtggtacagacatgaccttcagtttcaggtagagaagctgactcgtggtgactaaatgtcatactaccaataagtactggagcctgaaatcaaacctggactcaatttcaatacacaggttcctactcttcagtggtgcttctcaggttgataggaaaacctctcacctttagaaaattatacaaaaataaacattgtggccggatgcggtggctcacgcctgtaatcccagcactttgggaggccaaggcgggtggatcacttgaggtcacgaggagtttgagaccagcctggccaacatggtgaaaccccatgtctactaaaaaaatacaaaaactagccaggtgtggtggcgggtgcctgtaatcccagatacttgggaaactgaggtaggagaatcacttgagccccggaggcaggggttgcagtgagctgagattgtgccactgcactccagcctgggcaacagagtgaaactccatcatcatctcaaaacaaaacaaaacaaaaaaaaattgtgtaggactcaggctagaacattgaaatatattcaaaacaacaccaataatgcatatcctctttatttggctttttaaaatcactgtttattccatttggtagagggttttatttttttccatacaaatatttgaacaattttgaattccccaaaaccatacatagacgataaataccatgctattaaagtattaaatttgtacaaaaatactttacagtttaatacttgtttgttacaaataaaaatacatatttaagtgactcatgatctttttttcttttttcttaacatgatcctgctttatactttcttgccctggcggttctgaaatgtgattgaaataatattttttttgcacaaaaagaaaggtgattttttttttatatttccttaaacaaaggacacagtgttcgaatactttgcctaagtggtagtttgaattattgaccaaaatgaaaatgtttggaaaataatcatttcaatatggagagtctaccatcaatatacagatctatttatttttttatgttcaccaaataataacagttattagtgtagctattcaaaatatctgaacaaatgaaaacagttgctgacaaacatttaaagcaactgtcacaatttattgctttgagggatggtaataattggcaatgcatttgtgaaaaatgtatttacaatttcggtaagtggcatggctcagagcaaaagatagtccagtgtcatttttaagtacatgtgctgtacaccctcaatattaccagttttcaaaacatgtcaagcagtatgagtttggtttgcctatcattaagatgaacctcattttaatagactcttcattctctgaagttcttagtcttgaattttaaaaataagataatataactaattctcatgtttactacacactctaattcattatcagagattttcagctattaaaaatgtgtccttaaaaaaaaaacaggtcacaagacatatcctgtttgataatttgttgcatagggaatagcatacatcttagttaaaatcattcctatacgtgggcaaaacatttaccaccacctattatggtctcctacgtgcatcattgctgaaacattttaagataacttaattttatacctgtacccctcccattgtggtagtcccagcagtttaccaaacactagttcccctagtagagccagcctatgagaagaaaagctttgttggccaagttcttacattaatgacttcatagtaagaaactgatttcaaagtgaattaaggaaatcatcacagagaatattttcaaacagatgtttctctttttaaaaagtgatagtaagatgaacttgtaaaaaatttcctctgatgttaattgtagagttgtgggggacggcctatttttctctaccgttgggactggcagggcattgcccaccatataccatagtggtcaccaaaaaagaaacctcttcaacttgaaaagggaagtgaacatgagccatgagagagatttaaaagacccctgtgcttgcagttaatgccacgttgattgattatctgtgcttcaaaggtcacagaaatcttaaaggatttttagcaccatgtagatattgtcttttgtcctgctttataaaaagcgttgctataatgtattagtgggttctcgtgtctccaaattaccaccgtggctaggctgctggaaaaaagcactgttctgttcactccaatctcctggtagactctgttggtctatagacttctgtgaagccagtgggtttctactaataaccaggtccagcttattcccggattctgctatgaggggcacaacaaggcagcagtcaaagtctctggttcggacatgattcacctgaaaggtcaagaacagccattttgaattatcgttgtaaccataattcccaaaacccggagtaacatttcaggtgcaacaagttgtttgaagtcatgaaggtgctaaaatgagcgccatgaggtctatccttgtgactatgctgtgacatggctactggctcaattgccattgtctgctagtaaattgtaagactctcgagggcaaggaagacatacacatcctacctatcctcatgccaaggaggtggctccacccacagtgggggtgctgcaagtgctgaatattatccctaatttacagatgagaaaagcaagccacaaagaggttaagagctttgccttagatcagtagttggtaagggtcataggatgtaatcccaggccaactggctgatctcaaagcctgtgctctgaatcacgatgctgaactacctctcccacaagcgagctccaccaggtgcagtggctcacacctgtcattgtggcacttgaggagaacaagatgggaggatcgcttgatgccaggagtttgagaccagcctgggcaacatagtgagaccctgtctctactaagaaaatttttttaaaaaaatgagcttatcccctcttcagcttatacatgcacccatcttcttccatttctccttcttcaccaacacaagtttttaaaatcacccacatgccggttctactccttgatcttccattctctcctcagttttttcaggtcctccctgacacattgcactgctggaaaatgaccctacttgtcaaatccaggaatgttctggagtttgcatcctccttggcgtttagcatttgccgctcgtgacacctcctcacccttaaaactctccttccttagttctacaaccccacttcgttttgatccttttaccattttaactgctcgctttcagtcctttcctgcctttatttcttcctgtcctttacatttggttattgtggccaggtgcagtggctcacacctgttatcgcagtactttgggaggctgaggtgggtggatcccctgaggtcaggagttcgagaccagcctgcccaaaatggtgaaactccatctctactagaaatacaaaattagccgggcatggtggtgggcgcctgtaatcccagctacttgggagctggctgaggcaggagaatcgcttgaacctgggaggcataggttgcagtgagccaagatcacgccactgcactccagcctggatgacaagagagaaactctgtctgaaataaataaatacatagatacattttgttactgttagaatccatccttggttctgttctcttctttgttataaggccaccaagggcaacttgtcctaaaccccacccttcagtatcctaaatctttaactctggctctaatatctctcctcaccaacagatccaaaccaccaaatgcttcccagactgctctatcacaatgtgctgaaaatattaaagactcattagttctgaaagagctgtcttatcttacctacccctacctggactccttgcctgtgatcttctcctccccaacccaccttcgataaacccataataatattgtattgcctttctatgttaccaattatatcattatcctgcttaagaaactaatatgcctccagcataaagttcaagagctttaccatcacattcaaggccctttataatctgaatgtagtctacttttacagcctcaactgcgatgagagtagagctagctctatttatggattaggaagacactcatagaaggtaagtaacttgtccatagttattcattcagcaaatattagcatgtctgcggaaaactaagtgtccccaaactcctaggataagactaattgttctattgccatagtaaaaatcatcaccagaattgattccaaaactatcaaattgatcagtgacaacttgcttcagcgaacacatccctgaaagccaaccaatgagtggcagcctcctgctttgaaagtcagctgtttggtgacaaactgtttccaggtgagtacactgctaagactgacttcaacccactccattttcctgcaaaatgctcttcccaaaaactgtacataagatcagaaatctgctttcctaaataaaactatacctgacctcaatgttactatatttaaagtaagcaaggttcagctttttggtttcagatattgtgagagatactgagatatcaaataccacataatgggaaatgagagaataaggtactatccctgctctcaaaaagtttacaatctgctggggagtatatgcagggaaacaggaaggtggtttttttttttttttttttggaaactcactctgcacccaggctggagtacagtggcatgatctcggctcactgcaacctctgaacaggcagttttaataatgtaaattctaccaaaagcaaaagctgctgttcgatataggaggggcccctagtccagacttgaggtaaaggaggttgggtggtgtctggtgaagttaggctttgaaggggagtcctctaaactagtggttttcaatttggctgctcactggaatcactgggggaggtgtaaaaacacaccgatgccgtatctgtctcctagagtcgctggtttaattggtctggcatttgattgaacattgggatacattctctaggtgattccattttttcaatcaaggttgagaatcgctgatctatgtgagaccaaaaagttgagtcggaatgaggcaggtaaggcctagggattagaagagcattcagagaaaggaaagagtatataaggctcagagccaatgcgcttctattctgctgtgcagtactgagcacttttatgtgacagcattgttcttggaactgagaatagagtggagaataaaatcgctgccctcatggagttacattctagtgggcaacacagaataagcaaataactagcatcatctgtggttgtactgcgaaccaagaaagaagggtgaagaatggagaggcaggaaaggcccttttagacggagtggtttaagtcgcagcatgtgagcagggacctgaagtagaggaaggagcagggaaagagcctgtgcatgtttagcagagaagcgccacaagctcagggcacagcaggtgcaaaggccaggaggtggcagcatacaccattcctgaaacaaatccagctgaagctagagagtatacgaagaggttgcgcacagtggctcacacctataatcccagcactttgggaggccgaggtgggtggatcacttgaggtcaggagtatgagaccagcctggccaacctggtgaaacacggtctctactaaaaatacaaaaattagccacgcatggtggtgtgcacctgtaatcccagctactcgggaggctgaggcaggagaatcacttgaatgcaggaggcagaggttgcagtgagttaagatcgtgccactgcactccagcctgagactctgtctcaaaaaaaaaaaaaaaaggaaaaaagattctaactaactttccatcaacttcaaaaggtccgtcatcaaccctccaattagttagcaaattgcattctggctgggtgtggtggaaggcacctgtaatcccagctacttgggaggccgaggcaggagaatctcttgaacctgcaaggtggcggttgcagtgaaccaagatcacgccactccactccagtgacagagcgagactctgtctcaaaaatgaatgaatgaatgaatgaagaggcaagacaagatgctggcaaggtaaggagaggccaaatccctggggccttgtaggtcatgtagaagacaagtggtaggaaggactagactggtggtgcctggagtcggataactacgtcatatttatgggactactgtgcgatggtgggagatgaccgtggttgggtgaaatctgtgagattgggaaagatggctctgagctcagtgccgaaaaaaactggtaagaaaccacagaactttggggtctgggttagaatttactagagctgaaaattctttattcagctgtttgcttctactgattccataatcttgatgacaaaggctgaaagggaaaagagcaaagggccccaaatatgcaggaggatgtggaggaagctcccagtgagaaattacttgcaaggaattaaaattccacctgaggtcttacctgtaagagcctgtcatagggctttaagccaccaagatctcctggcccagctgggcgaatatttttgacatacactcctttctccagtaagccatctgctacactgaacccaaagtcctccatgtcagagtccttgtacaaggtcacctgaagagagaaaatgggatgtgaatatttagctggggtggagacttttccttctgcaacttcttgatgaacaatcttttcacacgaatttagtcacatcatgatttgtaatatcagcatcagtcagctccctgcaccaatcctgcagcctttttttcccactccaagaatatctttggactttatgaattcccaaccaaagctgaaaaaggaggagaactggaacgtctgggtcctccctccctccttttcagtcgtcatcagggggatataggagagaacttcctcaaggcaagttgacttctactattttcctggggcaacctctggtcagaggagctgcccgcagcagccctttacaactgctgagatgttggggaataagccaaaggcctttccttcctccccactcctgcctggtgctctgctaagcacagtgctcggcgtatcctctctttgggcaagtaccatgaagttcatccttttatttgctctggaacccccaatgagcaccatcacagaacactatgtaaaagacctgaatgtgtctctatgacaacaccttgctctgcacctcggcttaactcgctccctcagcatttgtctagggtttgatttggtaactgaaggcatctaccctgagtgctgcggcctgccccccaccccgggtctctctgcatctaaggccaaccacagctggctaaagcctcactcctccaccagccctcactccttcacctgaccacctgcgagtgttcatctgaggctaaaataatcatttgtatattcatcaaatatttattgagttcctaccatattgtaagcacagcatggggtgctagaaacagcagtgaacaagaggaagaaaagcctgccttccagaggcacacacatgaatatgtagcagtccccaagctctcaccgcactgggcactgcgcccagcagcacactcagcgcttgatgctcagttaacgtttgagggggccacgggttttaccaagttgtgccagatgccctccacaaagacttcaagcaatggtcaggcttaattttctactgtaattatatatatatatttgtttttacacaactaatgcatgaatacattcttgtaaaatagtcaaaacaaaaacaaaaacaaaatcagagctatgcagggcaaaatgtgaaggttaaaactcttatagcaagtatctttgtttatatccagtgattttacttcagagggctatggcattctgaaggcaatatgaaagtggtcagtgtgtgggtttttattttactggacagacagctaaaatatcaagctgactgggtcaacactattcaccaaccagtcccagtggttattgccatattagaggtgaggaaattcaatttcactggggttatgtacccgctcaaggccacaaaggtaagaatggtggggacgtgtctgtgagactccagacaccaagtgcctaatggttctattctcctgccactaaacatgcacctctcggcctcaccactttcagtgtcctcctggacaggagccaccctcaggagccggtgaaaatgcagtctcagacccaccccagaccgactgagaatctgcagaactaatgttccctgagacgaccctcttcacacgctcattccatcattgtgtgtgcatgtgtgtgtgtgtgtgcacacacactggacactactatgcgtcagggactgttttagggactgaggatatttttcacaggatagagtgataaaaaaagtagagcagtgagcaaaacacaacctttatgaggacagcccagtgaagaaatctgatttaatccttataacgattccgtaagatgggtaagagtcttcattttaagaggtgacagatataaagttttctcagtctgccctcacttatacagggatagagtagtaagccccactttactacataaagggtgtgtggggttatgtgtgtgtgtagcctagtgacaccagcacccccacaccggccccaccacccaccgcccatctaacatgctcactggtgatgcttagggagaagtggttaggttcacactgtgtggttgagagcacccctaccttccaaagcaatactcaccagggggagaggggaagactttgctggtggcctgggcttaggtttgtggcagatccccactccccagctccttgaggggagtaggggtcctttttgctcatggatatatctcaagcccctaaggcagcacctgtcacatagtggggttagtattttgacggacagaaagggcttgtcctgcaccttatgaggctgaggatcaaccatgatgtcctgtgcctttatgaatcattgcagagaaagagagtgtgaactaagagagatttaattctggagttccagccatccccctcacccctcacccaaggccatgctgggaatcaggaaggctgtcccatgacaaagtggccaggcaagacaaagctccaaggtcgacactgtgtggacacgagagggagggcacttctggtaccagggccaggccggcctatctgtgggctgaggagacccagattcccggacagtgaggaaggtagggggagggtcctccaatgggggatgctagacttcttgctagtaaggcctgtggatgttgagtgagcagtttagaaagcaaagagatattactgtctctaccagcttgtggagcagatcatatacagacagggaaatgaaagctcaaagagaaatagcaacttgcccaggatcaaactgatggcaacagagaatcggctcaaatcaaggcttctgactgcaaagcttagatcttgccatagcacactctctccttgcctagcacacagttgtttaataaatactcattgcagagaggaatatttaggctgttccacaattatgtttttgccttaggccagataggagatttctgctcctctttcctaaggaaaggaagagtaagtcactggaagaaaatattcttggtgaaaatttcatacatattctagagtagagaggttggaacacccatctattcaccactcagatccaacaaccaccaagagcttgccatgtttccttcagctatccttctcttcttcgggggagtgttttcaagcaaacaccagtccgcatgtcatttcactcctacatacttcagtatacacctccaaaaaatatgatcactttctttcataaactccacatcattaattcactggcaacagcaactcttcttatgtgatagccaccacttcctagtccataatttccccaattgtctcaaaaatgattttttatttttattttatttttaattttttgagacaaggtcttgctctgtcacccaggcaggagtgcagtggcatgacctcggctcactgcaacttggctcactgcctcctgggttcaagcaattctcctatctcagccacctgagtatctgggattacaggcatgagccaccacatctagctaatttttctatttttaatagagacagggtttcgccatgttgaccaggctggtcttgaactcctgagctcaagtgatccgccagccttggcctcccaaagtgctgggattacaggtgtgagccactgtgcccggcctcaaaaacatttttttaagttggcttgcttaagtcagaatcccaacaaagtccacacactacctctgtgttaagtctgttaaatctcctcttacctgtggtgggttctcgtccttccccctgtgctgctgatctattgctgaaactgtgtcatttgctctgtagtatattcctctgtctcccacatttctctaaatggaagttaaatctagatgcttgatttcagtcgaggttagctttgaggtggggactgggggcaggaacagttcataggtggcacagtgcttcctatcacatcatgtctagctgtcctactttgggtgggttcaggtgatgacagcctcattcctctattgtaagggttctcatcaatctttaatctaaaggttttatttattgatcactgtctgaatcaaaatttcattaggggttgcaaagcgataatctttttctaatcctattaacatcttctgtatttattagcctaaatgattttgtaaaggagaattctcttttatcaattagtgctgctttgttactctgaaatacagcttttacaagaagggcagaatgaatgaatgctaattctttcctttcaatttcaaaacagggaatttgttcactaaatacttcgaatggtggcccaatgagaatttgtgtgtggggaaggtgggggatgggatcaatatgaacctataaattttgatatattcaatgcattttttgtttgtgttttgagattgagtctcactctgtgggccaggctggagtgcagtggcacaatctcggctcattgaaacctccacctcctgggttcaagcaattctcgtgcctcggcctcctgagttgctgagattacaggcacctgcccctacgcccggctaatgtttatatttttagtagagatagggttttgccacattggccaggctggtcttgaactcctgatctcaagtgatctgcacaccttggccttccaaaagtgctgggattacaggcgtaagccaccacgcccagcctattcaacgcatttcaatcagttgcattattattcttttggatgctcaaatgttctcatctttggccacaggaagtctttcctgtggactcctgtgtccttttgataggatccattggttttggtcgcttctttactttccggcacaaaatatgactcaccatgaatagttcttatccccgatctggaatcagctattcctccaaggagccttcactggagaaaatattgttgatttatattctattctagtcctttttctttcttttttgagacagggtctcactctgtcaccccgactggaatgcagtggcgcgatctcggctcactgcaacctccacctcccaggctcaggcgatttctcctgcctcagcctcccaaatagctgggattacaggcgcatgccactcctgcatggctaatttttgtagttttagcagagacagggtttcgccatgttggccaggatggtcttgaactcctaacctaaaatgagctcctgacctcctgccatggcctcctaaattgctgagattacaggcatgagccaccacacctggcctattctagtccttttccttctatctccatgctgctttctcaaagggatgaagaggagaaatagtgagagaagggaaaaaatgagaaggaggctagtagttattagaattggtaatagattgacattcttcagaccctgtttactagtgggtgaaatctctctgcccgaggttcctgcttatgtcccactctggctttatctgtgggatctcttgcctttttgccccttttctgtctttgttcttagccacgttttctccacatggcaagcaacacacctggggcagggaccgtcgccaccattcctagagggtggggcatcctccttgctatctccattccacttgcaactaggtacagaggtgcagtcctgcagactctgtgcctacggctagttgggaaagtgcatcagcttctgctctgcaggcctagccatatccttgaggtgcacccacatgtgagggtgctaaatcttaagctttcaatgggagctaggaaactcactttggtcttagatctgaggcatgttttccaacatagtaaaccagaatccttgcatttgaggaaacatttggtgtgggcctggaataatagtgaagttcttcatgactctattggcctgtgattcttgggtgtctgcaccacaggccagaacccaggaggggcacaaggaagagtggcacctaaaactaacaacaccacccaatggtagtacaccaaccaaagcattagagatgagtgccaaccacagtgggttagcagagtagctcattaacttcaaggtcacagttattggcaaagagccttggtttttctgagcctcagagttgaagagttgatggaaaactcttcaggatgagaggctaataaatagtttaaatctaaaagtaatctatttctccagagatatctcccaaggttaaaggatactgaatttcaatagccagctatatggttctcctggaagtagcctagtaatggcaaattaacaaaaataaaattattttaaaactacataaaagataagagtctagaaatcaataattaacaaaaatggggagcacagggggctgttctcaaaccagtagcaatgaattgtgccatatacccctgtttacctggatattggtagtggttaccttggatttacttcctgtgcaaaaataattctaaggattctgaggtttaagttcatacttccccctacccctggaaatgaatcttttatccagttactttcttacatatgattgcttttgatcttacaacacctctgggcagcaaaatcattgcctttccaagaatgaggatactgaaccttgaaaaagttgatggactgacttgtccagttagaatgcagaagcaccaggattcaagactagaatatctgacctcgtttgctgtgttctttccaccaaatcatgatttttttttttttcgacatgtaatctcctagctggtcaggcagcctttattcatttccaactgcccaaccaactaaagatgaataattaatcatgcccactgggtttcttctcatcagagccctttgtggctttccaagaacatctgcataaagtcctgctccatgctcctatggctcaccaacctgtcagttggctttgcattctaccctagcctgtgtaaagcaaaatttttcttgtagggtctgtcttttgtgctgactagaggatgcccccggagaacctggaccatgaacacagttgcaaggtttttctgttctaaaagagccagtgagcttctcggaacataacactcagggctaggatacagttctacaaagctcagttcaattttaactatttgtcagcatgtgctacaattgcttctaaccctcctgagaacagaagctttcacaggaggcagggtgggttcaccatgattcacattcaaccttgttttatatttctaagcaagtctaccgacatgtttgaagaacatcctcaaggccaagatcagaaacccgatgcttatgttttcagttttgacacatgtgaaaggctttaactgcagagccaactctccccacttggattttaagggcaattgcatctgctgtcttgagcaagtcatggcaattgacagccatcccagaagcagtcctcaagctctgacagctccctatggctcactcccttgtcccaatggccttgagaaccaaactgacacctacttctcagaaacagttttcccataaatcaccaggcattttggtttactcatgacagataccactggggtagccccattcctttaactctgacaatttaagtaatgccagttttgaggacaatcctatactacctatggtgctggaagaaaacgaaatagaatacagtcttctaaactggaagcctacagcccaagaagaagcaatctcagtttatactactagaaactcaggggttttgagaggaattgggtcagaaggcagctgctgccttcctgtctggggagtcttcttggctgaggagagaaaggaagagctgctccaaatgccacctcctgcttcattctggcaacagtgtggcaccaagagctggaaaaaatgagggctcaacaatgagagaatcagtagctgggattttggctgtaagtataagcaagccaggggctaccctggcccttggggagctgagtcccaaccaaaaaagttacacagtttttaagatctgtggcagacttaggtgctgcctttctcattcatcccagagcaccttcacacatctactggttcacatagtaacaaaaacgaaagagctagatcattctccaaattctccaagagatcaaaccaagctgcaagcaagcagctagtcccctagttattgccagctccattgctggtcttttgcacttgccccagccaccaccaagctggctggctgtggcggagtccctgttgcgggtgtctttgctcaggcctgcctgctgcctgctcacagcacccctcctgactcagcctctgctttctagctcccagcttggctctggcctggcccttctccagcttttacccttttcccaattccctctgcaacagattgacctccgttcctctcaggaccatgtgggcctccttgactcaggaacatcctgcagctctgggtgggtggcacaccctccacccaccctcggggcctgtgggactgaaggccaggcacactgtcattcagaaaggatgacaagttgcaactaaccaaactcccactgcactcagggctaactgtcttgattttatttccccactgtagaaattgccgatgcctgatattacgaagaggctgggacaaggaaagagctctctgtaccccatctgagagagaggaagagacatgccctgggctagagtgttaccaatttaatctttttttttttttttttttttttttaatgagacagagtttcactcttgttgcccaaactggagtgcagtggtgtgatctcggctcaccacaatgtccgcctcctgggttcaagtgattctcctgcctctgcttcctgagtagctgggattacgggcctgcaccaccatgcctggctaattttgtatttttagtagagatggggtttctccatgttggtcaggctggtctccaactcctaacctcaaatgatccacccgccttggcctcccaaaatgctgggattacaggcgcaagtcaccgcgcccagccttcaatttaatctttactatagccttgcctgacaagtcatatggcagaacaacagtggaggaggaggacgataggactgttctccaagaatctggacatgagggaaatggagtgaccttcagaaagtacaccatttgtaagtgaacattctacagataatacacaaacttacatgctagaaatacgtacatttgatcacaacagagatgcataaggatatcagggagggatgaatggtcccagaccagaatcaaacttaagggaagctattaacatttctgaagagaggtggtggtgggtccaggacagaagcgataagatgtatgatcaagccctgagaaataaggcacactagacactagcgagcctgccgcagaggcgtctgagtctaggggatggcaattctcactgcttctctcgctcagagctcagactctgcaaacgtggatggcaacttgtagaaaagtgataagatacaaattgaattctgtctggtagagatgcaaatcatttctcccctcagaaaagataacctcaaaggctttgattttatttcccgacaagttattgggcagctttgattccaacttagaaaacttattccaacatttcttttccccactggctgatatatcacatatcatatatatatcctactaactttatatatatatacacacacacatatacacacacatatatacatatatatacacacacatatatgtatatatgtgtgtgtgtgtccatatatatatatatatatatatatatataaagtttctgtatctcttttttttttcctttttgagacagggtcttgctctgtcacccaggctggggtacagtggtgaggttgtggctcactgcaggcttgacctctcaggctcaagtgatcttcccacctcagcctccttagctgggaccacaggtgcgtgccaccacatctggctttttttttttttttaaattattttttgtagacactgggtctcactatgttgcccatgctggtgtttaacttgtgggctcaagtgatcctcctgccttggcctcctaaagtattgagattacaggtgtgagccactgcacctggccctccttatgcctctttaaacaagttttgccatcctgttatcattccttgctaatgagttaaataaacattttttgacatgagccagtcatttacataagaattgtgtttttcaggaaattctgtcatttgtgacgatgtggatgaacctagaggacattatgttaaatgaaataagccaggcacagaaagagaaatactgtatgatcttgcttatgtgtggaatctgaaaaagttgaactcgtagaagcaaaaagtagaatggtggttactagaggctggggtaaagaggagacattggtcaatgggtacaaagttggttagctggcaggaataagttccggtgatccactaaactgaaagttgactacagttaataataatgtatatttcaaaatcgctaaaagagaaaattttaaatgtggtgggcatggtggctcatgcctataatcccagcactttgggaggccaaggaaggtggatcatgaggtcaggaattcaagaccagccagtctgagaccagcttggccaacatgatgaaacctcatctccaataaaaatacaaaaattagccaggcatggtggcatgcatctgtaatcccagctgcttgggaggctgaggcaggagaatcgcttgaacccaggaggtggaggttgctgtgagccaagattgcaccactgcactccagcctgggtgacacagcaagactccatctcaaaaaaaaaaaaaaaaaaaaaaaaagaaagaaagaaagaaagaaagaaatgataagtggttgaggtgtgaaaggaaaataaaattaaaatctcaggacctcaaactcagtaagccaaaggaaacagtgaagatgggcactgggtcctgcaaacctccttcccatttcgttcctacataggtagctgtatacctttctcatattttgcccacaaggaaattcctggcgggccctgagatctttaaagcagttcagttgaatttcaccccaacaaagtaaattaacagtttatcttcacaaatatgggacaaaggacagaactcaaagtcatccttctgctcacctgagaaaaatgcatatctgactcctccctacctatactctataattattttatcttatgtaaaaatgcagattcactgagctccagataaatatataatggatcactcctttcacatgaaaaatgaaatgaggatggtcagggctggatgccattatttattcagtgaagctaatcaaaaggctcaaaagaacgcaacagcttccgtcttttatccaccctctccctctctttttttctttactctttttcctttaaatattgaagcccacagaccctctctggaaaaagcacagatcacagatttttcctgtggtatgtgtccctttttccccagggcgtgtccataaccttggcaaagtaaaaatgactgagacttgtctcagtcattttctctgacttacagaggtcatgaatatgctaattactcatgtatagattctacaatgtatacatgtatcaagatatccctttgtactccatagatgtatataattattatgtgactatttaaaataaaataaaactttaatgattatggttttggggtgggcatggtggctcatgcctgtaatcccagcactttgggaggccaaggaaggcagatcatctgaggttgggagttcgaggccagcctggccaacatggtgaaaccctgtccctactaaaaatacaaaaaattacccgggcatggtggtgtgtacctgtaatcccagctactcaggaggctgaggcaggagaattgcttgaacctgggaggcggaggttgcagtgagccaagatcgtgccactgcactccagcctgggcaacaaagccagacttcatccctcacctccctcccaaaaaatattatgtttttacatttaaaatttgtgtcttaacagaatcatagagaagggaagctaatggaaatgatacattttgaggatggtcagggctggatgccattatttatttaaagcatacaagccaaactccaatccttgttccacagttctatgttcccctgataatgttctgtttgctgtccctggttctacagggagagaatttgctggtcaaactgataagtgactggtcactagacacacatccacttctctttgtgaatggattctcattctggtatacaaccttatgtctagggtggctttatggcagccatctggatcttgttgaagtctgggatgctgaagaagtctcactgtgtgagtttctgaccctgtaaggttgaggcaagatggaatgatggtgactttaccagaaaaaaatgctatcttgtgaagtctccctcttctgataacaagtgaccctgctccctctttggtaagtgaggaaactgtggctcatggaagtggcatggctaatgcatggcaagcgaggtctgcctgactaggaagcctatgttctctctagtttatcactccttgcctgaagaaagagaagcagatctagcaaagggtggtagacaaaaacaaaaagttcatatattcaatgtgttgtttttagcttccagtgatttccacagtacacaattctacactaggtatttggagaaagttgaagcctggcatgaggattcatttgatcttgagagctgactccaaatatttgtgaagaaagaagcatgtgcaagaataagatacatatttccatttcatacttcctccgagggctgagcctgttcctgactcagagagatattgcaaaagaagctggtattatacacattgaaaatgacactccttctaaggagcaaaacaactttatcatatcaagcagagcaaagctcccctcttggaaaactcaaaaatgttcaaaatgcaaactgaacttggcagggggaaaaggcgatggtagcaaaagcagctgtgaaaaataaagaggttacttgtgagtgactgaaatgtccaagtgtcatgccaccagcagccacaaataaaagcagatgctgcaacattttttaaaagcatttctgtaagaagataaaaatggctgcatacaattaagaagtataattttattgaaaagcatgaatgacaaagcaaaaggaaatgtcaatatgatttttgtttttgtttttgttttttaaagagagggagtcttgctctgtcacccaggcttgagtgcactggctcaatcacagttcactgaagccttgaccttccaggcttaagtgatcctctcgcctcagcctcttcagtagtttagactacaggtgcaagccaccacgcccggctaattttttcattttttgtagagatagggtcttgctacattgcccaggctggcctctaacttgtgggctcaagcgatcctcttgcactggcctcccaaagtactgggattataggtgtgagccactgtgcccagcctcaatatgaattttataaaagtccaaatgctctgcatgtggagaactttccatctacaaaaaatcgttctgccttaaggtgtgcaaagaagtgaggccagaactcatttcagaaacagattaagtggacaccaaaggatatttaagcttcagaagggaaagaagggttatcaatgaacggtagctgagatcacaggccccttatctgcaaagagagagaatctgtgataagctgtagtacaaaccagaattcatttgaaagataagatgcataagatgcagaagctccagggccttacttagatgcagcctcatttcctttgtaccctgccacccagctgttgcctatgatttcactgaaacagttatcacctccacttagcaaaacctaagggagtgattctcaatttctattctgcaaaagaatccactgaaaaggttgctaaaatgtagattctcggcccatgctccctgaaagtgctgacacagtaagtctgggctgggcttaggaacccttattttaacaagcactccatggaaaaggtcatcaggggttcacactccaaactactgtctaaggctttaatcctcagactattggttgagacctactagtaagtcttgaagtcagcttagtgagattagcatttgaaaagaaacagaagaaaaatcagaaaaatgtcagtgtatactgtgcagtcaatttttagtttcattcacatatatgagtgggggtatacacgtgtagtgaattgtgaggtacaatatatttcagactgtgcatcccagctgagaaagttggagaaacagtggcctaaagggacatgaagatcacttccctgtgacccatttatcattttctccatccccacactgagttccaaatcactccagctccacttccctcccatgtctacaaagaggatataagactgtgtttctttgttctccagtgtcaggcatgacaactggcttttcagcttcaggaatgaatatggacaacttgaaggaaggcttgccaagatcccagtggagcctcagatgcagcagatgatgagaagtgagtgaaaaccctttagattctgacctggggaccttccaaaggtctggaggaagagaagtggtaggaaggaatgggcagaaaatgaggggcaaactctggagagtaggttgagacctcagaagatggaaggtgagccaatgcattattctttttgtatggagatgatgttagtaacccacctgcaggagctggagtgtttttagctatttttcctcccagcaatggcacagatccttgtccattcgttcatattatcttgatccaacttatagtgaaaataataaggtttaacaggtgctggtctagatatgaacaggcgcaccacttgttctcctgcatacagcctaaccatgtgagaaagagccaccagaaagatagcaccaggaaaataacgccaagcatgtttagcccggtgtgctattcatctctcccagcttccccactctggtcttttcagccccttgggaattcctccactaggtccatttggaaaagagtaccaaggaggctcaggggactgaaaaccagctgtgcactgtggcttgggttatcttcaacttaaggaaggtgtttttctcattccctagctcccttatccatgccaccaccgcaaaacagtacctttccctaatgttcacaaaggtttaatacaggctagtagtaccccaggggaagagagctccattcctttaacaagtcacttgtcttttcatgacattaggtagtctttcagtgttcaaaagacacccacattcaacacacacacaattaccactctttgctctaagcagcttttgtaatgaccatatctcctccccagcacttcaaaattggagggtgtgcctactaacaaacatcctggatggtctatcagagtaagtgaattccttaaaaaagaacagacacccaagatgcgagcataaatcactccaataattccatagtatctggccacaggcatctcagctatatcttcacttaactaggtcattttagggggcttacaatgtctaggacaccacttattttttagagccttattttgttggggatcaattcagaaaaaaaagtgaagcttcatgggacatgtatgtattgtcaccatttagagaaaatgacagaagtgaaggaaaaaagaagcatcctacttataaggtcaatttggctcatgcgtgtctgtgatctcaggatcttacagttcacacactgccacacagatgttccaaccagtccatccacagccattcattatgccagtaagtggatgatactttttttttctttttaacaagatctttttttttttttttttttttttttagcagagccattttaaacctcagctataacaacacttgcacgtccaattcattgtcattatctttgctaaatgctttcagtgaaggagggatgagaaaacaggtcttttgtattcctgggctatcaataatcttcttccttggaggtaactgtttcactccagagggaaaaaatgactctgttttatacttgctatttgtctatcctgtataagtgagggctgagaatgtaaagtacatagcacttgctaggcactcattatgtgttgatatggattctctttggggtgaaggaaggtgggttatcaagcaggctcctgtttctctggggaacagaactgcacagaagaggggaaggcagtgttcacaggtacccgagggaacccgcaggtgccagccgtcttcttggtacagcagacttaggactgaatatgtggtttccgcaatttaatcaccattggacttcttacagcctaatggtgtatgtcaattagtatattaggatatgtgacttacccatcagacacatctatttagggtaactggataaacaagctaacctgtggctggggcctaaacctgggtcatcatcctaacatgtcagaaatgtctttgctttttctcttagtctgtaattcctcctagcacacaagcttccaattctagactctggtcatgttagaatatttgcatcccctccctcagtgcaccacaatctttgacatccctttgcacctgcttttctctgtgcttggaatgcccacccatcctctaccttcctctgcatagtcaacatctacttctaggaagtcttttctgtcccctgatagtgggttagggcccaccctcaaggctgcccaggcttgcctctgtcattggactgatgccattatcttcccactgtttcccaggcagtctcctcattagactccgtactccctggggagttgtaatacgttctttgagtgaattaatgcacagtatgggtattaaatgaatggaggagtgagtggtgaaagaatgaacccaggattggaacacaaagttcagaacccaacttcccatactatcctttctctcacagtatccttgtcagttgcaaaacaaatagctaggtttaataaggtggctagggaaattgaggtctttagaggaaaaaagcgagtagctagcctattgcctcctctgaatctgacatttatttgctcttctgggtaaggtaacgaatgtctagctaatagattattaaccacaaaaaatgtcttggttctcaagaaagatggcatgagattgttaccattttatacatccttttatattaacaaaaaataaagcactcaccctagaaaaggaaactagacctccattgctctccttggcccagggttccacaaacactgttacttacatatgccttggctaaccctgccagcaaatcttgaattcagctttgtgtgcaagagtgggttttgttccatgtagcaaagtgaggcaactatgacaattagagacagaacatagccagggcttgccttatcctggcccaagacatctaacacatcttggagagaactccatgtctcctgaacaacataatcatctactgcaagtctgtaatgaaagattaagcctccctgcattgaacctgaacccctttttctgtgaagctatgagtgtatgacatttagaaaatcctttccccttccaatgagattggaataataaactaattatgcaagctccgtgtgacattggagcctcaaatttttgtaagaagattatggccataaataattttttttttttttttttgggacagagtgttgctctgtcaccgaggctgcagtgcagtggcacaatcttggctcactgcaacctctgtctcctgggttcaagtgattctcctgcctcaacctcccaagtagctgggattacaggtgtctgccatcaagcctggctaatttttgtatttttagtagagacagggtttcaccatgttggccaggctggtgttgaactcctgacctcaagtgatccacccgcctcggcctcccaaagtgctgggattataggcatgtgccaccacacccagccaccataaatacatttttgataaatacattgcttgaaagctagttttccctgcttttcaggataacctcccagagattgtattttgagaacaaagtctctgaagatctgtttttaagcttctttgcttggctgagcccataggaggataccattgccatgcttacatctcggcgtacatgctatgcagaatggctgccaaatttgaccctagggaaagaagagaaagcttactgaccttgtgcagctccacaggagttggagacatgatctcctttatttcttgtttcatttttctcagggttactgacttcctacccacatctgaaggcagggtgttgctccgagttgtttggctgtagtgcggccgcgagctgctgcgctcctggaagctggcctgtcgccccagctgactgcgaggtgttggagcctcatgattcaaactcatcgtgctccccgacatgattgttgcctgtggcattgacaatttttagaaacaattaagccatggactaaggaaaggatttggtgctcaacagtaagcacatttctccttctgcgaggtaaaaatacagtctcttcagggcaaaaccaaaggctggaaaatggatgtactaattgaactatgaaagtctggaaaatgctttgcaagtgacatttataatgcacatctcaaatccaatttaagtacttaagccattgagtttatttaatcaaataccacccctggcagttttgaggcaaattgaaatgctctaacatttgcttactgtaaactacattttaagcattcactttccactcagtgggctctaacagatgggattcatgaggccaccttgaatatatcttacagaaacgaattaagaacttctcaatggacaccaggctgcctgtacttgcaatgctgcctctatctccaactgcagttaacaatgggctggaaagggatgactgatataaaggcaaggggttcttcccaagcttcgtctagactgtatattgtctttcctttggccaagtggcctgtccccagagtttgtagaccagctaagtctccatattatttgatacagattaagtgtttcttagaaatactctttgtataagatcctcagagaaagtaaaaataatcatttattatgttattatattcaactttttgctcacaagcagtaggacttgaattggatgttaccagtgaattgggaagtttgttcggtttcaaatatgttcttccctgaatacttcacaagcaatgacaagattagataccaaagatgaataaggctcagaactggaaaaaaaaaaaaaggatttgaaaccaatatcaagtagtggatattcatttctcatggttggagaatgctaaaattctgaaaatatgcctgtagccagttctgtactcctgggtataatagtataaaggtaaactagcattggtaaatcttcctgataccatggggacagaaaacaagttccatttgccatgtgatttagttgtttatattaatactgatgctaaaagtaaccgcagcttaacttgttgagtcttttgaatgtagtcactcatttaagcctcacaacaactctatggggtaggcactgttacttctctcaatttatttatttatttatttattttcttttttgagatagactctcactctgtcacccaggctggggtgcagtggtgtgatcctggatcactgcaacctctgccttctttgttcaagcaattctcgtgccacagcctcccaagtagctgggactacaggcatgcgccaccatgcttggctaatttttgtatttttagtagagatggatttcaccatgttggccaggctggtctggaactcctgacctcaagtgacccaccccacttagcctcccaaagtgctgggattacaggtgtaagtcaccacgcctggccattcctcccaacttataggtgaggaactgaggcacgaagaggctgactcacccaaggtcacattggtagtaaatgagccgagggcactttataaaactattgatcatgagggaatactgcaaagtgagtagagttttcatctgtcacgtctctaagatttcatagttcccaaattcacctggtgttcagctatacacacactactaacaagatctttgaacaacagccaagtgttggcacacatgtgcatatatctaacaactttgttgaaaaagaaatgaaacaagtagactatatcttgactagatcagttatctcactgataattttgaaaaagaaaattataactgtaaaaagacttgctgatcactgaacattaacatgtgctaagtcccatacagattgcatgtagaatatcatttaatacataagtaaccctatacaatagatattaaaattaccatacatcctcatttcagtaaaggaaagagatgcgtggacaagttaagcaacttgcccaagagcctgggcatggagctctagtactctgactccagaactctttttcttgactgcttggtgcttctcagtcaaatgttaggttgaatcatataaaacttcctttttagtaggtagaaagatgcctagcatttaaaaacaagtgtgggctatttatacaacagtttatttcagataaataccctttttaagttgattgaaacctttctttactggcttcattggtgtcatgggatattctttattttatggcacttactcatgtatataatttctatgttttttattttattttttttgaaatggagtttcactctgttgccaggctgaagtgtagtgatgtgatcttggctcactgcaacctccacctcccgggttcaagcgattctcttgcctcagcctcccaagtagctgggatgacaggtacccgtcaccacgcctggctaatttttgtatttttagtagatatgaggtttctccacattggccaggctggtctcaaactcctgacctcaggtgatccacctgcctcagcctcccaaagtgctgggattacaggcctgaggcaccgcacctgccccatttctatgtttaatctagtgtatctgacagcactcattggttgttttcttgccatgctgaccatccatttattatttttacctacttagactagttgtttgctttgttaacatccattttttaatattcatttttcatgagaatgacaggacacatgttggaagtaaaacaatcactacaactgagagaccacagttttgctttgatgagtcttagctgccatagaagaaattacagattgatttagaaaaggttctgatggaagaaataagatactatcactaattctttggttcgcattttcaggtaagtatgtgaatctgtacagtaatcaaagtttgattgctttgtttaaaatgaactttaggtagcatctaagaaggaacataaaaggtaaaacaaatataaaaactaaaataaaaagctaaaaaataattatttttaattacctaggatttgctttggtctcaagagtatgtattacctgttttcatttgccataattcatgattgtatattattcctaaggcagcctagagttctctatctgacatttagttaaaccttcttcttatattatgctaaacaaaaaatagttaaagcagtgatcattaatcaagaaagggcaaaaatactaatagttaatttttattgaatacttaagtgccacataattattagctcattataattcccatttttatagaagaaatatctgataagagaggttaaaaacttgtccaaagactcattcaaatttctctcctttgttaaaactatacatttttcggtgctaaagttgaacctaaattattgctagcaataggggaaatgattagtaaattaattttcatttccatttcaattgtaatcatctttcatcttagctaaccttctacatttattagtattatagtgtgctttaacttttaatgctggatgtaaatttaatatgcaagaatctagctctaatattttttgtataatagcatttccaatcaagggaatggggttcatttaaaccaataaataaatattctttgtgataaaagtgtaaatataactaatttatgaatttgccaatcattcatcctagttgaggatttaatttctctttggcttataaattcaactcatttgctttctgcattaataatgtcaagggccacatctgtctggagctatgttacagcaaattcataggctgtggcaacataacatctactcttactgatggatgttgttttcatcagataactcaatttctgggtgaaaacagaacctgattgtatcactttttacatcattttctttttgcctaatgtaaaataagctgttagaaaaacaactttttttcttcaaaagggaaatatcaaaatgcacaatgaaaaagcaggatgagccaaaacatgctttcaaaagcagggctatgttcaagaattgtgaattgtgctcgttactcagtttgggctacttttcttcatcattctacatgcagaaggtggtacaggtttaaataagccagctgatacttcagcattctgctctttttgaaagttgtataaaaatgaatcattgctaacatcttacttcatttagattttataggattatccatgtccaggacctttaactgtgctctgaagctgcaattcatgccagataatactatgatgtttacaagttcaaactaatagttttctttataattctctttgcagattcacaaacattagaatcacataaaataaccacacatgcaattgagaagcaaaataatataaagatgagtaatcattttagaattgcaagagtttcaccccattatgccattcacattccttatggtgacttggggacctcataagacatcaaaataaaaatgagacttttgccactttattttttacagctcagaaaatttaaaagaacataaaaggaaacagtccaggacttcctagactaaagtgtgaataccatcagcaaattcatggctttgattaaagaactcaccaggagttcagctattacattccatctcgttcttccttgaattcacactaagttaatacagatggaatcaggatttacaattaacagcaatgtactgtgtaatatttttgctgcttatcaaatagactggcctttttcaccagctgcattgtcatctactttaaggacaaaacaaagtaaaataaaatttcctcttatgttcctcttaacgatcacattaatttctattccaggtacaaatgaaaacatgccaaagaaacctttctaaagcaactaagagaatgggatgcgccgctgctgggagacttagctcgctttttagcgatttggtaggaaacagatacaatcagggttagcagggagcaatggcagaagccacaagtcagtaagcttgaggggtggagatggggatatacttttgactgcattgtataaaatcaaattgctgtccagaaggcaagggggtagggaaggcagcttcacaagcaaaaatataaacataaagggtagctaccaagagagtcatgtttctcaaagacacacgcctgtcagctttctcctgtggaaagggttaaagcttttaaatgaactggtgtgagaaatgcaaacttaaaaggaccaaaaaaaatgaatgtagaaacaataaaagtaagtagcaggaccaaggctacctccagttctctcagaattcctgactgtccgcaggtttccaaatcctccagcgcttgagaccagaagttctcctcttgttctgtctctgcactatcggcagcccctgcaaaactgttgtcaagaaacacaggctgggttaggaacttgccagacatttttttttttttttttgagacggagtctctctctgtcgcccaggctggagtgcagtggcgcaatctcggctcactgcaagctccgcctcccgggttcacaccattctcctgcctcagcctcccgagtagctgggactacaggcgcctgccaccacgcctggctaattttttttttttttttttgtatttttagtcgagacagggtttcaccgttttagccaggatggtctcgatctcctgacttcgtgatccgcccgcctcggcctcccaaagtgctaggattgtaggcgtgagccaccgcacccggccttttttttttttttttttggattcagaatatctctccttcatctcacacgaaatatagaaagagagtcattttggatctggctttcttccacctgtgccctccaagagtatgagcttcagcagagggacgctttaggaaatgcagtgttgtgaagatggaaaggatggtccatggtcttactaccggatttcagactatttgtggctgctgctaaatgggctgcagccacatggccctgttggaatgggatggaacgtcggaaatgtatttcagctgctatatctacaaggaacgagaaatcaaatttttctctaagagagaaacatgtgtttttctcacttatttaaagatcattataagtaaaccaaatgctatcagtttttataaatttccttaaaatgttttggtaaggaacaaaatggtaaaatatactttgctgaaaagatggatccatgaggtatcttttaaaaaaaaaaaaaagtaacttaatgtgaaactaacttttaaaagaaaggagaggggcccagtgcagtggctcacgcctgtaatcccagcactttgggaggcctaggtgggcagatcacttgaggtcaggagtttgagaccagcgtggccaacatggtgaaaccctgtctctactaaaaataactaaaaacacaaaaattagctgggcgtgttggcaggtgcctgcagtcccagctaatcgggggtctaaggcaggagaattgcttgaacctgggaggtggaggttgcagtgagctgagatcataccactgcactccagcctgggtgacagagtgagaccttgtctcaaaaataaaaaataggctgggcacggtggctcacacctgtaatcccagcactttgggaagctgaggcaggcggatcatgagggtcaggagttcgagaccggcctggtcaacatgacaaaaccccatctctagtaaaaatacaaaaattagccaggcgtggtggtgcatgcctgtaatcccagctactcgggaggctgagacgagaatcactcaaacccaggaggcagaggttgcagtgagctgagatggcaccactgcactccagcctaggcaatagagcgatactccatctcaaaaaataaaataaaaaataaaagtaatacaatataaaattaaaaaacaaaaattaggcacatgtggtggcacaggcctataatcccagctactcaggaggctgacgcatgtgaatcgctagaacctgggagatggaggttgcagtgagccgagatcttgccattgcattccagcttgggcagcagagtgagactctgtctcaaaaaataaaaaaataaataaataaaataaaataaaggagggggacctacttgtcataaggaagggagtgcaaagtttatagaagcagcttctccccaggtgctactactgttttcgttaggggaaacccagctcttgccctgttgtgtggtgcccaggttgccactggtcaggcagcttttagaatcctgccatgtggccagcatggatgattatggtggctttaagaagcccatactaacaatatgtgctactggaagtacagaagttcaaatcttgcccacatgaccatgcagtcatcttggatgaggcagcattggttgaaaaccttacccactggctgtggaccggtcccagtcttcataactcagccccacatctgggtaagtctggcttcgaggcttagtgactggggacaagctgcctctctgttttggactcctccagtcataggtgttgaaattgtatcctgaggcctgaaaactagtgcctaaaatataaacaaggtgttagcattgggcccaaggattacttaatccattgagaaatgacattgttaaccagtagaggagtcaaattataacggcaatgacaataacaatagtgaacacatagtgtgtgcttattgtgcaccaaagacttcaccaagtacttcattttgagccatctttcttctttagagccatctttggaggtagatactcctattatttgcattttacagatgaggacacggacggcttagaacagtggtttcaagtacctaaggctatttgcaaactttcttgggagttcaagtcataatttttggagaatcggttttcagatcctcaagttctagatgcacttcttccccaaactggcttagctgagatctgccagttagtgctcccttctcatttcctctttcacaactgtactcctgccactttacaaacaaaagacatatttctcatccatttcaaatcttttttcttgagatggagtcttgctctgtcatccaggatggagtacagtggtacgatctcgccccaccacaacctcctcctcccgggttcaaacaattctcctgcctcaacctcccaagtagctaggattacaggagtgcaccaccacacccagctaatttttttttttatttttagtagagacagggttttaccatgttggccaggatggtcttgaacttctgacctcaggtgatccacccacctcggcctcccagagtgctgtgattacaggtgtgagccatcgtgccggccccatttcaagtatttgaaagtgcttgggccctgggatataaactcctagttgccaattcaagggataatttgggaaagacttgttcctgtgatgaggtctgttgggagcaaggccttatttcaaccaggcacaaactcacagcaaggctttcacccctctctcttgtccatctctcatgctgcctcagagaactcagaagggcaacggatgtcagggataagaagcctgctgcgtttattgtttatttgaattgcaaaatgctgacttttttccaccagggagttacatctgattagcctgatgggtgagacagtgaggaatggctttggcaattatgttacataatggacactttccacaaaagtatttccaagctgtagttccaagattttgatagaaatgtttttaaagcatttttacaacaaactggaaattatagtctttgcaagtatttacattttgtgagaaaaacatttagacaacaacttttagtaggtgatggggtatgtggttctttaaaattattatgggggttcaagtggggctcgattgtaggtctgattccatagcttgtgctgtaatcatcacatacgccttcatccactacctcaggttgtgacttgtgtgtgtgcatgtgtatttacatggatgcgctggcttggaatatggtatgtgtttcttactgtacttaaatcatttaatacagcaaacagacctgtacccgcattttcaggtacagttaaatggcctgattgcgtaagatgattctgtctccatgatatccctgcttcctcttccccattcactttctctccacctgttgtcgaagcctctaatgccatttttgctactagtttaaagcccaagcagagcaggatatctgaaggataatactctctgatcaaaaggatttgatcttaagaacccagggcaatgcctaccaccacatgatggaaatactctaagaaccttctattttaggacaccaaggattagaagaccttggagcagaggaaatatttacagttcaatgtctcattctctttttcctagataactgcaaaagtgtggttagccatctgggaagaagtcttatgaatgcagttttctgtcaaaagtgttgacttaaggaaacacagatgtgtcttctcttgaaggggaactaagtagctgtgaatttcatcctggctccctctgatggactaaccattttccccttctgaaccaatcaaaccaaccccaaatacatgaagtctcagcttttataatacaaagagtttggggaagcctgtacctcacttaaactggtttcaaccctcaacctttcaaagagccaatgctaattggtggtgtcttcctggagtatccttttctgataaacattaaccccgatgaccactgaattccctggtgaaatttcaacattttagactgattttctttccaactgttgtatgtataataagtagttcttggagacttaggcaagagtgcaagaatgggcttgagcagatgtgcaccaccatcagtaggaaactgctaaccttgaaaggcatgtgtatctctaataaggatgccttgtcttaataagcactattaaatgattattgcattacaacaaagcagagaaagaaaaggggataagattcaaatctctgggtgaaatgtaaagtcagaaaacctgatcccagctcttctctagtccgtgctacgctgacccagagattaaagtaagaaaagttgaccaggtgcggtggctcacgcctagcactttgggaagccaagacaggcagatcgcttgagcttaggagtttgagaccagcctgggcaataatccgtctctacaaagaaaaaaaagacaaatcccaaacccctcaaaattagctgggcatggtggcgcatgccagctacttggggggctgaggcaagaagattgcttaagtctggttgttgaggctgcagtgagccaagtttgcaccactgcactccagtctgggtgacaaagtgagatcctatctccaaaaaataaaagtaactgggcatggttatgcatatctgtaataccagctacttgagaggctaagaggatcccttgagcccaggagttcgagaccagtctgagcaacataaaaagaccctgtctcaaaaataaataaataaacaaataaataaaacttaataaaagtaagaaaagaccaaggttcaaatcctagcttagccacttcctcacttcacagcctggccaattaacctcagtgtaaaatggggataacaataggtagtttaccaggttgataagaaaatgaagaagaatgaatgcacaccttatgaaagtgcctagaacacaaggaggttttaatgaacacagatgcccattgttactatatactaagcccttcaacctctcaagatctcagtttccttatctttaaagtagggagacaaggaaaagaggtaagtctcagcatcattaatgcagtaaacacttgggtgtctcttaagtatcagatactatatatcaggaactaaaatgcaaagggaaataaaactgattcctgtcctcaaaaactgcattgtttggtatatgtataggagaaggagaagaaagaggcatagaaagtgagttctagtagcatgtgaaagtgtcatccttttagtcttaatgcactaatatggaaggacagagacaggtttggggattagaaggtgggtcatgaagggtgccaaaggaaaaatgacatataagcttgcagttagatagcaggtcagcatttactagttggaactgttgggtaagacagtacatggtgggcacagtggctcatgcctgtaatcccagcactttgggagcctgaggcaggtggaccacctgaggccaggagttcgagaccagcctggccaacatagcgaaagcccatcactactaaaaatacaaaaattagctgggtattgtgatgcatgcctgttgtttcagctactctggaggctgaggcaggagaatctcttgaacccgagaggtggaggttgcagcgagctgaaggcatgccactgcactccagcctgggcgacagagcgacactctgtctcaaaaacaacaacaacaacaacaacaacaacaacaacaacaacaacaacagacagtgttggccaagtagaagagagcctggtaaaggtgcagtcagggtaaacaggtcctcgattctatcagtgggtctctgttctactcctaagaagggaaaagtattccaggaatattctgggccctcttaccatgtgtacttattcctccccataggaggaatgtgatttacccaactggtgagttttggaaaagaacattgggcatgtcactcagcccattcctggctttctctggacgctttctctcccactgctgctgtgctgtgcggtaagcaagcctgggtcacaatcttggggctctctgagcttgatggaggcaagaaaaggcatgactaggcagttggataaccatggcagactacctgttgctcatcagaacattcattctcttcttcgtccttagtaccagaataccagtttcggggtgagcaaattattgctcagactaaaactatacttcttagcttctctcaaagctaagtgcaacttagtgaaatgttctggtcaatgacgtagctaaggggacttctgagaaggctccttacatctttgctactgctgtctggaatgcaaatgaaattgctggagccccagtaactgtcttggactatgaggtgaccccaaggatgaaagtcaagtgctaagcaaaacagagccgaaatatttagaagcatgggcctctgatgacactgtggagttacataccagctcgaagtgcctgtttctttataatgtaagtcaatgtattattagagttttcagttctcttcagctgaacctaatctcattgattggtaaccagttcagttatggtttgctgtgtagatctgacttgcgtcttatttaaatttaaatgtctagacttgggttgagggtaggaaaataattatcctgattctggctgcaggaccaatccagctttttctagcaaaaaaataaaatgaaatgctgatattttaatccatagctgactctcatttctatttctcaatggatttgaaaccgattaagaggttaattaacatatcaaaatacctagtgttatcaagataccaaaatgcaaagcttgcttagagaattgtgagatattccgggtatgtgtactaaaaggtactgcaaggaagtgtcagcagatggactgacaaagtatttggggactagattacaaagaaccctgtgttttaaactgaagacctttgactttatcctataacaatagataaccatcaaaagagggtttttttggtttaagggagtggcatgactagatttggttttgctaaagattatagatagaaatgtgggaaaagatgctcaaagtaagaagataagtgaggaaggagttaccatatttcatcaggcctgaaacaaaggcagtggcaatggagggacatcagagatgctaagtgagtagagggagtgagatacctgggtcctgatgacaccatgggaaaaataaatcctgatgttgcttaaatgccatcacttaaattttgtttcgtatgtagaagaaaatcttcaaatcagctaaacttgacctttaactgatacagctggctggtgataccatgatttaaaagagggaatatctgaggaaaattatgtttaggtaaaaggcaaacctgttgccattactgataaaaagttaacaggctctgaggaatattcctttacaccaggagtcaagcttaaaagccagggaataaatgaggcagcccaggcgtaagaaaaaatcaactgccagatagataatgaaattttttttgttgttgaatgatggtgtaagcacatgaaatacacatataatattggaaactacattttaaattaaaaattgataaaataaataagttgaaaaaagaaataatgttttttaaatgtactggccaggcacggtggctcaggcagggcacggtagctcatgcctgcaatcccagcactttgggaggctgaggcgggcagatcacctgaggttaggagttcaagaccagcctggacaacatggcgaaacaccatctctactaaaaacataaaaattagctgggcgtggtggtgggcacctgtagtcccagctacttgggaggctgagataggagagtcacttgaacctgggaggcagaggttgcagtgagccaagatcgcaacattgtactccagcctgggtgataaaagcaaaactcggtctcaaaaaataaaataataaaaaataaataaaatgtatggtcctaagtcatttctcctttggattatttatttatttatttatttatttatttagacacagaatctcactctatcgcccaggctggagtgcagcagcatgaccttggctcactgtaacctccacttcccaggttcaagcaattctcctgcctcagcttcctgagtagctgggattacagacacacaccaccacacccagctaatttttgaatttttagtagagacagggtttcaccatgttggccaggctgatttcgaactcctgacttcaagtgattgcctgccttggcctcccaaagtgctgggattacagatgtgggcctgcatgcctggcctcctttggtttagaattggcaactttttcttctttccttctttattttacatctgggtttccatatctgatcttatactttgtatcctaataggaggtataaaatttagtccagattcctttcactgatattaatgtttagttttatttatttgcataatggaaaacaggtcttcataaaaaataggtctttatttgcacaagtggaaaacagcaaagtaggtatttctgaaagtagatggaatcttgataggatgatttttatttttagggtaactatgccttagatatttgtaaaattctaacattccaaccttgtaatatttggttttctgtactaatacagattaatatttgtagcttttaattcatacccagcattaatttagaaaagtgaactaatcagtgtgggttcatattcataaagtttagaattcaattttcggccgggcgctgtggctcacgcctgtaatcccagcactttgggaggccgaggcaggtggatcgcgaggtcaggaagatcaacaccatcctggctaacacagtgaaaccccatctctactaaaaatacaaaaaattagctggtcgtggtggtgggcgcctgtagtcccagctactcgggaggctgaggcaggagaatggcatgaacccgggaggcggagcttacagtgagctgagatcgcaccactgcactccagcctgggtgacagagcgagcctccgtctcaaaaaacaaaaaaagaaaaaaaaatagaattcaattttcatctcaacaattttgggactgtagctcttgccattactttcattcttggaaaccaattttagtacaggaaagagagccagttaattcgctgccaaatttgttttctaaagacccagttttgtgaaggatgagaaaatcaaatcatatgtttgtgtaactatttgtaattgatcttgccaagaaatattcaaagtattcagatgaggctgtgatctaaatgtcaatgcaaagacagttctctcttctctcagaaatcacctcaagacaaaaagtaatgataaataacagaatgcaacctccatcttaatcacaactagagtgttcatgtaatctcagaccataatacataagaaaatacataatacataaatccagtggaagtcaaatgggaagggggtggtggtggtaagaagtggagagaagacacctatggccaggactaccaaactactctttggtagacaactcagtctaccaaagcaggggcggtggcatgaggcaaaactccaatgctttgtttggaacaccagtatgcactgcatggctggtggcagaaagtacatgtgatcccatctggcatcaaggtaaagtcagggaaagagaacacatgtcacagactgaagggagcaattgctcaatgaggcaggatagcagagaggaattctgttttgtgagcagcctgctgttgctgctctctggtagctggggaagaatttactcacacataccatgctggaactggggtgtgtttggtaccttggaaacagagcctctagcagcttccagttcaggaagaactcatctcattcagtggtgagcagtaattgaaaaggaattggcataacatgtataccaagtaaatatcagacaaatgagagcaaaggcatagaaaaacaaagcgatagcagatgaagaatactcatgagaaaaagcctggttcagagcaaatgataaacatgaccaatcagaaataatcacaaaatttaaaaaatacacagcaaagccatcacctctataaaacaagagatcaaagcagaaatataagaactctagagaaattgggcaaggcaagatgatgatgaaacatgagcttgtagagatcagaagagaaacgaaagagaaaaataaaatcctgctaatgagtagaggaggataccattgggtttctactctgtgctatcctctgtatgatttgtattctttaatgacattaaataaagttggactctgactgcacatgttggtgtcctttcagttatcatccttatgaaaacacaaagaaggaatatatccttataaagcaatgaaaataaataaatcatgcatccaacttaagtcataaaaggaataaaatttaaaaggaactgaatgaaagagtaaaattaaaagtaaaattgtacgtaaaaaaaaaaactagagtaaaactaataaataaatgcaagagtcagttctctgggaaaaaataaaaaccaaacaaagaaatcaaataaactgttactaatcgaatcatggggaaaataataaaaccacaaatataccaattaaggaacaatattatggatataattatagaaactgagaaaataaaaaattaaaaaagagattaattatataaaatacatttgacatctggatgaaataatttcattttctgagagaaaacaaatgatcaaaatgacctcaaaagggagaaaaataagatagaaatatagctatctgagttgagagtccaaagttacagagagcacaagagctattcagcccgcgagcatggcagtctatgtaccaccaccaatttgccagtctcctcttgtattgacctttgctaaatccaagtaaagcagtcatagggttttctcagagttagaaggaagaattaataagatgcaaggaggccaaatgcctaagattttgataaggcagaagggcatgaggcatctaatgggcaagacaatggggagtgaaagaagctgacctggaggccaactggaagaagtcagccacacagtggaactgagaatcagccccttgtgggacttccttaaacatatcccttctttccccacaaggtttcgtcattccattctatttcccttttcactaacgaagtgatagggccactgtttgtttatttgttaactgactgtcccttcagctgggtaacctcttccatgggagcagagaccatgtctcctttgtccaagagtgtatccacatggtctatgggcctgatattgagccagtcattacatactggttgaaggaatgaatggagcaagcttgatattttagagaagaaggagagaacagtaaggaatgttgctgcaaagacatcgatttccagccccaggaggaagatgtgcattatggagtctcctgggaacaaggcaactattacagccttaaagggaacagagagaatgtgcaggggcttcctggaacaaggcagagagcctgctgagaggctggagggacaggttggagagataagctgtatctcacaacataatattgaataggaaaaataaaagtgtggttctatgccttgcttttatttttgttttaattttttttgagacgtagtcttgttctattgcccaggctggagtgcagtggcatgatcttggctcactgcaatctccgcctcctggttcaagcgattctcctgcctcagcctcccgagtagctgggattacaggtgtgtgccaccacgcctggctagtttttgtatttttagtagagatggggtttcgccacgttgctcaggctggtcttgaactcctgacctcaggtgatttgcccacctcagcctcccaaagtgctgggaatataggcctgagccactgcacccagctgtgccttgcttttaaaaagtcaacctcacaagcacaatctggagagatgcagtttaactgaatatcacgggtaaagaaaaaaaaacacattcacaagactttgagatctcggtaaactgtaagcgcaaaatgagtgacagatgtgccatgaccactaaaattcttatgttgaggtaggtgtcattgatcagttctcctgtcttcaatgatgccagtgaccagcttgctttgctccgggctgtcgggctgttgtgtgattttcctttctgaatgttacactttaacgggtacacaggtaaactgaagcacattcgtaagggaggtccacaggacgatacagatactcgtcagtaaattatagaagacacagttaaaggaactggggctattttgcttggagaaggaaagcctcaacagagacccaatagctgtcttcgagtatctaaggggctgtcaggagaagaggctttagtctagtgcagaatgaccttgagggtatagccgggactattaggcatactgcagctcaatacaagtgagagctttagagtcatcagagctacgtggagatggggggctgcctcagcacaaggaacaacctgtcaccttgggcattcaagtccatgcagcgtgtcttggcgtgcagtgaggcaggacctggcaccaagggctgcactggacatcagactagctgactcctaaaccctttccaaacctgaaatcctgccttcagctcccatgttcgtcacaagaattaatggggattagttatgtgaaagtgctttgtaaactctagagtgttctatatatataaagggttattactattttttcattaccttggagtacttcgattctatcctgattgccattgtctctacttatccctcagttcccttcaacctcataaaaatgtctaaattataaatgcaaaatgtaatattatgactatgattcaaaatttcaaaatgcttcacaaatagtaaatggtttttcatcttttactagtgaggggcaggtcctatattcagtttgcttctcatggtcctgtgtctgtggtttcaagggatggagtagctaaggtcttacagatcaccttacagggaagaactaattaatatcaatagcaccctcacaaaaatctctggtaacaaaaatatctctacattaataagcaatacacaaaaaatacacaaataaataaccaatacacaataaattgataaataaacctgagtctactctgatagaatgtgacttctgtcctttactcagtgtcttctggtggcccatcaattctcaggcaatcagaaggtctgttatttggtggcataggtgaacttgtcacaaggtattatgacttggaaaaattaattgccagataaagccccaattctacttaggtgttcaaagtattttccccacctaactccagtatcatctctaatgaaagtaacaacttgacaactttgaaatatcatctcctttcatttttttttccagttttttctcccttccatttttgttttttgttcaccagaggacttaacagagagtgacacaacataggcaggctgagagaaggaaactaggaaaaccaggagagagcaaactggatacagacactcctaaaaagtacagttaactcagtgacaaagcagccctcacaccaatgtgttctctaaactgtttatgtgttttattatttgactgactgaaacccagagcaaacaagggattcagaggctggaatttacatagaacatgagagaaggtaaggctcagatgaggagaaataccaagaagttttgacatacttctcttgttgatgctacggatcactgggaagaaaatattttttaaaagaagctattagtttatgctctgtattcagtctgacaccttttatgtgtttatattccatgagtgaggctttttaatgtagatagtatttcttcacatgacgatgacacctatgaagaaaaatctactctatactttcctatattgtgattatagtgctctaattataaacattcagggaaagggcatggtggctcatgcctattatcctagcactttgggaggccaagatgggaggattgctggaggccagaagtttgataccagcctggagaacatgacaagaccccgtatctacaaaaatttaaaaatcagctgggtgtggtggtgtgtgcacatagtctcagctactgaggagactgaggcagcaagatcccttgagtccaggagtttgagactataatgaactatgatggtgccagggtattctagctggggtgacagagtgagacccagtctctaaaagaaaaaaaaaagtcaggagtgtgcaggaataaatagagtcacaaatcattggctaatctcttatgcacctcttccaaactccccaatccatctttgtggaaagcttgctgaaaaataaggcaatggggcctgtattgaacgagccactttattgtatggtttgcctcacattaatctaagcttgaaggacaagccctggatgggatacttggccatcagtagacctaatggaggcctgttagtgtttggtaaaggttcatgccttataagcactagaagaaaatgcatggccagcagagtgtaagtattcaatgtgttcaatatgattatggctgcaccaaagcagacacaagttaaagaaagatattctcctcatggagcagaggatgaatcttggagaagcatgggcttcaacaatgacaagtcctctgggggacaaagtaaagacataccttgagttccatagctggtgtctattgcagacccatcccatgaatccacagcactgtccacactgggcaccgtggaggggtacatgtcggagagcttgcctggcttctgtgctggtgaggagtcctcctccacatcccccaggtcactcaaatggctagaaatagggaacttcttggggctcgatgctgactgggctttatagacaggaaaggagtttaagtatcagagtaaatttaaataaaaatataccaagatactccgtggctagagatttgtttccctagaattacacacagacactagcacattctttcaaggaagaaaatgcactggaaatccttaattgtggctttcaattcactactcaccatctgtctgtttcttaattttcaaggtgacagtctctcctgccatctgtaacaaatggatggcttcactcagaggcttccctttcaagctgctgctattgatggctaggattcggtctcctatgtggattgcgccagttctgaaaagccaaatagtaataggagaggtagaaataatccctgtatggtactgaatataaattccctgacataccttatacattcatcataataaagacttggtaaggatctccagaagtcccttcttgctttctcctgggcaatgttataagataactgcatctgttgtggattactttttagtttccaataaaattttaaaaattgttttaattagttattaaaatgaactgtgttttttaattccaagaaagctgagtcattggttaagcaccctaaaaatcccaagaaaatgaacaatgttgaatgacaaatgtagtggatagcatggagcatcctttctttctacagatttttttttttttttttttttttttttgagacagagcctcactgtgtcacccaggctggagtccagtggcacgatcttggctcactgcaacctccgcatcccgggttcaagcaattctccagcctcagcctcccaagtagctgggattacaggcaagcaccaccatccccagctaatttttctatttttagtagagatgaggtttccccattggccaggctggtcttgaactgacctcgtgatccatctacctcggcctcccaaagttctgggattacaggtgtgagccaccgcacctggcctgtatgagctaatttctaaggtacactgcagctccaacattttgcaatgctgtgtctctattttgctagccactgttttcaactgttagcaggaacaatgcatttgtgtattcctgagctaggttactggagggcagatttgcttatagggtttgttatatgtccaacaacacatctcagaaagaaatgcagtttagcggagggtggggagtgggtgtgtgtgtacatcattgccaaaggaaaaaatggacattccagcttttaagacattattaaaatgggttatacactttgtttcccataatccttgaagatgatgtctgtatcatccttttctgaaaacacagcagctaagtgtggcacctgtcaggtaacagaggctcagcaagtgtttgctgaatgaaattggacaagctgttcaacctccctgaactttagtttcctcctctcaaaatggacacaatacaaatccgccttcagtcaattgtggtcagcttatacatttcagagagtagtatcaatgctaagcccaagacgtcttttactgcctgtaagatgcccctcagagtcaagtcggaactctgcctgagagttctcaggctctaagatcaatcctttgtgcagatttttaaaagccaacagataaccacagagagaggagcatgtttttatgtggttgtgaggaaggaagcccgtctcagacacaggtaattataacagttacttcaaattttacctttcagctaatccccctttagtgaggcttgaaatgattataggatcaaacggctcttcagttcctgaaattgtgatgccaaggggccccccgtagcgtttaagctccacggtgtaaataattgctccggaactttcttgctcatctgtaataaatgccaaggaatcataattgatttctttggaaaaagcaaaagagtaagatgcatagattcatacataaaagaattcaaaacatcctcgtcaaagtatcatgtcacagaaaataattattttgggaagtagcatttccttagtaggatcttacattcaaatacagggatataatcattgtcagtgccaggggagaggaacactgcctaatgacttatgttttaaatgtgtgagatccgcccagctggggctgcaggacctttcaactgtgtccatgtctaggacagtgcttacctagcatttagtaagtatgcagtaaatatctgtgaaataaacatatggctgaggaggcattataatatgagaggagagagtcactcagtaacaaagaagacagacattgggtcacgctgtttccgttttaagctttacatgcatgctaacttttgatatagaaaagtggattttgcgaagggttggaacaaataacatatatatggttaagtggaacttagataagtaaacttgaagacaacagcaagaaatctagaatctcttagatatcattccactgactgtcttctaatgtgagtcctatcagtgaattacggatattaaagtggaggtttgaatgatcatctctcctctttcaatggagtaacagctgttgtaagctatgtttcaacagcatagaccagcctgccacactgtcataaactaattttggctattcaacattattatagttgaagacacttgtgaatgtgctctgcctaaagcactggccagaaagatatcatgggccgccttcaacgtgatgggtattgtgatggtgtcagagttgcaaataagaagtctcagaattcaaaggttttatttgcttctgacatgcttaaagttcttgggcacttcttgttttattccttgggcctgggagctgtgaatggttaaggaactgtttcatttctgcaactaaggataaaatgaaatggttcagtggctactttagcaaaatagtcagcttttacagtcagactacatcctagtgaagcattaacatggccacatttttgcagtgagcagctgttcgtttacgatatgaaatcctaaaataaggaggaaaaccaaagcttgagttaacaattcaattatttgtgtttgcagtgaagaattatgatgaatataaaatgaaaggtctatcaagtcatttgggaagcaatgtgtcctctctcgccagcacttacttcacttctggccatagattgggagttttgaatgcagccattacctccactttctgagtgctctactcaacgtatttactccacacattcagaactaaagaccatccaccacacactgcaatgcttaagtcaacattttagggcacaaaatcttcaacattgggctcaaatttacattagcagctgagaagctcccatatcaagcctaaaacagctctgtttgctggttcacaagtttcttctgggctgatgctgaagttgtggccaataggctggtgatgatctgctaagggctccagagagaaacatcaagatagagggtaaccaaataatcagcagaggtcaaaagtctaaattttcctacagtacgatattttgtcacctttcagagctggctttgacctaaatgaacagagtactattggatagattacatgtactttgcagccctcatcatcaacaatatcctggatgaaattctgaatgagtcatttgattagtagtccctggcacagttgaacattagttactgctggacactctgtgtgggccattcagtggaggtgtgtatgccataggaaagaccttgaccccttattgctctctgcataaggcaagcatgagcacaaacttgtcaatgggtgccaagcattttgggttggagcatctgctctttatgggttttggggagaaggacagttgcccaggacctggagacccaagaaccagtgggaagtgtccattgaaactgcagtcaagatgaaaacaaacactggactatggaaggggagttgggggtagtcccattcattgggagaaggggggcacctggttctactcagctcattctgcagagtgagtattccatgttattttttgacaatgtaacttgagacgcaaagatgacaaaataataccagagatgaagtgaatggctttaggatagtctgtttcaggctgccttatttggagacatttttttattggcatctgagtcctcactgactagaaggcaattgttaggtcacccaatgagtttagatagtgatggagatgcaaatctgggaaatggtacctcttaactaagaaggacacattcctgtgattacattggggtggaaacaggatgacatgatattctatttaaattatgacagaaatggaagctgatttctgttttctttaacaaataaattgccagaaacacaaaagagaaaggagatttggccaggtgcagtggctcacacctgtaatcccagcgctttgggaggccaaggtgggtggaccacctgaggtcaggagttcaagaccagcctggccaacgtgatgaatccccgtcttaactaaaaatacaaaaattagccaggcatggtgcctcgtgcctgtagtcccagctatttagaaggctgaagcaggagaatcacttgaacccaggaagtggaagttgcagtgagctgagatcatgtcactgctctccagcctgggcgatggagcgagactctgtctcaaaaaaaaaaaaaaaaaaaaaaaagagaaaagggagatttaagagacattacaatcaaaagcaatgagtagatcatttgggattctaataaaaccaactgttataaaaaggtatctattggccaggcgcagtggctcacggctgtaatcccagcactttgggaggccaaagtaggcggatcaccttaggtcaggagtttgagatcacactggccaacatgtccaaaaccccgtctctactaaaaatacaaaaattagccaagtgtggtggcacgtgcctgtagtcccacctactcaggaggctgaggcaggagaatcgcttaaacctgggaggtggaggttgcagtgagccaagactgtgccactgcactccagggtgagtgacacagcaagacaccctctaaaaaaaaaaaaaaagctatgtgtttttctatcagatagattgctttaaaaaaacagttggttttaattaggattttatatatatcagggaaatgtgaacattgagtgaatattttataagattaaaaatattgctaatgatgatatttagttatgtgttttgaaagagtattttttaggcatacgttagtaaaaagatgggatgatgcctggaatttcttcataactccaccggtgaggtggagaaaccagactgagagtggagatgaagcaaggttggttgtaagcaaatcactgttaacactggatgatgcatggtgattcattatgctatttttatttttgtatatattttgaatttaataacaagcctttgaaaaagaaaataatatcaattcccttagaaagccctatgtggatgccttgtgtaaacagatatttaattagtctggctttcctttcatagacggtggtgatggctgcccgcacacagtcttttccagaccatatggcccgtctgcccacaagacaagctctccagggcatcccactgccacttgctcttgagaagggccccactgtggctctgcccagtttttcatagcaatggcttcctcctaaacagttttcctgcttgggatccagcctttgcccctcctccccacttctattttcaccaatgctgccaacatataatttcttctctttccttcccagaatatctttaaaacataaatctgaatatgttactctcttacttaaagcttttcattggttcctcagttctttaagaataaaatacaacccctgtgcaagagctgagctggcccccagagggtcacgccattctcccccatcccaatccaatctgctaaattctctcttcatagaaccactgcaattccttaaatagcacttttctaacatctttagcccttgcacctgttactccctatgcacaaacacctttctcccatttgttatcctgtagaatttctacttttactttaaagcttggctcagagtctcatccttcagaaaggcttcctggtggcttagctggaggggctagaggccttcctatgagacccacagcttctgtgcattcttctgatgtttctaaacttttattttcattcttgctctcaaacaaggagaagagtgaaattatttttaaattctccttaatgagagaagttaaatattaaggactagaattccatcaggtatgattgagatttggagggccacaaactattataatataatatccaagctatcacaagaaccaacttttaagaaccaatttttgccccccttgagaatgcatgttctagcatatgcctttcactctatgttttaaggatctcgctacttggttcttcattagaataagaataccttgaaaacagagatttttaactcatatccccataacctagaactatgtctggtaccaaagcaaactcagtaaatgcttgaacaagtgagcagaaggatgaatgaatattagcatgtagtcattggttcccaggctgagatctccagaagagtattgcgagtcagcttccctgctatgccaaggtctagtttccttttctaagacatgtgatgcaaacccaatctcattcaaagtttgagaatacaacctcagctgccattgtggggacaagcaaacctagaacttcctccctccaccgtgccaggagcgttgagtcagctttagggtcaactgccaattccacctgccttctcgggctttaactcaactggtgaggccctgcagcttaggaggagggtaataattgccatttaagaaggaatactcagactattttggagattgaagcactcctagatacactctccttgaggctgctccagtgtagaagtcttagaaaggagcaactagggtgtttaactagaagagaaacttctgagaaagaaaaacgtagaatcactagtaagtttcaaagtgagcctaagcagatgttaatgatattataaacaacttttatatcccaacagaaggtttacaacgattagtgaaagacaggaaagggggcaagcctacttgtttgttctgctcagctctagttaacaaaattaatggaagcacggaacagatgcaaaattgctgcattacttatctgcaatgttattttcaggcttcttgagtgctgcctgtttaacaaaatgaatgctatctggcttgaatccataatggtagctgcttctgtggccaaataggaggcttggatttgggagagagcctttggaaggcgtacatgtgcaggtcagtcaaagttcacttcaactaaaagtgatggaattaattttagagtacggctaaatttcttggagtcggacaggcctgagaaagtaaaccatttgaacaacactctctacagctcccttactgctgcacggtcattttacatagatatgtcacaatgatataccaagagatgtccaagcaagtgttgagtgtttcagagtagaattcaaatttctttgtgtaagtgataattttaagtctcaaaactaggtttgtttgtgacagcatttctcaaagtgtagttctaggactagcagttttggcatcatctgcaaacttgttaaaaatgcaaattctcaagtttgcatttgactgagaatccctaccccacagaccaacaggaatgggaactctgggagaggggcctagtcatctgtgttttaatgtcttctgggtgattccgatgtacactcaagcttgagagccgtccctttatgagatcaagcatgcaaaaaagagaaaagtactttttatcataggtccttcttgcagccagcttcttgccaacacacctctttccactgctcctaggacagccaagatcattcttgggagcttggaatggggcatctctgctacaccaatactccaatctgggtttaggggaaaaagctactgcaaattacttagcttggcttaacactggtaaactataaatatttgaagcccaaaatatgaatctgtcttcaaaggactaatttaatcagtaataaggctgtataaaggttatttgttttgaataggacaagctgcagcctgaaaatggttttttttaaacacagattacagcccatgaaggtaaagtattgatttatggtctccaaaaatatgctatatattagagtaatattccccaaaccaagcgagaaatcattaatagctgtatatttgattgacaaaaaggtggtaatacaaagccgacttttgaaaactatatgtgatagatttgcaaacctctatctcttcctacaaatccccaaaagtctctactgctttgcttcagggtttcctctcaggccctagccaggtcttccaactctcttcatttactttggactcagaaaccatcaaggcaaaacaatagatttttttcaagaggattatttgcattgctgattgggtattggggattgggtagcagcctcaggaatcccagagccttggacccacacaagaaccactggacactacctgagttacattccttcagtaatggaagacgacaaatgcagaagctcctgaaggcaggagggtggctgaattcagagtgagggaggaaaacgcctacaaccccaagtgttccaaaagatttggccattgttaaataaagctgaaattcacttttaaaatatccaaatacagtaatgaccactgatagtcaacattcattgggcctcactaggtgcaaacttattggtgagttattaaatatattacctcctttaggccaggtgcgatggctcacacctgtaaatcccagcactttgggaggccaaggcaggcagctcacctgaggtcaggagttcgagactagcctgcccaacatggcaaaactccatctctactaaaaatacaaaaaattagctgggcatggtggtggacacctgtaatcccagctacttgggaggctgaggcaggagaatcagttgaacctggaaggcggaggttgcagtgagccgagattgtgccattgcactccagcctgggcgacaagagcaaaattccgtctcaaaaaaaaaaatatgtgtgtatatatatatacacacacacacacacacacacacacacacacacacacacacacacatatatctcctcctttaatccttaaaacagccatgtaaagtaagcattaaatggacatttacagatgaggaaactgatgctcagagaagttaatttgcctaaatttcccagattgtcagttgtgaagccagtctggcattcttagtctttcattctactgtttcccccagcttgggctagaaacagagttaattcagactctcttgaatggctcattcagcgctttcatcaagtgattaaaattaatggtcactaaccaagtccagtgggcctcattcctgttttaagtcctctaatggccccccattggtttctgggataaaattcaaatttcttaacatgatttacaaggcccataatgacttggctccagtatacctttctagcttacctactaccaagtccttgcacacgttatgcttgagccatatctgcctactagagtgtgccatgctctccctaactttctgcaccacttcacaaatcccttcgagaccaaggttgttagaatcttttccttgaggtcctcaggctgaaatggatgccttcacattctcttaccattgtggaatattttgtgcatatccttatgacattcatcatattgttaattattgattttcttgtttctcctatttggtggtaactgatttaagggcaggattgtgtcccttttatctaagaactggtagtccatggcacattgcctgatacttcatagacaataaacgaatgctgatggcatgactgaaaatcgagggctttagcagcatttgggaatagttctaccatctccttgggtaaggtacacagcagggtagcgagacttgggaagctggaagaaatgcttacattttgaagtagtatctgttaaaccccaattgcagtacaagctagcttaggaaaccaagttccatcaagtatagttataaacttcctgtgaccagagagagaatcatcactgaaggatggagagcagccagcagttaaaggactggaaaactcctgcagtgcagagggcccacattagtatgagcaatatttctgggggtggagaatatacgctgaatattaccattcaaaaatattgagacgaagcatgacaactatttaatgtgatagttctaatcaccagcataatttcagattaagcattatatcaaactttcaaaatcagtgactgtccaaagggtaaatgcttattttccactcagtcatatcttgatcaaggatcagaacgaatgcagagaaagggatttcaggaggtaattagaatacagatagtccccacttattgagtggagcatggactgtgccagtatttccttcagtaagctacaagagctccctgagatgggtactattatgtagacattactgaaaatgggaccaaatctcagacaagtttaccaagttgcccaaactctcacagctcaaatgtggtagagctgaactttaaactgaggtctgatttttttttttaatttatttcaatagctttaagggtacaagtgatttttcattacctggatgaattgtgtagtggtgaagcctgagatttttgtgcacccatcacccaagtggtgtacacggtacccaatatgtagttgttgttgtccctcatcccccgtctaccctctcttcttctgagttcttatatcatgtctggttttaaaacatttgctctttgtgaagatttagtttgcctttaaataatctgtggtcaggctttacattttgaataatgtttttttttcctcccttactttgctctgaataaaaatgaattcagatactcaaattatatttatgatgttatgagggaagaggatactaggatcatataaattcttccaaatcaataactgaataattttcaaagagtgatcttttataaaaccatgtctgaatgagtatatatttctgtatatcaatatgagaaaatctggtttgggtaagcatatctctcatgccaatatttatagtcttattttgggtggttgtatgtttttcaatggaaggtttaggattttaaaaacagagcctcttaaaattaaaacatatttaataagcacaataaccatcataatagtatacatagagattgtaggggaagggtataaagggggaaaatgaggcaaaggaaatcagtaactgaaaataagatctagctctccaagtgctcagttgtttcagaaactcctgccaactggtagacacagcctggctttgaaactgggtgcattgccagctgtgcacactatacatattcatctctggcttggctttttcactttgcaaggaaggtagctgacatctgctgagcagggcaaatcatgcaaaacaggtttctccacagggctttgcctcttcactaggacagaacccaggctgatgctaaaggcttcctctctattttgaaatcaatccccaaaagaaagtgcaactgaagcaggcttgtaaggagagaaatgcaaatgttggcacagaaaatcagttgcttaagaaataatgagtgcaaacctgtgcatatttttaaacattggttataaaatatatttggatataatcattattatcaattgtactgatggatgcaactatagatttttttttacttggaaaaggaatcataaacacatagcctgacataaccgtgaactctagatctagatgacctgattaacaaaatcccagaacattgccacaacttcattattggttgcaatgaaattatatacagtagacgttctcttaaccaatctccacttaaccaatttactgaattaattgtggctgttcgtcttccaccataaaatgtacagaccaatgccatggcatgctccagagcaataggtttctttatgttgcccctctgggcttctgctcctgctcctgcttgagttgtaaacttcaaaatctagaggcaattatatttattcctaaacccgtttatgccagctgtacttgttattttaactatgtaatttaattaatcttatataacctatgaaatatgaatgtagttgttctatgaaaacaaaatccaatggtttggaaagattcaataagggttcgttaggcaaaaatctatggccaggcgcagtggctcacacctgtaatcccagcactttgggaggccgaggtgggcagatcacttgaggtcaggagtttgagaccagcctggccaacatggcaaaactccatctctactaaaaatacaacaattagccaggaaaggtgacacacaccagtagttccagctactcaggaggctgaggcacaagaattgcttgaacctgggaggtggaggttgcagtgagcagagttggcgccactgcactccatggcacactccagcctgggtgtgccacacaaaacaagaaacaaacaaacaaaacatctactgttaattacctaatggaaaaactctacaacattggggaaaaccaaaatctaggtggaggaagaattcagattgctataaattctttaaagtctcactgcattaaaaaccaaaccaaaccaaaataaaactggaaatcataaaatatatattgtggatacggtttaggcaaacaaacaaaaagacttgtaagtataatcagcagaaccatattaataggaaaggccttgactttacccacgagattggcaaaattgtaaattaaacgtttactttatggatccatatcacattctgtaattccccacattagctgactcttttggtgaatggacacttttcaattggctctatattcttatcataatcagataagatgtctcttatttcagggctacccaaagtgtgctccttgcaccacagctgtggcagcatctgggtgtttattaggaatccagaatctcaggtcccacctggggtggtgccaggatctgtgttttaacaagctcttcagatatgattctatgccctcctaagtttgattggagggcctaaaaaatgtgtatagcccttttgaaaagcaacatggggcatgactgactcatcaggaatcatagacatttcctttgtattcttactcagccatcctgcttctaggaatattttcttatttcaaaagaaaaaaaaagctggataaagatatctatgcataaagatgtctataagagtactatttacaataatgaaacaattggaagcaatatagtgatttaagaagagaagaaaggtaaatcacaggcagtcaataaaaatgatagatattaagagtttataaaacgatcaaatgtttacaatgtaaaattaggtaaaaaaatgcaacattcacttggttatagttatgccatatgaataccaataaaaactagaaaactaccagtttcactgtattagatgatgatttagatttcatctttaaaaattattttcatgcaattataatatgttttctataatgaaaatatcttaatgatatcatttacaagcaccattatttaaaatttgtactacactctcagcacaaaatttaaagactcttttagctgtgaaacactgctgccacatcactagccagctgttgtatgtaaaacatcaagatctaatatctttggtgacagatgggcagttcgaaaaatcagttttaactaaggatgctctcaatacctgaattatcttcatctttgcggattttgagcttcaccaggtcttcacattgctggaggatctgaactgcatcttccatggaacagttgtccagccggatattatctattgcgagcaatttatccccaagttccagggtcccagttctgttagtgaatgcaaagtaacacatgactaatgatgagcacttaactaggccatttaaagaggcattaagcataatgcagcattatggtagtctttagaggaaaagaggttcaactgtttttaaattgtacttcattgacaactccctcccttcttctagtcttatttgggttgcctgccatgatattaaattgcagagtattaaaaacattttttcttatacttttttcaattaaacaagaacatatgtgtcactcaggaagcatacaattcctaggaagggaggtaatgggcgagggtctgcatagacccaggtatccttgtctttctccatattgttgtattacttttgatccttggtagtccagatactaggagagcattaagagaatgacagaaggcaaggtgtaatagagttagtggaagcctaaggcttgcacctctgctacttccacttgcatctggaaactcactatggccagagtagcatgaaaatttatagatgaatccatagcttcttatttggaaagtggccactgagactctaaaactggctgtggaccagggtaggtctgttgaaaaaaattttaaggtccataatgaaacaacaaaaaaaataatgtgaatgtagtatgtatatgtttctatgtgtgtatatgtatatatacacagatttgtaagaacagccttttatgcattatatctgtgccagagactgctaattgtctcccagcatccattctcccttcccttcttttaagttaccctctaaaaatgcatgccccagactctctggggaccctccccacctcctgcctgtagctagaaaatggtaacaggagggaggcggagcaaggtggctgaataaaagcctccactgatcatcctccttgcaggaacaccaaatttaacaactatccatacagaaaagcacctttataagaaccaaaaatcagatgagcaatcacagtacctggttttaacttcatatcattgaaagaggcactgaagagggtaggaaagaaagtcttgaactgatgatgccggcccctcccccattccttctgcagcagccacatggcatggagagaaaaactgtgcacttgtgggagggagaacacagtgagggagagactgcattgaaactcagtgctaccctgtcacagcggaaagcaacactgggcagaagtcagctgatatccacggagggaacatttagatcagccctaggcagaggggaatcacccattccggtggtcagaacttgagttccaacacgcctcactgctgcacgctaaagtgttcttgggtactaaataaactcaagacagtttaaagccacaaagacagcaattcctggacaagccctgatgctgtgctgagctcagagccagtagacttggggggcatgtgacctagtgagaaaccagctggggtggctaagtgagtgcttgcaacacccctcccctagccctacacagcacagctcacaactcccagagagagtccttcactctaactgagtagagaagaggggagagtaaagaagactttgtcttgcaacttggatatcagctcagccatagtacgacagggcaccgggcagagtcctaaggccccttttctaggtctttgccccgggataacatttctagacacacccagggctgcaagggaacctgctgccttgaagggaaggacccagtcctggcagcatttttcacctgctgactaaatatccctcgggccctgaataatcagcagcatggctgggcgcggtggctcatgcctgtaatcccagcactttgggaggccgaggtgggtggatcacttgagaccaggagttcaagaccatcctggccagcatggtgaaactcggtctgtactaaaaatacaaaagttagccaggcgtggtggtgcacgcctgtaatcccagctattcgggaggctgaggcaggagaatcacttgaacctgggaggtgcaggttgcagtgagccgattgcaccactgcactccagcctgggcaacagaatgagactctgtctcaaaaaataaataaaattaaatataataaaaaaataaaatcagcagcagtagtcaggtagtacttgctgtgggccttaggtgagactctgagttgtgctggcttcaggtgtgacccagcacattcccagctgtggtggctatggggagaggctgtttctgcttgagaaaagcagaggaatagtaaaaaggactttatcttgaagcttaggtaccagctctgcaacagtagggtagagtaccaagtgggctcttgggttccctgattctaggccttagctcttggacgtttgtggacctgctctgggacagaggggagcccatcgccttgaaagaagagtcccggccctggcagcattcgccacaagctgactgaagagcctttgggtcttgagtgaacatcagcaatagccaggcagtacttgccatgggcctggagcagtggtggccagggggagagacttctctccttgaggaaaggatgggaaggactttgtcttgtgtcttgggtgccagctcagctatagtagaatagagcaccaggtagattcctaaggtttttgactctaggaccaggctcctagatggcatctttagacctgcaaggggccagggggagctcactgccctgaaaagaaggatactaccctggctggctttgccacctgctgattgtagagcctttggtccttgagtgaacatggcctagtggtagccagtaagggtttactggcagccatagttgagacctagtaccacgttggcttcaggtctgaaccagcatagtctcagtggtggtgaccaaggggtgcttgtgtcaccccaccacccctcagcttcaggcagctcagcactgagagagagactatatctgtttggaagaaaaggaagagaacaagagtctctgcctagtaatccagatgattcttctggatcttacccaagaccaccaaggcagtatttttgagtctgcaagagccatagtgttactggacttggggtgccccctaatggagatacaggtgaagtgaccaaaaacttagatcacaacacccaagccccttcgaatacttagaaagccttcccaagaaggacaggtacaaacaagcccagactgcaaagactataataaatacttaacaattcaattctcagacaccaatgaacatccatgagcatcaagaccatctgagaaaacacgacctcaccaagtgaactaaataaggcacgaaagaccaatcacagagaaatagagatgtatggcctttcatacagagaattctaaattactgttttgagtaaacaataaagttttgagtgtgtgataatacagatcataaattcagaatcctatcagataaattcaacaaagagattaaaataattttaaaaaatccagcagaaattctggagttgaaaaatgcaattgacacactaaaaaaatgcatcagagtctcttaacaacagaattgatgaagcagaagagataattagtggccgggcgcggtggctcacgcctgtaatcccagcactttgggaggccgaggcgggcggatcacgaggtcaggagatcgagaccatcccggctaaaacggtgaaaccccgtctctactaaaaatacaaaaaattagccgggcgtagtggcgggcgcctgtagtcccagctacttgggaggctgaggcaggagaatggcgtgaacccgggaggcggagcttgcagtgagccgagatcccgccactgcactcccgcctgggcgacagagcgagactccgtctcaaaaaaaaaaaaaaaaaaaaaagaagagataattagtaagcttggagacaggacatttgaaaatacacagccagagaagatgaaagaaaaaaaaaagctgggccaggcatggtggctcacgcctataatcccagcactttgggaggccgaggtgggcagatcacctgaggtcaggagttcgagacaagcctggccaacatggtgaaagcccgtctctactaaaaatacaaaaaaaaaaaaaaaaatagctgggcatggtggtgtgcagctgtaatcccagccacttgggaggctgaggcaggagaatcgcttgaacccaggaggcagaggttacagtgggccgagattgcaccacatcactcagcctgggcatcagagtgagactctgtctcaaaacaaacaaacaaacaaacaaacaaacagacaaacaatgaagcacacctacaagatctaaaaaatagcctcaaaaggccaaatctaagagttatcggccttaaagacgaggtagagagagggatggggtagaaattttattcaaagggataataacagagaacttcccaaacatagagaaagatatcaatattcaagtacaagaaccttatagaccacctgcaggaatttcagcaactacaaatgcaaaataactgaaatcataacagtctctcaagaccacagcacaatcaaattaaacccaagattaagaaattcactctaagccagggttttatgaatagaactctgatcttcttgggatggagccccttgcaggaggggaagccatggtctctcttgttcagttgacttagcctttcctgcctgctggctctggagggtctgggtggtctggatgagggtggttccccaaatcacagtgcacctgctctgtcaagcggcagccagactgcttttttaagcgggtccctgataccgttcctcctgactgggtgtgacctcccaacaggggtctccaggtctccagatcggcatcaggtcagtgcccctctgggacagagctcccagaggaaggagaaggctcccatctttgctgttttgtagcctttgctgtcacaggagggatccaggcttggggtctggagtagacccccagcaaaccacaacggcactacagaagggggcctgactgttaaaagaaaaacaaataagcagaaagcaacaacggtaacatcattaacgaaaagaccccacaaaaactccattcacagatcagcaacctcaaagattgagggtagataagttcacaaagatgagaaagaatcaacttaaaactgctgaaaactcaaaaagccagagtgcttcttctcttccaaataactgcgacacttcttcagcaagggcacagaactgggctgaagctgagatgactgaattggcagaagtaggcttcaaaaggtgggtaataatgaacttcactgaactaaaggagcatgttctaacccaattcaaataagctaagaatcataataaaacattacaggagctgatgaccagaatagccagtttagtgacaaacataaatgaccttatggagctgaaaaacacaacatgataacttcacaacgcaatcacaagtgtccatagccaaatagactaagtggaacaaagaatctcagagttgaagactatctttctaaaataagacaggcagacaagaatagagaaaagagaataaaaaggaataaacaaaacctccaaaaatatgggattatgtaaaaagaccaaatctatgactgattggggtacctgaaggagaaggggagaacagaactaagttggaaaatgtacttcaggatataatccaggagaacttccctagcctagcaagacaggccaacattcaaatttaggaaatccagagaacctcaataagatactacaggagaagatcaaccccaagacacataatcgttggattctccaaggtcgaaatgaaagaaaaaaatgttaagcatagccagaaagaaaagccaggacgcctacaaagggaagtccatcagaccaacagcagacctctcagcagaaactctacaagccagaagagtttgggggccaatattcaacattcttaaagaaaataatttccaacccagaatttcatatctggccaaactaaacttcataagcaaaggagaaataagatccttttcggacatataaatgctgagggaattcatcactatcaggcctaccttgcaagagctcttaaaagaagagctaaatatggaaaggaaaaaccattaccagctgctacaaaaacacactgaaatgcacagaccagtgacactatgaagcaaccacataaacaagtttgcaaaataaccaactagcatcatgatgacatgatcaaattaacacatatcaacactaaacttaaatgtaaacaggataaatgccccagttaaaagacacagaatggcaaactggataaagagagagccaagacctattggtatgctgtcttcaagagacctatctcacatgcagtgacacacataggctcaaaataaagtgatggagtaaaatttaccaagcaatgaaaaactgacaaaagcagagcctgcactcctaatttctgacaaaagatactttaaaccaacaaagatagaaaaaaaatgttaaattcaacaagaagagctaagtatcctaaatatatatgcccctaatacaggagcacccagattcataaagcaagttcttagagacctatgaagaaacttatactcccacacagtgacagtgggatattgtaacaccccgctgacaatattagacagatcatcgagacagaaaataaacaaagatattcaggactcgaactcagctctggatcaagtggacctgacagatatctacagaactctccaccccaaaacgacagaatatacattcttctcattgccacatgacacttactctaaaattgatcacataattggaagtaaaacattcctcagcaaatgcaaaataactgaaatcataacagtctctcagaccacagcacaatcaaattaaactcaagattaagaaattcactctaaaccacactactacttggaaattgaacagcctgcccctgagtgaaccttgggtgaataataaaattaaggcagaaatcaagaagttctttgaaactaatgagaacaaagagaccaacaaccagttctgaaattgagacagtaataaataggctaccaaccaaaaaaatcccaggaccacatggatttacagctgaattctaacagaggtacaaagatgagctggtactatttcttctgaaactattccaaacaattgaaaaggtgggacttctccctaactcattttatgaggctagtatcatcctgataccaaaacctgggagagatatacaacagcaagtaaaaacttcaggctcatattcttgataaacatggatgcaaaaatcctcaataaaatactggcaaactgaatccagcagcactttaaaaagtttatccaccacgatcaagttggcttcatccctgggatgcaaggttggttcaacatacacaaaacaataaatgtgattcattatataaacagaactaaagacaaaaaccacataattacctcaatagatgcagaaatggccttcaataatattcaccatcccttcatttaaaaactctcaataatctcggtattgaaggaacataactcaaaatagtgaaagccacataggacaaacccatagccaatatcataccgaatgggcaaaagctggaagcattcaccttgaaaactagcacaagacaaggatgccctctcatcactcctatttaacatagtatattggaagttctgaccagggcaatcaggcaagagaaaaaaataaagggtattcaaatcagaagagaagaagtcaaattgtctttgcagatgacatgatcctatatctagaaaaccgcatcatctcagcccaaaagcttcttaagctaataagcaacttcagcaaagtctccacatacaaaatcactgtgcagaaatcactaacattcttatacaccaacaataggcaagcagagagccaaataatcaaagaactcccattcacaattgctacaaagagaataaaatacctaggaatatagctaataaaggaagtgaaggacctcttcatggagaactacaaaccactgctcaaacaaatcagagaggacacaaacaaatggaaacacattccatgctcatggatagaaaaaatcaatatcatgaaaatgaccatactgcccaaagtaatttatagattcaataccatgcccattaaactaccattgacattctttgcagaattagaaaaaaactactttaaaattcatatggaataaaaaaagagcctgtatagccaaaccaatcctaagctaaaagaacaaagctggaggtatcatgctacccaacttcaaactatactacaaggctacagtaaccaaaacagcacggtactggtacaaaagcagacatatagaccaaaggaacagattagagaactcagaaataagaccacacacccataaccatctgatcatcaagaaacctgacaaaaacaagcaatgggaaaaggattcccaatttaatacatggcactgggagaactggctaatcgtatgcagaaaattaaaactggaccccttccttacaccttatataaaataaaataaaataaaataaaataaaataaaataaaataaaataaaataaaatggattaaagacttaaatgtaaatcccaaaattataaaaaccctagaagaaaatctagacaataccattcaggacataggcacaggcaaagatttcatgacgaaaatgccaaaggaaaatggcaacaaaagaaactttgataaatgggatataattaaactaaagagcttatgcacagcaaaagaaactatcatcagagtgaacagacaacatacagaatggcaggaaattttcacaatctatccatctgataaaggtctgatatccaaagtctacaaagaacttcacttctcaaaaaaagatattcatgcagccagcaaacatgagaaaaagctcgtcatcactgatcattagagaaatacaaattgaaatcataatgagatatcatctgatgccagtcaggatggcaattacgaaaaagtcaagcaacaacagatgccggtgaggttgcagagaaaaaggaatgcttttacatggttggtgggaatgtaaattagttcaaccattatgaaagacagtgtggcgattcctcaaagatatagaagcagaaataccatttgacccagcaatcccattactggatatatacccaaaggaatgtaaattattctattataaagatatatgcacgcttatgtccactgcagcactattcacaatagcaaatacatgggatcaacccaaatgcccattaatgatagactggataaagaaaatgtgatatatatacacacagaatactatgcagccataaaaaggaatgagatcatgtcctttgcaggtacatggatagacctggaaggctttatcctcagcaaactaacacagaaacagaaaaccaaacactgcatgttgtcacttataagtgggagctgaacgatgaggacacatggacacattggaaacaacaacatacactggggcctgtcatgggtgaggtgatgggagggagaccatcaggaagaatagctaatggagactgggcttaatacctagatgataggttgatctgtgcagcaaaccatggcacacatttacctatgtaacaaacctgcacatcctgcacatgtaccctggaacttaaaataaaatttgaagaaaaaaaaaacacgacgaattttgtaaactatgcagacacatggaaatgaaacaacctgcttctgagtgacctgtgggccaatgaagaaattaataagaaaattaaaaaatttcgtgaaacaaatgataatggaaacacaacacactaaagccaatgagatacagcaaaagcagcactaagcaggaaatttttagctataagtgcctacatcaaaaaagaacaaagacttcaaataaataacctaacaatgcatcttaaagaatcagaaaagcaagagcaaactgaacccaagattagtggtagaaaataaataataaagatcagagcaaaaacaaatgaatttgaaatgaagaaaacaatgcaaagatcaatgaaacaaaatgtttttaaaaaggtgagcaaaatggacaaagctttagcaagactaataacaaaaataaaaaaaggagaagacccaactaaataaagtcagagatgaaaaaggagacattataactgatatcacagaaattcaaaggatcattagtggctcctatgagcaactatatgccaataaattagaaaagctagaggaaatgggtaaattcctagactcatacaatgtactaacattgaactatgatgaaattcaaaacctgaacagaccaataataagtaacatgattgaagtcataataaaaagtctccaagtaaggcaaaacctgggacccaaaggcttcactgctgaattctaccaaacatttaaagaactaatataaatcctgctaaaactattctgaaaaatagaggaggagggaatgattccaaactcattctatgaggccagtattaccatgataacaaaaccagacaaagacacacacacacacacaaagaaaagaaaagaaaaagaaaaagaaaaagaaaactatgggccaaaaacctctaacgaacattgatgcaaaaatccttaataaaatactagcaaagtgaagtcaaaaatatattaaaaagatgattcatcacaaccaagttggatcacaacccagggattaaaagatggtgcaagctatgcaaatctgtgagtgaaacacatcatgtcagtagaataaaggacaaaaaccatatgatcatttctattgatgctgaaaaagcatttgaaaaaatttaacatcccttcatgataaaaatcctcaaaaaactagggtatagaagaaatatacctcaacataataaaagccatatacaacagagctgctgctagtatcatactgaatgaggaaaaactaaaagccattcctctaagatctggtacacaacaaggatgctcactgtcaccactgttatgcaacacagtactggaagtcctagctagagcaatcccacaagggaaagataaaagcgtatccaaattggaaaggaagaagtcaaattatccttgcttgcagaagacatgatcttatatttggaaaaacctgaagactccacaaaaaacaattagagctgattaaaaaaattcagtaaagttgcaggcttcaaaataaataatacaaaatcagtagcatttctatatgccaacagtgaacaatctgaaagagaaattaaagaagtaatcccttttacaagagccacaaataaaatcaaatacttagaaattaatgaaagaagtaaaagatctctacaatgaaaactgtaaaacactgatgaaagaaattgaagaggacacaaacaaatagaaaataaactacatgtttataaactagaaggatcaatattgttaaaatatccatactacccagagcaatctacatattcaatgctatctgtatcaaaataccaatgacagtcttcacagaaatagagaaaagtatcctaaaatttatactgaaccacaaaagacctagaatacccaattctatcctgagcaaaaagaacaaaactggaagaatcccattatctgacttcaaattatactacagagctaaagtaacccaaacaccatggcactgacaaaaaaacacacatatagaccaatggaacagaatagagaacccagaaacaaatccacatgcctacagtgaactcatttttgacaaaggtgcctagaaacatacattggggaaaagacagtctcttcaacaaatggtgctgggaaaactgaatatcaacatgcagaagaaaaaaactagacagctatttcttgccatatacaaaagtcaaatcaaaatggattaacaacttaaatctaagacttcaaactatgacactaccacaagaaaacattggggaaactctccaggacattgctctgggcaaatatgtctcgagtaatatcccacaagcacaggcaacctaagcaaaatggacaaatgggatcacaacaagtgaaaaatctttttcatagcaaagaaaaaaaatcaacaaagtgaagagacaactcacataataggataaaatatttgcaaactatccatctgacaagggattaatcaccagaatatacatggagctcaaacaagtctataggaaaaaacaatctagtaatcctattaaaaaatggccaaaatatttgaatagtcatttctcaaaagaagacatacaaatgtctaacaggcataagaaaagatgctcaacatcagtggtcatcagagaaatgcaaatcaaaactacaatgagatatcatctgacccgagttaaaatggtttttatccaaaagacaggcaataacaaatgctggagagaatgtggaggaaagggaaccctggtacactgttgatgggaatgtaaattagtacaagcaccataaaaacagctggaggtttctcaaaaaactaaaaatagagctactatatgatccagcaatcccactgcttgggtatatacccaaaagaaaggaaatctgtatattgaagagatatctgcactcctatgtttgctgcagcactgttcacaatagccaagatttgcaagcaacataagtgtccactgagagataaatggataaaaggaatgtggtacatatatacaatggagttccattcagccataaaaaagaacgagatcctgtcatttgcaatgcattagatggaactggaggtcattatgttcaatgaaataaaccaggcacagaaatacaaacatcacatgttctcacttatttgtggtatttaaaaatcaaaataactgaactcatggagagagagagagtagaaggatggttaccagaggctaggaagggtagtgggggggtcagcgtggggaaagtagggatggttaatgggtacaaaaaaatagaatgactaagacctagtatttgatggcacaacagggtgactatggtcagtagtaatttaattgtacacttaaaaataactaaaaaagtataattggattgtttgtaacacaaaggataaaagcttgaggggatgggtaccctattttccatgatgtaattactgtgcattgcatgccttatcaaaatatctcttgtatcccataagtatatataccaactatatacccacaaaaattaaaaataaaaaaatggtaataactgacaagctgctgggatggctcccatagccctggattgcctgcctatctcccaactgttatgagagagaaacttctgtcttgcttgatccactgtctttggatgtctctttgtcatagcagtggagcctgcacatatatcacctaaactcacacaatgtccttcctactttttgaatgttaaagtatttcttgggctgggtgtggcggttcacacctataatcccagcactctgggaggctgaggtgggtggatcacctgaggtcaggagtttgagaccagcctagccaacatggcaaaaccccgcctctagtaaaaaatacaaaacttagccgggcatggcggtgtgcacctgtaatcccagctacttgggaggctggggcaggagaatcgcttgaacccaggagacagaggtttcagtgagccgagattgtgccactgcactccagcgtgggtgatacaggtgacactcggtctcaaaaataaaacaaagtatttatttaataaaataattgtgataataggttgaaatttttttaagtcctgaattggaaaataaaaagaaagttaatggtcttatatcagtatcctcaatcatttaaaaatatttttatttatgaaatgaaaaatttgagacctcctgattttgatggtatatgggccaaataggtgacatgaacattttaaaactcaagaatcttgcttgcccagaggggatattctggtaacagcaaaattcttgcacaacttatcacctctgtttgggtacctctaataagtgctgctactttcagggttttttttttttttttttggtcagaaaatgaatggaagctgaccagtgaaggagagcctatgctagattcatgaaagaccctaagaaatgttttcagctgtgcagaaataaattgataagcaggaagagatctatggagccactggaactagggatgtcaaatatgatcaattaatagtggctgcttggaagtttttgaaaatacagtgacccattagaaaggtttgctttgggtgtggaaggtgtcatgtttacttaaattaagagaggccttaaaatgaatcagaaaatccattttccttacctgtgtgccacactccctttcttgatatctgaaatgacgagggggtctcctggttttctactggatggtgctgtaataatggagatagaataatcacatctttatatccattattcaccccttactgtacatttcccctgttttataataacttaatgcaagtaatgtttgtatgcaaaacaaagatggtcagcaaatgaattaggaagtatgcacattatgtctttacaaatgtttgtgctaaaatatttacaaacataaaaactaaagcaatgccactttaaatttgtaattagagaaagcaattggataagtacccatttaatttaaatctattttaataagcaattctcaagagaggacctgaagggtgggtatctcagttggagagtattaaaatcaattgggggctccccttagttaccccttcttttattcctttccagtgaggagacaccactgttgatgggaatatgccatatatcacttcagtgtagagtgggaaagtggataagaattactgatttaaagttcttttttttggccaggcacagtggctcatgcctgtaatcctagcactttgagaggctgaggtgggaggatcacctggggtcagaagttcgacatcagcttgaccaacatggtgaaaccccacctctacgaaaaacacaaaaattagaaaggcatggtggcacatgcctgtagttccagctacttgggagactgaggcaggagaattgcttttacccaggaggcagaggttgcagtgatccaaggatcacaccactgcactctagcctgggcaacagagcaaaactccgtcttgatcaatcaatcaataaagttcttttttttttcctcacaaggaaatcttttgctagatggactctaaatctttaaattctgctcacaaattcatacttagaaagctcttggaatgtgacttttttttttttttagtaaatattttgttgctagttaactaaatttttatatatgctcatattctaaacatgtacatgtaattttattgagtttttagataaaactattatactgcacagtggtcagttttgggtttttatcaattttctcaggaatatttccatttatgagagtaaaaaacaattataaatgagcctacttagaattaaccctagaaactaattatagtccatataaatacaaaaaaaaatcttggattagaggtttgcacttaatttaggaattggatccttaaaattagccataccaacatttgtgaaaaacaatttgcctccaagaggagatattttgccaacctgaaggctggagtggtttccttttagagatcattaacaggcccctaaagtaagattttattataaacagtctgatcaccccataataatcatagagccatatcatatcccataatcccatctgaatcccaggaaaatgtttatgcacaagaacagatggcttaatatcttaacacaacatttaaagaaaaagaaaacgcatataccgataccttacccactgtctaaattagtccatagtaaatgctaatgggacttcatttaatcattattcttagcttccagcaaagaatgcaaaacattctcttcactacaattaattcataatttaaaacttcattcaatgatttgatagaatgcctctagaggcatataagcatccaggatttctagttacatcatatttcaaaactgcaaattgttctgggcatagggcacaaaaacaaaaactttgttattaccagcaagtacagcttttctagcatctgccaatgaattgacacaatatttttgccaagctgtagtaaccatcacatagcactcaatgtttcctttggcttttttaaaaaaaatccatgttccactgaaatggtctgtaaaaccaaacaatagtagaggcaacaaaatatatcagacctatctctgtcatccttgaaagagagaaatatagcactataaggtcttggtcaaacctacacagctttgcagaggagtttgaaactactcatggtctacagacatgtatggtggccattttcacatttactagattcttctctttctcctttaatggactcgatagggtggatgcccattgggatgatggggtcgaacccagaagtgtgtcatccagatctgtatgagatcctgcccatcaccaccatgcatgttaaatgtggctatgcatggtccgggggcccagtcatggtttgtgtatcctagccccatgttttaattttctactacctaagaataaatcacaaaccaagcatgctttgcttggctggtagtgctttaaaaatatttagttgccaacacttacaaattagtagattttatatagatacatggcttcttttaaaaaaatagatgggcaatatggtgtcatgattgagagacaggacttggcagccagaatggttgggtccaaaatcctggctctaccacttattagctatatgtgcttgagcacaaagtactcaggtgccttagtttcctcatctgcaaaatggtgttcatgaataacagtgcttaccatacagtttttgttgggaggattatgtgagctattacatgtaaagagattggatgagtgcacacataaggaattacataaatgtttattgttgctattattgtttaacaacagtggactgtttcccactacctcctttagatggagcctttgatttcccatttgcctctatcctcattgggctgatctcactcactgagttgcctcacccatgaaagcttctgagtttgtgaccctttgaatgagaatacactagcattcactgagtgcttggaatttgattggagttctccacagaaccattcgtttatttagtacatagtttttgaacaccaactatgagacaagcgcctctgctctgggcactggctatgaacctccagggaagttgaataaaaaggagagacagggctggttaaatctcctgaagttattaggcatgaaatagttttctctcttctgtcaagtgattccaagtgggaaatccatacaaacacatcatatggggatggggaaggatactgaatacttccaagagtgtggttaagaagaaaagggcaataaaagcttattaagttctgaaacagaaagaaaaaacaatacaactctttgaaatttcaaactccttgaaatttcagctgaactggtcgaacacacaactgaaagcctgacaaaaaagagcaatgatgctaaatcctgtgttatatgatatatattagtactgcctctttcccattcatattttatgaaatgattttaattcaaactcgtcacttgtatctccaatgcaagtgtttttgttgttactagatttgcattatttgagtcatttacaagcttgttcagaattcatcgtcgtcatgtgtgtctacagctcttctgcaatccagcaaggcgatgtcattggaaattttatcccggatcacaagaatccattttaataacactgcaatattaagatttttcatgctgcctatagatatacattcttggtactcacaaggaaacaacttactatattactttttaaaatgtattttctttgtaccaaaaatatacatgcatacaatttaaagagtcaagaattctgaaagagccgtcctcaatttcttgcttccccagatgctttcaattcttttggctgtttccatattgctaaataatatatgactattactaccaaattattttctggtgttagtcattttctatttactttctattatgaaagatgaagagttagtttctcccacctctagaccactaacatactcatatacccttcttgtccccccattttcccaataccattttgtcataatttttggtatttattgatcaacatttggaatttattttagcatgactatgtcaacagcatccagaggtaagtcatatagcattccatgatttctttccttttctgcagaatatgtatttcctttagttatctgatgtcttgatgtttttgtttgctttgttttcttgtgtttattattaattcaactcctcatatttcccaggatatataaatcttctctcaatgtgtcaaatcttatcaggaattctatcagagtttgctaatctgtctggactggttgctttctaggtttgctacacagatcttggggacttccttcccacaaaccctgggaaacccagaggttctcttctcttctctcttgcatccttagatcccttgtatcctgaacccaactctccctgtttctggctttactttctctcactcttggtggtgcacattctccagtagcttctgaggaagagtgcaagggagaagagtttattgagaccttgtagagctgaaaatgtcattttctaccttcatatttgattgactactttgctgagtaaagaattctaggctggcaatccttcttttagaaatttgaaggcacttttccattgctttctagcttccagagttgttgttgaaaagcctgatgctgagaaatgcaaatcaaaaccacaatgagataccatctcacaccagttagaatggcgatcattaaaaagtcaggaaacaacaggtgctggagaggatgtggagaaataggaacacttttacactgttggtgggactgtaaagtagttcaaccattgtagaagatagtgtggcaattcctcagggatctagaactagaaataccatttgacccagccatcccattactgggtatatacccaaaggattataaatcatgctgctataaagacacatgcacacgtatgtttattgggcactattcaggatagcaaagacttagaaccaacccaaatgtccaacaaagatagactggattaagaaaatgtggcacatatacaccatggaatactatgcagccataaaaaataatgagttcatgtcctttgtagggacatggatgaagctggaaaccatcattctcagcaaactatcgcaaggacaaaaaaccaaacaccgcatattctcactcataggtgggaaccgaacaatgagaacacatggacacaggaaggggaacatcacacaccggggacagttgtggggtgggggaaggggggagggatagcattaggagatatacctaatgctaaatgacgagtgaatgggtgcagcacaccaacatggcacatgtatacatatgtaacaaacctgcacattgtgcacgtgtaccctaaaacttaaagtataataataataaaataaaaaaagaaaagcctgatgctattctgattatttgattattgtttgtattattctaacacattgtatgacaccccatcatgccctgctgctccagcaccacaaccctgtaagattactgcttcgtccagtgttctcagatctcttgatgacaagcttttctgtgggtatttccatccacaggtatggacccaccattttggaaataaatcccttaattctaagacatttatacaattatttctttaatgtgtttctttcctctttctttctgtaacacctattacttggatgttgtgtcatttgtactcaacctgtataattttctcatctattctagattcttcacttatttgttgttctaatttctgaacattttccttaactttattttccaatatttgtatagaagtttagttttttcatttctcttaattttcaaggcccacttttttccccctctgaatgtcattttgtaatagcgtccactccctgctcacctcatgaatgcaatgtatttgttgctaatgatgtcaatgataggtttctctttgtttggtttgttttcttcttcctgaatgtgctaattctctgatttccccctttgtttctggtgacagcctcgcatattagattcttcctcaagtgtccatttttctcttagctgtctgtttatattaaagagtgtggtcctaaagagctgttcaaaagcttggtgtacccaagtagggcttgtggactgtgggtcttaagtgtaagttgaggccaggctgtttatttgggtcagatggtcctgaattttcctaccacttgaaggctattaaacttggctatctggcttctttaagcttcctgggggaagaaggctctcagtctcaacattcagtatgcaaaccttcacctaatttccatttttaaagcagtactgctgcattcagctgtgtgctctcagtccaaagaactctctattgcatgctttccagagaataaaactccaggcttctgccagggtaggggaagggtacttcggagtcggagaaggcatctaaagactaaggtcattcttagcagtctttaaaccaatcctcctgccttaggattttccatcaaatgtacttcccgaagtttctggtccctgaacctgtactccaaagggagtacaggatagaaattaggctcactatcagcttcccctctgcttctttacttaaattcatctttctttatcttctttgccaaatttggttgctgttgtctattttccttttctttttgtccttatgagtttttgccctttgaaaaatcttatattgtcatttaaagtggagtgtagggtgggagaagaagtaaaggcttgtgttcaagctactgtcttttagaaacagagcagggacccctcttaggagcctgctgagcaccaccccccaaacatagaagtataaaaaaaatagtattttcaagggaaattccaggcacctaggtaggcttgaaaagtcaattaacaaccctataagcaagaagatacaatactgagaacttaaacaatagtttcccaagcaagtcagcatcacaaagcattttggttccccatagaaactaaaagataatatattaacatatgttcttatgttgtttttcagaaacctggacccacaccagatggaaaatgctgaccaccattacatagacctcagagatctcatggagataaggaagaagtgagaactgaactctaccattttttgttctaaatttcttcctgagagacctggagagagtcacgcctaaaggccacaccttaacattccttttttgcggatcctaagtttttagacaaagccctgcttctttaaccaactgcaaatcaaaaaaaattctctgaatccacctatgacctgtaagcccccactttaagatacctgccttttggggccaaaccaatgtaaagtctccatgtattgatttatgactttgcctataacctctgccttctacctttaaaaaccatctaggccatcagggagttcaagtcttaagcattagttgcccaattctccttgcttggcaccctgcaacaaatgcttcactttctctcgctgaaaatcctagtgtcactgtttggcattttctgtatgctgggcaagtggacccaagtttggtttggtaacattttgacctcagaaatttaaaaaccactcatcatcacacacacacatacaaactcttaatcattcagctttactttaattgcaaccatatacatcatacatggtaagtaaaacaagttaattgatttgaaatggagcagtgagtagagctttttactgcaaagttggcaaaataacaggaaccaatctcttctaaatatactttaaaacttaggggaaaaatgacagatttgttgtgcttgtcatcacaaaggctgcttcatgattttataagaaaataaagcaagcctttgttcctgcaaacaattcagtcagaactaaaaaggaaagacagtgaattcactgtactcacaaaatactgtcttttgcttttctgatataggatatagggagtttcatcaatcagatggtgacagggatgagtggtgtggtgaaaataaagccagtgctaagtcagagacaatgggtttggatccctgcttcactttttattagcccctggtctttgggcaggttacccagctgagttgttctttcctctttgtaaaatggagatagatgtcacagagctactttcaggattaagtaagaaaacatataaaactgcatagtgccatgcctggtacaaagtagacacaaacccctgtaataaaacctcaagggaaaacacccatgtaaaaaggactttactgataatgggatgtgacagagacaatcaggattcgctgactcgaaagagaggtgggctgtgaggaaggtgtgagctctgggatttctgactggttaaggtgtggaggcatcaggatgtgacttccagtcctgaactgcatccttctgctaggctgttccactttatttgctacaataaatcactctatattacagcaataacatcaataaaagcaatgcctggtgctaatatgctgcaaatgtgtcatcggaacttaagaaaattagtctgaaactgctcactgtgtctaaaatcagacagactcatttctcagtcaattaggtatgaagagtgagccgtaaaggctctgctggtatgcttccagagatgaggggctgtttcttaatacttagagcttgcacaaggtgaagacgacagaaagaggacttggtatagagataatgagaagaatcaagtccttgcagcacctcggtttcactaacagtatccgtgtgtgtctgagaagagggttcccagatttccttcttatgttggcactagattttgtgggctggagctgtgcttaaaatattttagcaggcatggtggctcacacctgtaatcccaacactttaagaggctgaggcaggaaaatcgcttgagtttagaagttcaagaccagcctgggcaacacagtgagactttatctctacaaaaatttaaaaattagccaggcatggtggctcatgcctgtagtcccagacacttgggaggttaaagtgggaggatcgcttgagcctaggaggttgaggccgcagtgagccctaatagtgccgctgcactccagcctgggtgacagagtgagatcctgtctcaaaaaataaaacataaataaataatataatatttcaaaaggctctgtgtgtaaagtaaataatgacgaagatcatcatcattaatgtttgttagggttcacaatgtgtttaaggcattttacatatagtaattcatttaatcttgtcaacaatactatgaagaaggtaatatgtacaccattttctagatgaagaaacggcacagagaggttgagggaatcagggcatgagacagtctaggctctgagtccttgctcttaatcattttctaagtcagtctttcttctgtctatgcatcagcctttgcacaaacatttatattcatttatcatctcccttggaagctcatttcttggagtacatagtgcttagtaaaacatttgcaggtaaagcttcttattcattcactcagcaaatggaggcattatataagcacattgtatgtcaggaactgtgctaggcctcaggattttactaactcataacaatgaaaatggattctggcctttttgtttttctttttttaaagagcaaagtctgctttgtcatctggcaaaatatgagtatttcccatgaggagacacaaaagtcagcgtggtggtgacgactagttgtgcaaatggagctgtagctctagaagaactgacaagcatgtttgacaagctcatgtatcatttctctgtccgggaatagcataacactttcagcttccatgaatgcgtttgcttgtggctggctaaaatgcaagccatctttatgggggtttttagattgttgccattattgctactaaaacccattttagaagtaaaacactcatgcaaaacaaaacaccatcataaagcataatattaaatgattcttcatgtggataaaacaaatattttgtagtttgtgtacaagactacatctcaaacaaattagcatataaatgtctactttttaataagaaatacaccatagggtatttttagatggatactttctgactaaattatattttttatttatatcaatctgtaactaagaatacatctattgtataaaacaaaattaaagacaatattcctacttaaaatttgagagtaaaataactgtgtggcagtggtgataaagcttctgaggaatagatgacttcacaataccaaccagcaggaagcatctagaaggacagggtgtatattcttaaaatttagcctagggcttagagcatggtggacactcagaatgcatttgttgagggaaggcagaagaatgaaagaatggaagtgggggcagggtttctgtgtacagaggcaggttatatagtgcacaactccaagacgcaccactcccacagctagttctgacagaataaatgaatggattggaataaacaaaagagaataaccttaaagttgcatgagtgtttgcatgcagaagccatcttgagccctaaatatgtttggaacagtaaattctgatacgctttcttaattttagtagccctagttgttgacactatagtgacataccatctttgctgcatagtgaaaaaactgagaggctaagtgacccaattaaaggaataaatgactttaggagcacttaggatagtgctggagtctctaaaatcccattccatctttctacttttctcccactaggtcacattagggtttggggggatctaggctctctcccatacatgtggcttcttgctcttaatatttattttgaattgcagtaccgttctttttagtgttgcagtagatatgtgtgggttattggttataaataaaatttcatttttcagtattaaatttgtatcgtccatgttgaatcagacagcaccatttcatactgcccaattgagaacttttatttattttttgcctgaaccactgacagaaatgctatccaacagagtgcagtgaggcacttttatgtggcctcatcactctttcttgaagaaaccagctcttggtcacagtcattacctctacgtctcctttggtctttaggcatttaacatttgcttcattttcttgggacatttatggatgcatttagtctatggatattaaaagccccccaaaaccctcaatttccattctatgaaagtccactggagctaacactttcaaagttgtttttaccaaagcagttataaaactaaagcccgaggaaaggagggaattgagtacatttatatgctccacttttctttctggttcagttttccagacactgtgcactatggaggaattcaaggatttacttaaagtaagagacattgttttagtcttgtgaaaaggattatagatgcttagtggacagatgggaagatagtcttaaaagtaaataaaggtaatttttgttaaatagattataaaaacttaattcacaatacactgtgaattaatatacaatatgctaataatatatattatacgatatactaataattcacaatataaaatgtagagaatctatatgcatctatctctcatctaattatttatctagttgtgtgagatacatgtttatctcaccaggactcatcacttgccaagcactgtactaggtatataaatatggattttattcaataattaaaacaatcctatattttctagctatccttattttcattttacagatgaagaaatataagattggagagagtttgagtaacttgtctcattcatacagccagtaagtgctggaggtgtgactgactccacatttttgtatcatgatataaaaacttcgcaaagacatataaaacatttgttacacctgcaaaccatttgacaacacagttttctaatgcctttaaaaattatttaaaagaaataacttctacttacaacttatggttattccaagttccacattgtgcttcttaggcagctttacatgaaatgttccactacttgggatgacagactctaatatcaaaacaaaaaagaatgtgttaatagaacactgaggactggagcacccatcaataaaaatgcattaggaatacttgtatcataatcatatgtagctaaaactgtaggaactgaagtaagatgaaggcctttaaaatcctagtaaattaagctcctggtgatgaatacacttcctatccacaggcaactgtgcataattcacaccaacagttgagttcagtatttctcaagtgtgatgcatgcaccatctacatcaaatttacctggaatgggagttacaaataatgattcctgaataattccaatctatgaatcagaatctctaaagatgaggcctagagatctctaggtgaatctcaggcatagtaaagtttaagaaccttaggtcctattatattctttccacccccaaccatattttccaagagtgtgctattcagtaattcttccccccacctccactcctatttattgtttgaaggtacctgggaaaacagatttcaggagagatgtcagtttggtgtgatggttgctgattgggcagtgagagtgggtggagaggtgccttaatttgtaatgtgaaaagtacaattaaagaggtagaatcaggagtgacattcaaaatatttcacaaccaaaacagtactggttatcaatcaaaaagactaaaacaaccaatcaaactagatgctgaccacagagttggaacacagggacccagcagattccaactacattaaatgatcctttagtttctgtataatgaggagcttttagagattccagagaggatcacagggcactggaagggagtgaaagtgggctcagatactggccagtcagtatagaagtaagctaatatcaaggcaacagagagagaaccagtgtacactggctgaatctcaacgcaggacagagctaagctgattttatccagacctaattaatgtctgagaaaggaagaaattgctacagattcttaaatatactcttcttaaaattccttaacagtcagaaagacctttaattaatgataaggttaaaatggaaatatccattgaagagatagcatctattcatgctaagttgctaatgactataatcctttctgatggttttggaaagaagtggggagaggcttcaggaacagtggaaactttagcataagcagaggattgtgggatgggtgagctatccacttggccggcttggtcagcttgactcaaggcaggtgcctatccagcacacagacaattaaccacagcagaaccattaggcactcaggcccttagcttaatttactaaccacatagttaacacatttgagtctgtgcaaagtggaggtgatggttaggactggattcatggaaagagagagaggactcccttctttgtttggccttgaattgctcttcttgacctctcatcctttctgaggaaaaattcaggtattaaatgtctcacaagaccagaatctgatttttcaactcagaagttttgccatacagtgttaaactggagagcacaatagaaatttgatttccctgggcccgcctagcttttagaaagccacctataaaaaaggatccccagactggccctctcagcatcagtggtgctatggggtcttccttctctgggctccctccttcgctctggtttttatttacttcagaggggagtgaggcaatcagctgcctttcccatttcctccctcgaccaagtgagtgtcacggactgagttaacacctttgacttcggggttgtcttcagctaacactctcatgggccaggaagtgaatccacatatatttatttgtttatttattcactaagaatttgtatcctttcaatttctcagtaggacttgagatagagcaaattatttcccacaggagatttgaaaaagactggctaatctgaaaaagagaaatgaagtaggtaaaaaaccacttaggtgtgctttacttcctgacttcaggagctgcaaatgtcataaatatttccttacaaaatattttccaatctatgcctttcctgagtcctccccatactgcgctttaacaacaaaaggctaattgccaccttccttctaccttcaaagtgacagtttaagaatttggaattagcatgcacactgggggcagagagggcctttggaagtggccaggttttgcccatatgcaccagcagccagtcagcagagagaaggaagaaagaagcaagtgtgtatgaggagagagcctgtgcctggccttgacagccattgaagtcaggttctagcccttcctggctgtgaaacacagattgcgcttccagtgaatgcctcttctctgattaaaccaggtggagtgcatgtttcttgctggcaactgaaagatccctgatgaacacattgattcggtagaggaaatgggatgagggcatgcagaaagcctccacacaagtgtttacgggcatagcagaaaaaaatgatttgattacttggataaagcacacaaatggcccataagtaaatgtgcatgaagcatcactatttgtagaactcatttcacaaacgtgtgaccattttttttttttttttggagactggttctcactctgtcacccaggctggagtacagtggcacaatcacagttcactgcagccttgacctctgcaggctcaggtgatcctcttgcctcagtctcccaagtagctagaactacaagcacctgccatcacgcccagctaatttttgtattttctgtagagatggggtttccgccatgttgcctaggctggtctcaaactcccaggctcaagtgatccgtccacctcagcctcctaaaaggctgtgattacaggcggagccactgcacctgtcctacccatttaatattttctgttttaagaaacagttctctgtgaaaggggaggggagcatacacatatttgtacatatgtatctgtatatctgtatacgtatatagcatcttgcccatgatgctaagcttgtgtaagtgaggtctttgaaacacaagggccagaaaatgctgttctagaatagttactacagcaacattttgcttttataaatttttaatccagggaaacttgaccaagattaacattgttaatgacactgcaggagatattatcacttcctggaaaacagtaatgaatcacttctgactacatgagatttgaaatattcataatgatgaacaaatatcaactaataaatctctttgatcaagctgtggcttcattttaatctttaaatgccaacatgatttattttatatttgttattttttctttatataattatttggctgctaaagcaaaggcatatttaatttggggtttcttaaagaaacactagtaaagaggaaaaggtccaatatttggaaaaacagcaggtttagaggaagtacatagaatctaagaacaaatgatgtttattttgttagactcgcatgtaattattttgtacttccctgattttgctttatctttgttaatgctataattaaaaacacatttgggtaaacaaaggtctccttctttccaagtggtctgcttttctgcctgaagcattcattgttagcacagtaagataacaaccacaccgtaattcatcaatgcagacaccctttgtgaggaacgtgaacgtttaactcccaccaatgcagagaaaggcactgggggctccataatgatggcaaacattatttgataggattctcaccgagacttctttccagaacaaagatatatatttttttccaacaaaataacttcagacttaaagtagaaacttcaggtattattcatgatattagttggagatgggtgtttaaaaggcagtaacaaacaaggcaaaatataaattgtgcatatattatggttacagctttataaaattatatgtatggtaaggattttggtaagaaatataaaaaatttaaacatatttattagcatgatggggttataagcaccttttacttaaaacaatttcattaaagttactatgctgtttgtggagtatagtacctatatttaaagagacagatttggggccaggcgcagtggctcacacctgtaaccctagcactttgggaggctgaggcaggcggattgcctgagctcaggagtttgagaccagcctggccaacatggtgaaaccttgtctctactaaagatacaaaaatacttagccaggcttggtggcacatgcctataatcccagctacttgggaggctgaggcacaagaattggttgaacccaggagacggaggttgatagcaccactgcactctagcctgggtaacagagcaagactctgtctccaaaaaaaaaaaaaaaaaaaaaaggagaaaagggagagagatttgggcaaaaatgagtcaagcttttttaaccactccatgtcagcttaaaatatttataaaatagaggaatttgtctctgaggtccaaaggtttgggaattaatatctggttgtaaaacatttctgaggcagaattttggaaacggatggcttacatccagaaaattaggagtgaattcagaagtactgaacagtcttgaaacaactcacatccagtgattccccaccaatgtcccaagttcttgactggctagaaaggatttttctgaatccagtagtttccagttgatactagtaggttggtaatgactaactagagtgttttattgaggactatgatgctgtatctgggctcagcgggagaatatcggtgtcaactagtgatgtctgtcatgaggaaggaacaacaagatgggaacatagcttttcttgccctattctgtattattgccatctatttgaagtgggttactttctggaacaatcaagggcagtgggagatgaacttaacatttccttttcctgtcccttatcaagtaagctgggtactgaacaaagtgggtttaacagacacagttcctattttttaggagctcaaatttaagatattagagtatccaatcaacaaatattaaaatacacacatatatattcacaagtaaatacttagatactgcttatgaagaagactaaattgtgctggtaatttgacaactggaatgtagtgagtgggtgctgctgaatgttctacagtgcacacaatgttcaacaaatcacctccctgcaacaaagaatgtcagtagggcagaggtttagaactcctgctctaattgcttcatcctggtaacatctctttgaagagtcagtgcagtgtgatatggtgaagagagactccaagtcaaccgacctaggtctacgattcaccctgctgtatgaccttgggtttccccaattgagcctcagtttccccatttataatgaataaaggtattggattacaagagacatttcaccactaatgttctgttattgtagttaacaataattaaccattaatgttgtgttattgtagttattgtacattctggggttgctggacagccttctttgaaaaccatatcttcaccaccatctgatccatccttgaaaagtcctacttgattcttccgtggtcacagctgactagaagggtaggataccaaacctaagctgggccattagattctttctcctgggaatgagaaattagaactggctgggtactttagcaaagatgggacaattacatacaataaaaagtcagaggaaacttgtctatagggacaaatggagcagatatacagaaacaagcagcactgacagaccaggaaccccagagaaacagtagggatgatctcggctcctgatgcagtctgaagttcctgatcccagttcctcagtagagccaactgctctctacccattcgttcaccgagtattttttttttttttgagacggagttttttttttttgctctgttgcccaggccagagtgcagtggcatgttcttggctcactgcaacctccacctcccgggttcaagtgattctcctgcctcagcctccctggtagctaggatcacaggcacacaccaccatgctaggctaatttttatatttttagtagagacagggtttcaccatgttgggcaggctggtctggaattcctgacctcaagtaatccacccgccttggcctcccaaagtgctgggattacaggcatgagtcaccatgcctggcctcattcactgagtactgaccaaatgacagcttcttgtattccaagcaatacattgggtgctaggtgtacattcataaacaaaacccacaaagtccctgatttcataggtttttccactggaggagagtgaaaataaacaaataaacatacaatataaggtcagagtgtgagaatggctaagcagaaccataaatctgagcaagagaatagagagtgatagatggccagggaaggcttctctgagcatgtgacatttgagcaaagacctgaatgaagtgagccaaaccacccaaacatgacagaaagcatctactgcaaagcttcttctgtggaattgtgcttggcatgtgcaattcagctagttcttactcccctcctaattctaagtcctgccatccttctgtgagatttcactgcatggctggtccctccattacactgtgttcccaattctcagatctctcctggttgaggatctttacctccactccacttttacaaatcaccaccctaagtcttgctggaccttctctgaaatcctaaactctaatacagcacttgggcctcaatctcctagacatcagctccctcattcctttctctcactatccctttttcttcctgaagatctctagttccttaagtcttcccttttctctcagtctatcaggctgatctattattgattctcatctctcccactcagattctttcaaacacagtagtgtagtgtagtgtagtgctgcaggtgtggcctttgaagccagactgcctgggttaaaattccagcctaccatcaactatgtgtgcctcaattttctgaggacataatcatagtaatctcttccattgctgttataagaattaaacaatttgatgcacacaccacgtttagaaagtgacaggccacagagcaagcatttgataaatattaccataataattatgatgttactatcataatttttcatctgctctcccagaagcattttgaacctccctgactagttcttctgttgaaccttctctggaaacctcaatctctggctcaatctaatccttcattttctctgctctttttacttggcagctgaggtctcctgaaaataaaaaacaacaacaacttactccactgtgtaggctgatgctgctctaaacttgaagcttccagacactgcttgaatatccttttacagcttctggttggtttcctcatgcattcctctgatttgctattctaaatcttcattcttttcaaccctcgaagctgctgatcttttcacccttgcttgacagttcttacatgaaccatctaaaagccagctaaaaatgtatttatattctcacatccttttcttttcttttttaaaattattttaatttttgtgggtacacagtaggcatgtatatttatgggttacatgggatactttgatacaagtatgcaatgcacaataaccacatcagggcaaatggggtgtccatcctctccagtacccacactttgggtttcaaacaatccaattatactcttctggctatttttaaatgtatgattaaattattttttacttcagtcaccctgttgtgctagcaaacaccaggtcttattcattctttccaaattttttttggacccattaaccatccccactccccactatcatcactactcttccaagcctctggtaaccatctttctactctctgtctccaggagttcaattgttttaatttttagctcccacagttaagtgagaacatgtgatgtttgtctttctgtgtctcacaaccttttctacaaattcataagaggtcttctaccttctgtcctggacttctctttctcattcctttgtggatctgattccattattatctcttctctccctcattcatgtcaggccccaaacatgctcaatctctccaatcttaacaaaacaaagccgcaaaacaaaataacacccctctgaactttgagtctctcactatctgttgtctcttcttctttctctacagctaaatttcttgacctcaccaaatgtcccctggggcaaaattgaccccagttgagaactactgaataaaggatataatacaatataaaatagagcaacaagcacataagtaaatgcagaagttctcaaaagaggagcccacaatggtgtccagtctctttcatccattcagtgcatttttccggccaaactctcttccaaaatccagttcctaaagcagacagcaagcagagcatctctgtatttgtcactctccactcattcctcagctcactgcaatctgacttccgcccctacttttcagatcaattcatactatggcaatgtctttcttcttaatggccaaatccaagggacatttcctaccttatgttacttgaattctccatagtatatttaagctatcaatagtgacttttgtcttgaaattctttctttggcttccaaaatgccaccttcttttggttctccttccgtttctcaaggtacaccttcatcgcctttgctcacacttttttccctttaagtctcagtattcctcaggcagagtcccctccttggtccctttcttactgccactctttccttaggggtctccttttttcctgtgactttaaccatcactgccatgttggttattcctcggtcttgctatccagcccagaccctgaatcctaggctccagggtaatgcctgcactactctctcctgggcccttctttctgcattccagtggcaacacaaatttggcaagtctattcttaccattcagcagctctttctctcctatttagctttgagctctttgaggatatggatcctttctattttctctttcaatgatctgaaaatagtacagtgcttagcacctagtaacaggtgctcaataactgtcatttgaattaaggaagagacatgcttatcttttttctctagtattagcagtggatttgccaactcatctctaaaatagaattatttttcctatctccaaatttcccctcttccagtcttctcagctaaagacatcactgtctacctgactgctcaccctcacacctcaggagccattcatgctcttccttctccctcatcttccatatccaacccataaacaagtgctattagctctgcttcgagccatgtcctaaattccactatctgtctccaattccagcactaccactgtgtcaagccactatcatgccttacgtgtccaactgccacaatctcctaactggtttttctgcttctgctattttcccctcccatgtcagaaggctctttctaaaacattcctcagattagctcctctgcataaaatgctccatggcttcattacacttggaatgtgatctaaattccttaccagacactgcattagtcggtctctctaacccctctaactccatcaccaaatccaaaccaaatccaaacccaactcccttatattgttccaggaacagccctttttgttgtttctccagcaagctaattgttctggcttagggtctttacattgcctactccctttccctagcacgcctcttccgagagccttacaaggcttacccgtctcagctttcatatccctgcccaaatgtcactccttagagcatcagcctacaaaactagctcccctaaagtcattctctaaccctctatgctgctgtattttcctcagagcacttattctctaaatttatatttgttaattttaatgaattaatttttttgagacagggtctcactctgtcacccaggctggggttcagtggtacaatcactgctcactgcagccttgacttccagggctcaagtgatcctttcagcttagcctcttgagtagctgggactacaggcatgcaccaccatgccaggctaatttaaaaaaaattttttttttaagagatgaggtctccctgtttcccaggctggttttgaacttctgggctcaagtgatcctcccgccttggcctccaaagtgctggggttataggtgtaagccaccacactgggcaatatttgttaatttttaaattaactttctatatgctgctacaatacaagcttcatacaatataagctttttaaaaaatataagctttttttactttcttgtctactattacatctacattgtgtaggggcataactggcccatggtaaatagtaaatatttgttggaataatgtgatccctgagtccacaagcatatctttactaattggtaagggttattgggtctgtgaggtagtctttcattgtgtgaagacaattttcttaaatgggaactagcaccaatctctaaaatccacacacctgttagctactgatcaggactctgcctgtaaccaaactttagtttggctccctggagccctcttcttgattatgccttgtttttgggctgggagcccaattttagcaagaatcctgctgagtcagtttagggagaatcccctttgccccccacctttgatatttaatcgagttccttttagtaattttccattcaatgactccctcctcttcactttgtcctctggctataaattcccaactgctctggctatatttggagttgtgttcaatctccctcccctaccgcaatattttttttttcttttctctttcttttttttttttgaggtggagttttgctcttgttgcccagattgcccaggctggagtgcagtggtgtgatctcagctcactgcaacctccgcctcccgggttcaggcgattctctggcctcaacctcccaagtagctgggactataggtgcccgccaccatgcctggctaattttttgtatttttagtagagacaggatttcatcaagttggccaggctagtctcgaactcctgatctcaggtgatccacctacctcagcctcccaaaatgctgggattaaaggcatgaggtaccatgcctggcctactgcaatattcttgaccccctactgcagtagtttccaacaaaagtcttccttgtcatttttaacaagtatctgctgtcatttctctttaatattaaaaactaaatatttgccaactgggcttgtttaaatacacttagggaattttcattgctctcaaaagaagtttcatgtgttctttgcagtgtgaagggtcaaagagaggctttacttgtctctgtgactgaagaatatggtttctctagtatacagaagaaagaaagaatgaaggccacatgatttatttttatcgcctctatagttgtggctattatacaatttgtcacatttattttcagttgttcttgtggtgacattttaaggaataatccaaaacaatgttcaattcaaaacgacaccccaaacctcctaaacaaaagcaggttcagcatataaaatagtttcctcttggccgggcgcggtggctcacgcctgtaatcccagcactttgggaggccgaggcgggtggatcatgaggtcaggagatcgagaccatcctggctaacaaggtgaaaccccgtctctactaaaaatacaaaaaattagccgggcgcggtggcgggcgcctgtagtcccagctactcgggaggctgaggcaggagaatggcgtgaacccgggaagtggagcttgcagtgagccgagattgcgccactgcagtccgcagtccagcctgggcgacagagcgagactccgtctcaaaaaaaaaaaaaaaaaaaaaatagtttcctctctgccacataaccaatataactcacatgcagtccactcctgagatgatatgattatacctgcaacatcaaactcgatttccagtgtgaccttgctcgtgattgaagagtctcggaggagctgactggcttcttcgaaggtgctgtcttctgttggaattccattgatggccatcactctgtctccaatctgtagcaccccacatctaatttagaaccacatgtgagaggttgtagatggagtaaataattaccaagctgagcttgccaaatctaccttgcttgatccttgcaaaatagcatcataatttggtcttgcttattcaatgctgtgggcatcatataggtcaaattcaacgtcgtgtgttgttgcagttcatggttataattgtgagcaggggaatcctgaagtatcccagagaagtaattaataattcataaccatggtattgttagaatctgatccaaaccaatatttagtaatgatgaatgtatattcccccatggcagaaactattgaagttgaacttcaggatatgtttattttatggatttttctcctttttaattaatatagcttctagtcccttgatggacaaaatctgctagttaaaggcatccatgctcattactcttttcaaacctgatcaagaacataaaattttattgtcagaagacagttcatcatatcttgcatttcctgcattgagcaatgtttcataatttactagccattcaaagatagcaggtaccagaaacgcagagcagaaaatgatgctgtgaaagaaagtgtctcacctctctgctgggctgtcagcttcgatataggaaatcagaggtggagaagagagagtttctgtggcaaacacactgccctgcagttggatcccaaatcctgtgacaggatctgccgtcagcacaacctctgtggtttctgtgtgaacaacctgcccagccaatcctactgtgctggaggctaaggacactagaggaacaaacagaaaatactgactttaggttggagcaagcaccaggaataccagcatttccaaaatagatcatgtctctgcataaaaactgaatggcaatggtgggaggttaaattatggcctctggtttagcaagagttgaaaaagataaatgaatctctcaatattcatcacaattctataataacatcagtgtatccctgcaccctggctccctactcctcaaaccagggatcattgtgggggctttaagaggatggccttagggtcaggttacatgggttttagtcctggctctatcactgagcaccagctggggaaccttggggtaggccattttgtctctttgtgtgtctatatcctatctaagaaaaagggagttgagctagctggtttcatgttttttccactttagccatttgcatctgggctttgtgacttttaaacaatcctatcttcagctttgaagaaataattaaactaaatctggcccctggcgtggtgaggctgtgctggtcctcaaccttaatctagtgttgggttggcatgatgacattgtttaaactctgtacattcctcctgccgccccccaccaccaccccagagtttggtctcttcagtccttgctctttcccactgggtttctagtctaagttgttgtatttcatttatttcctattatttctcctctttcatttatctctctgatattcatctacaccttccagcagacatctccatcttatttccattctgaactcatgaaagggctgctccactcctccatgtctttctctcagccctgcccattggagtgtggccacccgtgctctctgtgagcacagcctctgcctgcaggtcctatgctgcactgagtcttcctccagaaagagtctggccccctttaactaaaacctgataacaccatatacctcataaccctcttcaaaagccattttcttttactccctctacaggtggcaggaagacaggttcataatactccttgctctccacatacggtacattgattcaactactcctatttaaaattccatattctgtacttatttctgctctgtctcattttcaagcccataatctactttttcaaaattctcccccttttcttcatgacttcaggacttgcctcttagtctgcctcctctaacctatagcttttccttgtcctctgcctctttgccattatgatgataaccttctagcaagctggctttatgcttcttcaactctcttcatgtcagttcctagcaataccaccctacttccactctctgccagcagagccctatggtggtctccatcttccttcaaaatgaatagatcttcaagatctcaatatctgaatcccccttgttgatcacataccctttattagccatctctcccacttcctgcaatctgtctcctctttatgactttcagtcccattccctctcacttgtctcctgagtctattgattttagcaacagatttttcccccttaaaatgaaaacatataagggatgcctttgtattccagataaaaacagctactgtagttgatgtgggaatgggagacccctgaggttttccctggcctcatgtggggatctggtaagtgcaggtggaaagccattgtcttcgcccactggctttgctggcatcattttccccacactctgcctggacccctggtgagcattttaataatgcatctcctaggctcaaagattcctaaacctcatgggattttcctataccctaatactttatcctctatggtaatgcccggtcaactccactgttgttactaagttgctgaagggtgctaggaaaagtcactatgaattcacaatcctattaggtccttaaattatttgttgtgtgatattttgacaccttatttcattccacaaaggatttgtctcaaatgtttctaccctaaatcatggtcaaatgttactcctcatttcctataagactgaaaagatgcaaccctttgacgagagttccttaaacaacattctgtttagcctcaatttctctttatcattatttgttccctcttccttttttcccccactacaggaggttgtatccttccttccatttcaaggctaattcccccttttagtgtttttaatactatccctttccaccccccatgattttgtgccatgaaaaaatttgcctcttgctgcttttccaaacttttctgctcactcccccagctttctgacttctgtctatagacgtgtactgattctgaagtggctaaaaacttggcttctgccttcaccatttactgaaactgctctcaccaatgacttcctgacttctaaaatcagtggcctcatctgctctagctggcgactggctttaggaccatcccttgctttctaaaattgtttgcttggttttgatgaaggtttgtttcgagtgtcttactttttcagccccagccagttgctttgcctccctctgcatttcagcgcacagttccatcctccaagtcttttctactctcattctttccctcattcatgcctacatgtcttctgcatgtatcttctcaactctttctcttgtttttgtcaagctccagtaatggatctccctccttgatgggtatgccatccacacactctctcattggctcctcaaactcaatgttttcaaaattgagcgaatcctcttccctctctcattgccactactatttctgtgaacaggaccatcatttttattgccctctgggcttaaaatctcaaagtagccttaactcacaactccccattgtctcaaattctatccattgctaaatcctttctggatgactagtgaaatatatcttacaaaaatcctcttttcccttattaatttcagtacctcaatttgggctttcattattttttatttgaattattctaatgtacttatttctgggtccttacatgcaaaatattccccacatattatttccagatgaacctcctgtcaaactttccggatatgatgaggccccaacttatttactctgcatgtatcttctcaactctttctctttagtttctgtcaaactccagtgatggatttccctactcaatggatatcccatccacaaactgtctcattggctcctcaaactcaatgttttcaaaactgagtgaattttcttccctttcttattgccactactacagagcaaggcctcatcatcaccagtgtacaatactggatagacttctaactagtgaccctgcctcttgttttatgctaacagcctccaattgctgctagggtagcctttctaacatgcaagggtaacccctgccctgttttgaattttcaatagcttcctgtttcctatagaacaaacttttcaattctagcagagcacataggacccttcatcagttcctttctcctgcccatccactctcctgtttctctgtgatcccttcatgtgccatgtgccccaaccctcttgacacacttttgtgtcttcatatatactgtgccctctgccactcagctcttgctctgggtccttttctctgttttatccaggcagaattaggtacttgcttttctgcatttccacatttctaatacatggtcccgtttcagcatttatcaggtctctatatgcctgtttctctccacctgaccctgagtttttgaaaggttggaaccagctctttcaatctctgaaatcttagtgcctggaagattcaacaaatgctgaataaatgaggaatgaatcaaattttgggatgtcatctacatattccttttaggaaacaacacttctcatagatgctgctgagttaccataaggaactacaagtcattcttcagggcccaggtaattgcagctgatggggcaagggagggtgaagtagatcatttgtctaggaggagtaagaaaaaaaatcgacttttccttaagaagcaccattctcattccatctcagctggattaaggttaacatagcctgcagtggggggtgaagatagcctccaaccctacgcttcttacaggtggaagcttgcaattgccaggtctgacacatagactgtcatgtattaatttagatcacatgttctagtgtggtttcgctgatgtagagtgtaccgtgattactctccagataataatttttgctatcagtggcaccaaaccactgggagacaccatttcctgtcaataaggatctggagagtatgttgcattccagttattactcacagaagatgagagtatcatgttacagcatcacctatttggcaggtaacttccacttatcttctaggtgaagctttttggacttaatcagtaatcctttactttctttgactcttttataggttcatattaatttttttttccatttgagatcacaatttgatacagattatcggactacttaattggagttaaaagctgtttcagaaactttaaggcagctgtttaccatcttcactaagaaagagccaagagccgggcgcggtggctcacgcctgtaatcccagcactttgggaggccgagtcgggcggatcacgaggtcaggaaattgagaccatcctgactaacagcgtgaaaccccatctctactaaaaatacaaaaacaaaattagccgggcgtggtggcaggcgcctgtagtcccagctactcgggaggctgaggcagcagaatggcgtgaacccgggaggcggagcttgcagtgagcggagatctcgccactgcactccagcctgggtgacagagtgagactccatctcaaaaaaaaaaaaaaaaaaaaaaaaaaaaaagaaagagccaagaaaaaagaagtcagtttaatagtaacaggtgagattatactagatatagtgaagccttctcaaaggaaagacttgctatgtttttttaaacagagaagatagttgaataattttattctctagaaggttttgaaaataagtactaatttaatgtgaatattattaaatttataagctctatttggaggcaagttgagatgataaaaattattagaaaattgaatttaggatttaaaataaatttatgtattatgtattggttttataattagttataatttatattatacatatagcattgtagtaaataatttatgattttataattaactctgaaagtcttctgacatattggaatcttttatttgacaaagagcaaaatttcatttgaaattatatgtattgattagttacacatataaaagttttgaaaactattaccagatatgaaaaagatatattgtgatttaaagataaggaatcaaaagaaaaaaacaatcaatattaacttggaggagaaaaaaatgagcttgattatcctgcttcattaatgtggtcaaccagcaaagtaaatgaaggtgaatattcccccgtcatttgaaaatgtggatggtgaattgtctctctagtagcagatgcttccgcaaggtattcagtcgtcattgctgcaagctaccggctttggctgaggcttgcctactcctcaaggtgaagatggaaatgactaaattgctgacatcctaactggtgtatgccgaggttgtgttcaggattcgttcctgctctgtcctgttcccattctcacatggagggttctgttcacaactcttcagatttgtagggaatgactacatttttgtcaattcttgttcttcctagtgtaagaaagggcagggggagccaaaaacacctccaaaagtttaaaaatttaccaaatgcttatttaatttagaaggctgaaagatttcctatcagctatgagaagcatttaaaaaatatagagaactaaggaccccaaagatttattattataatctgttttttttttttttttttttttttttttttttttttttcagataggctctcactctgttgcccaggctggagcatagtggcagaatcttggctcactgcaacctccatcttctgggctcaagcgatccttccacctcagccccccaggtagctgggactataggtgtgtgccaccacacctggttgattttttcttttctcttttttgtagagacagggtttcaccatgttgcccaaactggtctcaaactcctgggctcaagtgatccacccgcctcagcctcccaaggaataatgtgtttttattattgatcctgtaatctaagacttctgtctcactaaagtgtcccacactatagtcaacctgccatagacctaacacatgtgtatcatgtgatctggttcaggaacgcagtagaggtggccaacagctcctttgtccaaatgagggtgtgaggacagttcttagggtgtcttcttcagggctccctgaatggtcacttataaaagcttaccagtagctgcctttatcttccattctttgttcccaggtcaatagaagggaccagaaaagttgttaggttttttcattttctttccttcagctcttttcaatggcactctctctaatagtagttactactgatgacaaaagcagcaaagaccattctggaaatgtgttctaacttctactctttgccgcaattcaggcagactgggaagagacggagtctctacactggcccagggtacagtggtggggaacagaaagcagggcaaactagctagatctgttgctcagccatgctgttgttacagggagatgatgaggttctggaaggagacttggcctctttggcagaaaaagaggcagcacaggcagccagggaaagggcagtaagattccagcagaggagatgagagggctccctctatgacatggcttggcaatgcctccagggctttgtgacacttgtcaaagcctaatgtgtgctgtattaattattttctctatgaaacaaacatgacaccttcctgttttaatacttgtaacacatcactatatacagacttcttgtatttcctctttgatcagtgatacagaatgttttaattttcatgtgagaagatttcattttttttctgggcatctccttccttggcattggaaatacatatgagcattttctgttttgcaaactctggcctcaagtcatcaccaatacagcaaagagactttttgccatgattcaccatctacacaaatggcctggttgctatagaaacatatgtattacaaagggggcagcaaatggtggcacaggataaagacataaataaagcagtggaaataaaccatggtatactaagagtggcaataaaacttttattatcagttatttgggaagacctttacatctaatgtgaccataccaaacctatgcaataaaagaaaagaaaaaaatcctcacttaaaaaaaacaaaaaaacctttgcaatgctatcattttttcaggtctttttgaagtgtgaataaaagttcatagcattttggaatttatggtttgaataaaatacaaaatgtgtgatctcctgagacacatttataaacattctggtatgtttattgtgagtggtgctctagtggccaatgtctacagcaaacacaaacaactagaaatgtattgaaataggtatttctaccatgttgaagaataatgtcctgattcaagagagaatttatgcgttggttatgcatatcagtgacagcgctgcctcagctttgtttcctactacaaaatttaagatatgaaaatatcaacctgagatagccaaacatcatttgtttgtattcactaatgtccctaatcaacacagcaagtcttacctaacacaaacaaatactagcctttgaagcagaagtatgaacactaatgaattcattttaattgctcttccctgctgagtgctgttagcctgtttttgtcactgaggagtactacacacaaagccattatctgttaaaaaaattcatacacaaatacccaccacaaaccctgaaggcattacatagaagactaaagatctacgtattatgccaaaatgtacccctcgttaaaaagattgaactttgagagcactgtcaagagattttctcatgtgacaattcatatttaggccgatgacagttaacacaaactattcaaaatagctaacaattaaattgtgcttactatttaccaggtgttgttctaaacacatatacacatgcaatctcatgtaatctcaattacccaatgaagtaattcttcctattttcagtcaaggcatacctcatgcagtcttcacaattacccaatgaagtgattttccctattttcagttgaggcatagagagtttacagaagttgctcagggtcctacagctagaaggtaatgatgctgggatggaacccaggtagcctggttccagagtctaggcttataaccagttcactgtattgcattcaactagtttcttccaagagtaaataatttactctagtgtcagctaaaaaacacatgggactccaggagtactttgttctcattttgactaaactcaatcttccactttcctaatttcatttttactatcattttcatataccaaagatgacaaatctccttatatgtaaaagtatgtgcaagtctaaatcatgtacaaaccacagtggtgaccctgtcttatgcaatggagttcactgtagggaaagcttcagtttcctgtatcatgaagaaactagctcccagtgtgggtgatagctggtcttgggcacttagggtggccctggtgagactggagagagatcctcctggggagatgaatctcttgcaaacaagctgaaaagccagtaagtccataacagctgtgaagtatctggctttggttttatttaagtaacttaaggatgttccttatttttattcccatggtgagcacaggaagagatcccatcttctttaaatttctctgtttaaatcataatcatggccatcaaaagggatacatgacaagaaacagactctctagactatgattaggtctagttagaaaggtcagtgttctcttcttccacaagttatatgatcatgataagagagaatgatcttccccaatagaaacgataaatgtaggagtgatttatatttctttctttttaaggcattcaatcaccttttttacccctctattcagacaaccagctatcccaaagcaagtagccaactatatcttcctagttttgcttagtctatatcgtgtttggctgtccagatcatttttacaagaatcatggttgaaattcctagactttaggatgcttattgtaaagctgagcatccttccaatcttccttaggctggagtggacagtaagaagtgtatgttagatcactgattaccagtggggtaggcttctggaaaaagtattggagtcttggggaatgagatatagtttaaaagggaatgttcatatttatcattgttttggggaggagggtaacaaaatataatttagtataaaatttatgacaacattaaatgaatgcatgagaatcttatatttatcaaaaggggagcatcgttttcacaaaatttctttagaatgagtaagaaactaagaacaaaggtttcatgtccaaagccacccagaatataataaaaggagtcttaaaggaaaaatcatatctttgggtatgttatgacatcaaaagagcaagaaaaatctcaaatctcaaataaaaagttgtaggcaaaggtagtatgaatgaattcagtctgaagttaaattggggtgcagtcattgccaaacagatactgggtatcgtgtcaacggtctttggcacagagctgttagctgctcagcatctacctgatcacttaagcaactgtgaaacactcttcccacaatttcggtattttcaaggctccattgcccacaggttttttccaggccaaatgccattggctgtcatttcacttacatgagcttttgaagtctttctttttcagtctcctcctcatcatggttccacgtgggctggtggagtagaggcttcgaggtagagtccccatgttcagggaactcaggctgtatgcactcatggaggtaggagagaaggatgaagacaccaaagctgctgcaagagagtgaagacgttgcacagagcactctcaggtgaggtgtgagcccgccacacttgtcaaccagtaacaatccagaaagacacacatgatgcatagcaatggctaggaaggaccccagccagctagaggccagctctcaggagcatgagacaatgctttacaagagcctacaaatgctgaggggcagcaggatctttataagctcataggaacacaaagagactctgtgagaattgctttaaacaaacaaaagaacaactttgtccatgaacaactcaatgcatcagatacataatctcattttcatattttctgacatgaatttcataagtgattccacatatacaaagaagacctgagaacattgtctctgtataatattctgaattgttacttcctgagccacatataaagcattctgaacatttacatcctttcctaacaacaaatgctttctgatggaaaagaaaaaaacctaggagatgtcagaaatgataaattgctactataagaaacagaaaaaacaacatccatgaagccaaagatgagaaaaggagagtgtgagaaaaatataattgaaataaaagaccaggaggagaaagcatggaacattacgagggctgtttggaggaggtgctttcgggaatgtcagggctggtactctgcaatggtcagggtggtacgtgttatagtgatggttggtgtgaaggctgctgtggttgctggcccaggaatcccaggtaagttgcctgtcgctcctctgaattttcactgcccatatgaagtgatgatgaaaaataagaaaaacaaacgaacaaacaaagaaccaaaaaagaggaaaaataactgaattgcccaaattaaaagtataacaaaaaagaaagctgcttgcaaataaaaacaaatctacttggctttgcccttttctcagtggtcagcaaaatagatgattaacataaaggatgtaaacttttcatcttcccaagaataatgcatatctttcctcagctcgttttttcttcttttaagatgactattgaatcaatttctaatctccctcagtgctttgcagctgagattaagaacattttttttaacttaaaagtcagcccctcaaagatctatggcacacaattagtaattaaagatttgcaaatcttggccagttagtagcacttgttttgagaaaaagaaaagaaagagcaataaatcacgttggtgcatgattcaagtggtttactagtcacacatcagaatttactgctctgacattttaattgcactacaatccatcacttggacttgattttcctcaacaataaaccactctaatcatctatcagtatcagaatcttatctgtatctcgactaataaggagaagataaaagtctctatattttatgattttttgaaaaagcatatttacattagaaataattattaaaatatttcacgtttttatatttccttgatgccataaaattttaataaagtttatttcaaactttattaaaatttcaaattgccgtcccttttatgttttagaaaatctttatcatgtttccattctagcttcaatattaagatttgatattccacccagtgttctgaaatatgagcaatataatgtttgttattatgtctgatatgaagtttttcatttaataatcttaaagaactcaaaataacatatgaacttattttatttttctagagatggggtcttgctgtgtcacccaggctggagtgcagtggtgtgatcatagctcactgtaatcttgaattcctgggttcaggcaatcctcccgcctcagcctcctgagtagctggcactacaggcccacgccaccacacccagctaattttttattattttatttgtgtagaaatgagggtctgcctatgttgcccaagctggtctcaagtgatccttctacctcagccctgagttgttgggattaaggcatgagccaccatgcctgacttaacatatgaatttatatctccttctactttcatgattttggtgttaggtgtcttacaagtgaatatgtagagaggtgaaatactctatgcattgaaaggacagtcgtttagataagaacttaagttacatcaactgtgatgccagctgaattggtcaattcgcatcctttctagaatgaaacaggacatgaaaaaaaaagcactagcacggacagatcactgcggggtgaagcagacctgggtttcagctctgcctccagcccttcctctttgtatgaccttggccagctactcagccactctaaacctgaatttcctcatacgtcaaatggagatcatgaaatcatctacctcacagggatattgagaattaggcaaatacggtgcttagcatggtgctggcacacagaataaaaacaaatgagtttagagtatattgatttgtctacttttccatttacgtgccaacaataaagtatcttttaaaggaaataaatttatttttcactcaacaaatttcactcgttggacatttaagtttagagaatttctcagaaatctgcagcagaaactttcatagccactataattttgttaccctaaaccatctggtctgctccttctactcaactgccctgtttgtggtttggattccccctctctctccactttcctacttcaagctgccacctccttcatctaggccactgtaacaccttcagacatggcttcccaactcatctcctgcatacctaccttccacaacatagctagggtggccttctaaatatataagttagatcatgccactcctgtttgaataggttactttttttttcttttgagacagagtttcactcttgtcactcaggatggagtgcaatggtgcaatctcagctcactgcaaactctgcctctcaggttcaagtgattctctcacctcaccctacccagtagctgggattataggtgcccaccaccacgcccagctaatttttgtatttttggtagagatggggttttgccatgttagccaggctggtctcaaactcccgacctcaggtgatccgcctgcctcggcctcccaaagtgctgggattacaggcatgagccactgcgccgggcctgaatagctaactattacaaagagaatcaaaggcagcccctgcctatctctctagtttcatccatatcactctacccatcatttgtatattttagccacactgatcttatgtctactcttagaacaagtcaggttccttcctgcctcaaggcctttgcacttgctgttctttccccagttgtttgtatgactgcctccttctcatcattcaggtctcacccgaggtgccacctcctcagagaagttgttgctgatctccctggctgaaggagctgccctccccatgctatctcattactgttttacattcttcatggtacttattgctgtctgaaacagctttatttatttaatatatttttaatgtttgtctgtctgtactagaatgtgaattctataagagtagggatatactttgcctgtcttgctcactaaatatatcctagcaactagaacagtgcctggtatataatgactaatacatgaatgaatgaataaacaaatgcatgaatgaacgggaatatcagccagagtgtccatgtgaacactgcagcagcattttccttgagacaaaagagtatttattgcaggagatgtccctaatggattctctctcaccatcctcattctactttgggtgtacaagaagacatttcagcaagacgcagttattactgtgtttggccaatttacaaccaccgacactttagcgtacttttcacaaagtaccatctgtgtttcaaatgaagccagggtacggtgaatgcacttcgggattctacacccaccttttgacccgcttcttcattgagagctttgaaaattactgggcatttgttaggactgtacagcacaattaataagtcaataaggaagatattatttaccagctattgctttctcagactgtgccaattgctacaggcaggttaaaggtcataccatttaccttgactttgaattactactggggattaaatcttcatacatataaaataattaagagacaaaaatgatataagataatgcacaaaactgtatgccatggatgatgaatgcaaaaggtgttgaacaaataatgtaggccagagaagagagctgctgcctattttgaatgtacactccaaatgttttctgttttacagtggtgtacttgataggcaagtatttccaaagtttaataataagatgttacatttttggcatgtcctgtcattttgcaaagagcacttatagacattctctcatttaataaagccaataattgtagcctactttcactgattacttattatatactaggcactgtgctaggtgctttttcatggattagctcagacaatgttcacaatattcctttgaggcaagtattattatgacccccattttacagatgaagcaactgaggtatagaaaagttgggtaacttgcttaagaccccacgtggtggagtcagaggtgaagctctggacacgtgatcctaaagtccccgcttcaaccaccagacataccgcctcttcctatgggtatgtctaagtcccttgttatggataagaaaacaacacatttaaaatattatggttcttgtatcattccatggtgacgtcactactgcagtctcaagagatatatggccacagaagttacttttctttcttctttctctaattgcagcctcttactctgttcaggatgttcgagagagcagaccacagtggttccaggttgccctggagctctcaaatggaaggtcctcctggtactgaatgtgtcgagtctagtgactctggtcacattttcctttccaaaacgtcagtttccttcaatccaattatgtctcctgaaaaccctcagtgggaaaaatttctaacctcactgaaaactcatttctgtcagcttctttaatgctgctatttatcagtgaaaggcatagctaatctcttatcccaagttgagatattcatttccacactggcctgaaaactctgtggtatatgctttactgctaacacaatctggaaatttgggaagtgtgttgagagacacactgttcaggcatcagagatcttgaaaaaacaatcagaactttcttgtggagaaagggtaaaactatgtaaaactccactagtcaaaaatttgagaattgtaaacacaataataattttttgtttgtttttcttctttactatgatttaattatgtttaggagccaaaatttatttcctcttggaaatccaagtctgattttaatgtgcaatataacggaaacacctgcttgataagaaagacagtgaacaactttcagtaaacgtagacgatggagtcagaagtggaagctagaattacttaaacttcctatcagtttcctatccctgcaacacaaacgacatcaggttttccacaataaaggcaaaaaatttgtgcttagtccatatattttagtgtataaattaaactcaaattgccttggcaggttaaaaaatttaatattccatgagttgaaaacacttgaattatttatgaattgtatatagggccaattaaagaaaaataaaagagattactaaagatgctaacattttaaaagggtctggtatgcatttccgattcgctgataccagaatttagcaagcaaaaccccatgctgagagagcactacacagtgtacattcttatggctactgtgctccaaatccaatgatgactgccgattaatttaaagaaacttaaacagcttcagaaatctctcctctctgccagagtgcaggaagggcccacggggcctcctgataggaatggtgtgcatccttgtgaacggcaccttcctacagctgtttgcattgctattccaatactgtgatgctgattttcttttcataacctgcctatgctgcatcatttctctactccaatgtgtaaaattaaaatctgataagggtaatgttgtactagagattttcattagcttcagggctgtctaagctccatttaattaaaaaggttgcatccagctgactgatttagtatgaaaattatctggtccctctttccccccgccccagactgtggagaagtgtagtgcattttaaaaggtgggagacacaatacaaatgaccccctcataagcaaaatttcaatttcagagaaaactgcactgtgtctaaatatacagaaatgcattatcctccttcaggccaccctgacaatactagtgaggcctctaatttcaaggagtacaaaggaatggtgtttgctttaaggaatagggcaggagagggagtcggaacaaatatcctactggaaaacttgacttcatttgatttggggctcaaagacccctttctcataccaggttttgcctaaaggtgcctaggtagatggtataaacacccagcaaatgtatctgtgaatttcaagggagtcaaaatacagataccttcagctgacactttctattgaataaatggagttaaatattctgattctcccagacaagatgtttgctcagacaggttgttctctatcctaagaaaaaaactccactggcaaaagacataatatattgtaaaccaaggcttcatataactggttccctctgattcctgccaaatatttgaaggttctgctattaaaatccactttacttatttatttttaagtgagagctttactatttgccttcattggccttcatctaggctggaaattcaaaatgtataccaggaagtcaaattattttccttgtctgcacattcaatttgcaccaaagacttttttaagaaaaaaatatcaaatagcactagcctgaaaattttttcctcgatgttagggtttcaagcaaattatgtgtggcttagaaaaaagactttggaagatgaattagagtaaacaaacataaccttgttttgaaaagaaatgatgagtctgaccaacatggtgaaaccctgtctctattaaaaatacaaaaattagctgggcatggtggcggtcacctgtaatcccagctactcgggaggctgaggtaggagaatggcttgaacccaggaggcagaggttggagtcaaccgagatcatgctactgcattccagtctgggggacagagtgagactccatctcaaaaaaaaaaaaaaaaaaaaaaggcagaatgagacccagtgtctttctgctgtctaactctgctagagggagcaacactgtgagggccagagaaagagcttgatccaggtggaccatctcaccatggtcgggcccctttagggccagccgggtctgatgatggggaaggatctcaagcttgacctggtcagtggtgttggccaggaactgggttgcttctgcaagtgtacagtactccatgctggttccatcgatggagaggatgtgatctcccacatgcaatgcgccacatctacggaaaggagaaatactcggtaagaggcagtgccttcctctttggaatctgactttcatgtccttcatagttaaaatttcacagtttttcatttacttaaaataaaagaaaagaaaagtttgagtgttataggaaacaccatctgccaaattttaagtaccttgaatatgaacaaggaagtaaaaccttgtggaaaatagagaaaaattcaacgaaatgttttctcttgtctttctttaaaaaaaaaatcttattttggagtgcttgtgtggaaagttgagggaaagcgagcaagaggaaagggaaaaacaggaaaatgtttcccctggacttttgtctgtgtttttttgttctaggcttttctatctataaacatgagtgggtaaatcttcagaatctcaaacatgactctcagaattggaatagggtctattttatgtgtaaagaagaataacttggggagatttcagtaatacttccttggaatcctcacacaaactccaagatcaccagttctttattattatgttattctggagttgaacatgtattagtataaaagctcttgataatggtagaaattatgcaggagtcaagtgagtaataaaaccaggcctgcatggtgagtcaaggggaaagatgggggcagggaaggggctagctgctacatcttgctgaactcaagagctggctactggatgagttaagaaaagctagcgcagtcgtcagcatccccacataccagtcaagtgaacagctccttaaactggttaccccctgtggaatgggaaaaaacagagggagaaaattaaagcatcctgtgccattgaactgcacaacacccctggatcaatggctgtcactgataaggactgaatgttgggtaagaccacaatggagatgtagactgaccactacggggggttgctgcagttcactgcaccatggctggaggtggaaaggcaggttgaggggcacgtggagaagagggctggaaacatacaggggagactggtcattcaggtgcagtatatctataaattcccagtgtgaatagtctacgtctcaagacaaaagcatttcaagtcatatcttccaactaaaaacataattccacattttttgcacttggagtgctttagctatgggagatgaggtttttcttaccaggagctgtaaaataattaattagatggaaaggtagtctttttttatcttccccttttaccttacgagtataaaatattaattagaaacatgaaatttcatttttattgtggcattgaagcgaatgatgttttaagacaccctcgaaggttgtaaaatcctaagattaacatgctatgagagtataggactttttaaaagtattgtaaaaaatattttaaaaagtattgttttatttatttaagaaacaaagaaatcagattttatggtagcaggatttaattgtcaacaattcaggaaaacccatcactgctctgcatggggtttaagaaagatctactcagctaccctacattaagaacaggctagtgccctaggacacagtaagaaaacttgcttagttgcttgatttttttttctattgctaaaggccacaccaaacatctggatgacgtgaagtgacatcatggggtggctgacacataggtgaatttttaagccctgtaacagtaacttgcttctgtgtgtgaaacctgtataaactggcaagagaactgtgtgtgtgtgtgtgtgtatgtgtatatgcatgtgtatatgtgtattacaagtgtgtgtacatatgtatgtatatatatttaaaattgcacacatgcaattttgtaaaggggcactttctttctttctttctttctttttttttttttgagatggagtttcactcttgttgcccaggctggagtgcaatggttcagctcactgcaacctctgcctcgcgagtttaagtgattctcatgcctcagcctcccgagtagctgggattacaggcacctgccaccatgactggctaatttcttgtatttttagtagagatggggtttcaccatgttggccaagctggtctcgaactcctgacctcaggtgattcacccgcctcggcctcccaaagtgttgggattacaggcgtgagccactgcgcctggcggaaaagtaggcactttctacaatacttacctgtctgcaatacttgcagatttgattttgtctatgacaatgacttgtttgttacagcacatcgaggtagttagggcaaccccaaggctggcaccaggagttttggcaacttcgactagtagtggcccggatgctgttgccacagagtctgtcaaagaacaaattttagaaaacaaaacaaataaaacaaataagcaaagagacaaaagaaagagatgaagaatattcagtttggtgttagcctgttaattttatcactgaaacttagatttccctccatataatatccccacagccaataataaattcatagggcacctcttaacacacctgttccattcagcttgtattgtgttaatgtatgtgtaatgttcatctcttcaatgagattttaagcttcatgtcacttgggataatatcttatgtatctttatcccctccacagtgcttggcacaatgccgagcatatactaggtctctcagtaaaggttttttaaattaattacttaattcaataaatatcttagcacctaccaggaataaatagacggatggatgaatgaatggatgaaaggatggatataaaaaagaaaggaaggaaagaagaaagaaaggaagggaggaagggaggaagaaagaaaagaaggatggatgggtggataaataaaagaatgacaagagggatgggaggatgaatggatgggtagatagataatcagaagaatggatggatggatgatgtctctagccaagtagtaggaatgttacactaagttgaatttgtaaagcttaacttcatatatgctttatttttggcttggaacactctttgttccttcaactccttctaacatttgcatactcaatgccaacatcaattcctcgggaagcctaaattgtaatttggtaagatgcttttcacatgtgcttctacagcctgctctattcctgctgttgtagcatacatctcactggttcatagtggccagtacggacgacatgcctgtgttccttgccagattgtaaacatgcttgaaggtagagactatgtcttgtcaatcacagcattctcagtgcctagaataatgattagcacatcagaggtatgccactaatagttgtggaatgaatgcatgaacaaatgagaaagctcatgatgttgcttaaagctcattagagccacagacacaagggaaagagtctgggacacagaattaaaacatctggattcaattctcattttcacaatatttgtgtcatggtatctaagacaagactagttactaaaactttcctttttttgtattttgataaaattgacaattaacaatactaaaactttctaagcctgcttgcttacctatacaatggtatcttttccacagtgtttattaaaaccaaaccaatgaacaaagcactttgttatacatataggatattttcattattgctatattatgacctcaagcctttgagtcatgtcatttttcaagactgcatattggtctgtaatctttttctaattttcaactgttctgatgtttgacactccattaatacaattttgcctttctgcaagaacatctttgtcatcaaggccccactcagatatagtgaaataggaaatctgtattcccattgctgaagctcaggtaatatgcactgactcatgaagctgaaaggtccatgggagagagccatcttcagtttgagataagatacttattaaagtaaagatgacaatatccaggccaacaacatgcatatccagtgctaaggattcttgtatgtattaacaccatgtttcctaactgactggtaagattgaaatgttagtccttaaaaaggttaagagaccatcagggcctatatctcttcctgtcaattccagagcagagtttcattaataatatctgcaaggagccaaaggtcttaattattaaggagagtttttggctctggggtattacaactactccagatcctatggttgatttgcccataagcctaactatggtggatgctactctctgctctcgctcaccttgatgtattaattcccctgatctcctgacatcagactagggccaatgacaatgtcctggcttctctctctccttctccctcatttgctgctttgtttctctgcagagtctcacctggtcattgtgcgtcctgccttactctcatcttggagttttcagtgagtgggccccatggctatgtgcaatggtagtttgcacatcatgagccttagtcaggagaccctagtaaagaatccttgttagtccccgcagcctctgttttagttgtccttctatcactaaggtggttagttttgcccacctctcaattttaacaaagatctgtggctgagcccagtgcacacaatatgatgcctctggctccacccccagcagtcagccatcatccttctgttccttaagcacgctgcatagcaacctttttctgctcagccaaacctcacatgagctctggcctaccagggccttttctcacattatctttctagaactttagaatgactaattttgatttctcaaacccactttccatggtcttgttggattttaataggtatgtttgtggggtgacaatcacttatgtttttcctcatggttttgtcatgtctaaagataaatttattttacttaacaggtgaaagtgataaagtttctatattacttattaatctcttttaggaatgacagaaactgctaggtgttccctgatatctcatcttctcttcttttgtcagtaatagggtttctaagttttagctgagcaaatggctgcccagttaagaaccacatttcccagcctcccttgcagcaaggtgtagccataggaccaggttccagccaatgggaagtgagatgtgactgtgttccaggatgtgctcttaaaaagaatggctgtgcccacctctccctcatttcccccttgctggtggaatgtgggctcagaactggtaagccatcttcaaccatgcagaccagggcatcaagccatgagatagatgaagcctaggttcctaaaatcttcagggatttctcaagagattgagaaagaaacttctatcgtatttatgtgagcattgtgagtttgggcctttgatacaatgactgaattggtattccaataggccttttcatttgagaggactgcgccaatgtatctgtcttgaactgtttttataagaagtggctatttaaagtaggtatgtgcagatgtaaattttataaaactacaaccaaccattacccaatactcaaacaaagtattcatttttctaaaaagtactaaatcatgattaaacatgagagtttttaaaaaggtcatcaggatattcaaaaggtgtctaaatataaacccttaagttagtttttttttttcatggcctgtatatttgccaaagtattaaaacttatatttttgtggttttaatgttccaatgatcatgaagaattaacatgaaattgttctggtagaaagaaatgataggagtaggagtattaagaagcttaggaaaaggatgccagatcctctgccatcattaatttagagggtgtgagagagagcatccacagcttctacagtatgcttctgtgactggaaactagaataagtctctctttaagtacaacttgccccattaaggcttgaaaaaacaacaggtgtaatatttccatttgggggatgcaaatatgcaattaatgaatcttttttaaaacttaaagtagaaagctttacagttctgaggtaagattaatttaaagtcatggttaagggaagaggcagtgtggtgctacacaaggctcaaggctggagctgaggaccagctagagggtggttcttgctatatcatcaactcagcatgtggcccgagccatcatctcccttagacctcattttcttcacttgtaaaatgaagagatttgaataaaatttccctagtcattacaatctgtgaatctacagagaaataatgatgccagttaagtagctagccagagaaagttaaggcaggttaaccaactttatgaaaatatacagtagctagaatctaaatcccagtatcctacaatcaatagaagagatgagtagctagatagaaaagtgattcttgataactatgtttatgaaggtgggataaaaatcctcagaccttcaaatatttgtatgacaataacaatatcctttaaagactgagtttggagggatggcttccaccttcaaagagacatcacataatatgaagcttccacattaagaagtttccagggcacaactacaactttctagcaagattctatcatagtaaggtcctaatctaactaaccagaaaaaaaatgatgaagaaaagaggatgtttatctcatgaaagacaatcagggcttattgacaacagtctacagaacatgagctcagtcttgtattctctcacctcagtagcccacagtttcacttacctcagtcactcttaaatccagcacacatcattcccccaagctcctatctgtcacttagaacaatttttggatatctcctaggaacactgacacatgtcccaaactgaagagtgagaccaccctactccactgcttctgcaggtttccttctccagtgatgggttcacgctgccctccatcacacagaccagaaacccaggagccatccctggctccatcttctcccagatccttataaattcctcttgattttaccccctaaatagctctcaatttcatcctttctttccatctccatgatcaccaccttagcccaacttaccatcatctgatttccccacatcctctcatgcccttcaccttccccaatccagagtgatcctttaaattgaatatctcatcacgttaatcccaagcttaaaagctttccacagctgttctggtaatggagtacaggttcttaacatggtctacaaggacctgcatgatctggcttctgcttccttcaccagttttgtcttccaccattctgccctgcttctctctgttccagtcctgaactcctattttagtcattcaaaatgctgtcagccgctgctacagtgccttcatttatgttgttctctctacacagaatgccccacctcttcctgtcccttccttcacctacttttttttttttttaacaactgctctgctcaaatgtcacatcctcagggattactgccctgacctgcaaactatgtcaacctacccattatacactttaatagaaccctatgtgaatgcagtggacacgatgaagaggacattgtttggctctaggagaatctaccagacctgctcatctgcaggggactctgggcaaattatgttgactgacagctgaacaagaaccatggggtagagtatgctgtttaagtcagggtcccagcaagcaacacatggtacactcaaattaggataacttgagaagagtttaataaaggaacaatttagaaaggtgtgagaagcttatagggaaactacaagggatgataccgtactctgggggcagaaataatagggaccataccctactaagcctgaaaaggcaaagaatagaattgctagtagaaccaggattcagaaaagcctaaagtgatgagggctccttgacatgagctgggaccttcagtcaagggaccagtttcagtgaacccacaaggacgaagtcgggagagtaatacttttcatcattgtcctcccttcctctgatcgactgccatgattccctactagccaaactcaactggaagccagaaggcttgagagcccatagtgtagaccatataggtcatggcagagcagcaagaagggtggcaagtggctctggaggtaaaaaggagggtattcttatttgtatttatctctactcatctttacacaaaaatcttgaggctgtttgcttgaaacaaaataagtaatacaaagaaacaaccaggaagagtctacaaatgccctaccacaagggttaacagaggtgcagtttgactccactgcaagcatgacactggactataagtaaatccataggtacagaaagtagaagtacaattagtagttaccagggttgctggggagggaaaaatgactgcttaatggatacaaggtttccttttgggatgataaaaatgtgctggagttagacagagggaatatttgcacaactctgtgaatgtactaagtgccactgaattgtatctttaaaatgattaattgtatgttatgtgaattttgctccaataaaaagaatgactcaatttcccagcaacctgaataataaaggaaacataatcaattatgcagttctcactattggaaaggagaaagtctactagtctctatggtggaaataaagatgattctagcagagagctctaaaagatatccctctcatgggcttttatatacagatggtggtaaatgatataatggataatgccctcaacacattttatgataggatgcagaggtagtttccaacatctgttccctgatcaaggttgagatataagattaaaaagcaaatcaatgatggtgtctctagaatgggacgagataatgtattggtcaacatgatctaaaggtggatcccagggtcaacagactgaatatctcttgggatctttgttagatgtcaatcttttctctcacttaggttttgaaaagaagctggatattagacaattcaaggaagtcccctgtgataaggcactcttatgctggcattttacataagtgactaggaccagatccatatgctttgggcatcagatgaatcagcagcagcattaatgtactatcaggaggctggggaagcctaattatattcttgctaggatagaagtctgtccacctcatagtcccatggaagtggactttctaagttgtcatccattcaacaacatgaacttaaaaactatatttactaactgccaactatatgccatgcacattgaaaggtagtggggattcaaagatggacatttactattccttctttccttctagtaaccccttgggatcccatgccaagaaggtggggagtagtgctgaactccttgattccactaaagaaatatattctattgaatctcatgaagtttctagttacttttttctttttaacatactgtttgcaactcctctcttcctgcccaatgaaatctttaatatagtatggtcaaaatgcttacaaaaatattgagttatctggtggctggcaagatggtcaaataggaacagctccagtctgcagctcgcagcaagatcaacacagaaggcgggtgatttctgcatttccatctgaggtacatggcttatctcactgggactggttagacagtgggtgcagcccatgaagggcaagccgaagcagggtggggcgttgcctcacccaggaagcacaaggggttggggaactccctccccttgccaagggaagccatgagggactgtgctgtgaggaatggtgcacactagcccagatactacgcttttcccatggtcttcataacctgcagacaaggagatgctctctggtgcctaggccaccatggccctgggtttcaagcacaaaactgggcggccacttggacagacactgagctagctacagaagtttttttttcataccccagtggtgcctggaatgccagtgagagagaaccattcactcccctggaaaggaggcaggaaccagggagccaagtggtctagctcagcagaccccagccccatggagcccagcaagctaagatccactggcttgaaattctcactgccagcatagcagtctagagtcgacttgggatgctgaagtttggtggggggaggggcgtccctcaatactggggcttgagtaggcagttttcccctcacagtgtaaacaaagccactgggaggtttgaactgggcagaggccactgcagctcggcaaagctgctgtggccagactgcctctctagattcctcctctctgggcagggcatctctgaaagaaaggcaccagccccagtcaggagcttagagataaaactcccatctccctaggacagagcacctgggggaaggggcagctatgggtgcagtttcagcagacttaaatgttcctgcctgctggctctgaagagagcagcagatctcccagcacagtgcttcagctctgctaagggacagactgcctcctcaaatgggtcccttgaggggacagtgcttcctgactgggagacaactcccagcaggggtcgacagacacctcttacaggagagctccagctggcatcgggtgggtgcccctctgggacgaagcttccaaaggaaggaacaggcagcaatctttgctgtcccacagcttccactggtgatatccaggcaaagagggtctgcagtggacatccagcaaactctagcagacctgcagcagaggggcctggctgttagaaggaaaactaacaaacagaaaggaatagcatcaacatcaatgaaaggacgtccacaaagaaactccaaccgaaggtcaccaacatcaaagaccaaaggtagataaatccatgaagatgaagaaaaaccagtgcaaaaagcctaaaaattcaaaaaccggaatgtctcttctcctccagaggatcacagctcctcgccagcaagggaacaaaactgtacagagaatgagtttgatgaactgacagaagtaggcttcagaagatgggtaataacaaactcctctgagctaaaggagcatgttctaacccaatgcaaggaagctaagaaccttgaaaaaaggttagatgaattactaactagaataaccagtttagagaagaacataaatgacctgttgcagctgaaaaacagcttgagaactttgtgaagcatacggaagtatcaatagccaaactgatcaagcagaagaaaggatatcagagattgaagatcagcttaatgaaataaagtgtgaagacaagattagaggaaaaataataaggaacaaacaaagcctccaagaaatatgggactatgtgaaaagaccaaacctacatttgattggtgtacctgaaagtgacagagagaatggaactgagctggaaaacactcttcaggatattatccagtagaacttacccaacctagcaaggcaggccaacattcaaattcaggaaacacagagaatgccccaaagataccccttgagaagagcaactccaagacacataattgtcagattcaccagagttgaaatgaaggaaaaaatgttaagggcagccagagagaaaggtcgggttacccacaaagggaagcccatcagattaacagctgatctcttggcagaagctctacaagccagaagagagtgggggccaatattcaacattcttaaagaaaagaattttcaacccagaatttcatatccagtcaaactaagcttcataagtgaaggagaaataaaatactttacagacaagcaaatgctgagagactttgtcaccaccaggcctgccctacaagagctcctgaaggaatcactaaacatggaaaggaacaaccggtcccagccactgcaaaaacatgccaaattgtaaagactatcgatgctaggaagaaattgcatcaactaacaagcaaaatgaccagctaacatcataatgacaggaccaaattcacacataacaatattaaccttaaatgtaaatgggctaaatgctccaattaaaagacacagactggcaaattggataaagagtcaagacccatcagtgtgctgtattcaggaaacccatctcatgtgcagagacacacataggatcaaaataaagggatggaggaagatctaccaagcaaatggaaaacaaaaaaaggcaggggttgcaatcctagtctctgataaaacagactttaaactaacaaagatcaaaggagacaaagaaggccattacataatggtaaagggataaattcaacaagaagagctaactatcctaaatatatatgcacccaatacaggagcacctagattcatacagcaagtccttagagacctacaaagagacttagactcccacacaataatagtgggagactttaacaccgcactgtcaacattagacagatcaatgagacagaaagttaacaaggatatccaggaattgaattcagctctgcaccaagcagacctaacagacatctacagaactccccacccaaatcaacagaatatacattcttctcagcaccacactgcacctattccaaaattcaccacatagttggaagtaaagcactcctcagcaaatgtaaaaggacagaaattataacaaactgtctctcagaccacagtgcaatcaaaatagaactcaggattaagaaactcactcaaaaccactcaactacatggaaactgaacaacttgctcctgaatgactactgggtacataatgaaatgaaggcaaaaataaagatgttctttgaaaccaatgagaacaaagacacaacataccagaatctctgggatgcatttaaagcagtgtgtagagggaaatttataacactaaatgcccacaagagaaagcaggaaagatctaaaattgataccctaaatgtgatctaaaatgacacgctaaaatgtgatctaaaaaagatcacaattaaaagaactagagaagcaagagcaaacacattcaaaagctagcagaaggcaagaaataactaagatcagaggagaactgaaggggatagagacacaaaaaacccttcaaaaaatcaatgaatccaggatctggttttttgaaaagatcaacaaaactgatagactgctagcaagactaataaagaaaagagggaagaatcaaatagatgcaataaaaaatgataaaggggatatcaccaccgatcccacagaaatacaaagtaccatcagagaatactataaacacctctatgcaaataaactagaaaatctagaagaaatccataaattcctggacacatacaccctcccaagactaaaccaggaagaagttgaatctcttaacagaccaataacaggctctgaaattgaagcaataattaatagcttaccaaccaaaaagagtccaggatcagatggattcacagccgaattctaccagaggtacaaggaggagctggtaccattccttctgaaactattctaatcaatagaaaaagagggaatcctccctaactcattttatgctcactttatgaggttagcatcatcctgataccaaagcctgacagagacacaacaaaaaaagagaattttagaccaatatccctgatgaacatcgatgccaaaatcctcaataaaatactggcaaactgaagccagcagcacatcaaaaggcttatccaccatgatcaagtgggcttcatccctgggatgcaagcctggttcaacatacgcaaatcaataaacgtaatccagcatataaacagaaccaaagacaaaaactacatgattatctcaatagctgcagaaaaggcctttgacaatattcaacagcccttcatgctaaaaactctcaacaaattaggtattgatgggacgtatctaaaaataataagaactatttatgataaacccacagccaatatcatactgaatgggcaaaaactggaagcattccctttgaaaaccggcacaagacagggatgccctctctcaccactcctattcaacatagtgttggaagttctagccagggcaatcagacaggagaaataaataaagggtattcaattaggaaaagaggaagtcaaattgtccctgtttgcagatgacatgattgtatatttagaaaaccccatcgtctcagcccaaaatctccttaagctgataagcaacttcagcaaagtctcaggatacaaaatcaatgtgcaaaaatcacaagcattcctctacaccaataacagacaaacagagagccaaatcatgagtgaactcccattcacaattgcttcaaagagaataaaatacctaggaatccaacttacaagggatatgaaggacctcttcaaggagaactacaaaccactgctcaatgaaataaaagaggatacaaacaaatggaagaacattccatgctcatagataggaagaatcaataccgtgaaaatggccatactgccccaggtaatttatagattcaatgccatccccatcaagctaccaatgactttcttcacagaattggaaaaaactagtttaaagttcatatggaaccaaaaaagagcctgcattgccaagtcaatcctaagccaaaagaacaaagctggaggcatcacgctatctgacttcaaactatactacaaggttacagtaaccaaaacagcatggtactggtaccaaaacagagatataggctaatggaacagaatagagccctcagaaataataccacacatctacaaccatctgatctttgacaaacctgactaaaacaagaaatggggaaaggattccctatttaacaaatggtgctgggaaactggctagccataggtagaaagctgaaactggatcccttccttacaccttatacaaaaattaattcaagatggattaaagacttaaatgttagacctaaaaccataaaaaccctagaagaaaacctaggcaataccattcaagacatagggatgggcaaggacttcatgtctaaaacaccaaaagcaatggcaacaaaagccaaaattgacaaatgggatctaatttaactaaagagcttctgtgcagcaaaagaaactaccgtcagagtgaaaaggcaacctacagaataggagaaaatttttgcaatctacccatctgacaaagggctaatatcctaatctacaaagaactcaaacaaatttacaagaaaaagacaaacaaccccatcaaaaagtgggctaaggatatgaacagacacttctcaaaagaagacatttatgcagccaacagacacatgaaaaaatgctcatcatcactggccatcagagaaatgcaattcaaaaccacaatgagatatcatctcacacaagttagaatggcaatcattaaaaagtcaggaaacaacaggtgctggagaggatgtggagaaataggaacacttttacactgttggtgggactgtaaactagttcaaccattgtggaagacagtgtggcgattcctcagggatctcgaactagaaataccatttgacccagccatcccattactggatatatacccaaaggattataaatcatgctgctgtaaagacacatgcacacgtatgtttattgcggcagtactcacaatagcaaagacttggaaccaacccaaatgtccaacaatgatagactggattaagaaaatgtggcacatatacaccatggaatactatgcagccataaaaaaaagatgagttcatgtcctttgtagggacatggatgaagctggaaaccatcattctcagcaaactatcacaaggacaaaaaaccaaacactgcatgttctcactcataggtgggaactgaacaatgagaacacttggacacaggaaggggaacatcacaccctggtgcctgttatggggtgcagcaatgggggagggatagcattaggaaatatacctagtgtaaatgacgagttaatgggtgcagcacaccaacatggcacaaatatacatatgtaacaaacctgcacgttgtgcacatgtaccctagaacctaaagtataataaaaaatatatattaaaaaaagaaaaagaaaaaaaagagaaagaaactgtagccctaaaatgtgagagataaaacagaaaaaaaaatcaatgaatccaggagctggttttttgtaaagattaacaaaatagatagaccactagccagactaataaggaagaaaagagaaaagaatcaaatagacacaataaaaaatgataaaggggatatcaccactgatcccacagaaatacaaaataccatcagagaatactataaatacctctatacaaataaactagaaaatctagaagaaatggataaattcctggacatatataccctcccaagactaaaccaggaagaagttgagtccctgaataggccaataacaagttctgaaattgaggcagtaattaatagtctaccaaccaaaaaaaagcccaggactggacagattcacagccgaattctattacaggtacaaagaggagctggtaccattccttctgaaactattccaaacagtaggaaaagagggactcctccctaactcattttatgaggccagcatcatcctgataccaaagcctggcagagacacaacaaaaaaagaaaatttcagtccagtatccctgatgaacatcaatatgaaaatcctcaataaaactctgacaaacttaatacagcagcacatcaaaagcttatccacaatgatcaagtaggcttcatccctggaatgcaaggctggttcagcatatgcaaatcaataaatgtaatccatcacataaacagaaccaatgacaaaaaccacatgattatctcaatagatgtagaaaaggccttcaataaaattcaacaccccttcatgctaaaaactctcaataaactaggtattgatggaacgtatctcaaaataataagagctatttatgacaaacccacagccaatattatactgaatgggcaaaaattggaagcattctctttgaaaaccagcacaagacaaggatgccctctctcaccactcctattcaacatagtattggaagttctggccagggcaatcaggaagagaaagaaataacgggtattcaagtaggaagagaggaagtcaaattgtgtctgtttgcagatgacatcattgtatatttagaaaacctcatcatgtcagccccaaatctttttaaggtgataagcaacttcagcaaagtcttaggatacaaaatcaatgtgcaaaaataacaagcattcctatacaccaataatagaaagccaaatcatgagtgaactctcattcacaactgctacaaagtgaataaaatacataggaatacaacttacaagggatgagaaggacctcttcaaggagaactacaaaccactgctcaagaaaataagagagtacaaaaacaaatggaaaaacattccattctcatggataggaagaatcaatattgtgaaaatggccatactacctaaagttatttataggttcagtgctatcctcatcaagctaccactgactttcttcacagaattaaaaaaaactagtttaaatttcatatggaaacaaaaaagagcccatatagccaagacaatcctaagcaaaaagaacaaagctggaggcatcatgctatctgacttcaaactatactacaaggctacagtaaccaaaacagcatggtactggtatcaaaacagagatatagaccaatggaacagaacagaggcctcagaaataataccacacatctacaaccatctgatctttgaaaaacctgacaaaaacaagcaatggggaaagtattccctatttaataaacagtattgggaaaactggctagccatacacagaaaactgaaactggacccctttcttacacctatacaaaaattaactcaagatggattgaagacttaaatgtaagacctaaaattatcaaaactctagaagaaaacctaggcaatattattcaggacagaggcataggcaaagacttcatgactaaaataccaaaagcaatggcaacaaaagccaaaattaacaaatgggatgcaatggcaacaaaagccaaaactaacaaatgggatctaattaaactaaagagcttctgtgcagcaaaagaaactatcatcagagtgaagaggcaacctacagaatgggagaaaatttttgcaatcaatccatctgacaaagggctaatatctagaatctacaaaaaaaaaaaaacaaattcacaagaaaaaaaaagcaaccccatcaaaaagtgggcaaaggatatgaacagacacttctcaaaagaagacatttatgtggccaacaaacatctgaaaaaaagctcatcatcactggtcattagagaaatgcaaatcaaatccacaatgagataccatctcatgccagttagaatggtgatcattaaaaagttaggaaacaacagatgctggagaggatgtggagaaacagagatgcttttacactgttggtggaagtgtaaattagttcaaccattgtggaagtcagtgtggcaattcctcaaggatcttgaaccaaaaatatcatttgacccagcaatcccattactgggtatatacccaaaggattataaatcattctactatagagacatatgtacacgtatgtttcttgcagcactgttcacaatagcaaagacttggaaccaacccaaatgcccatcaatgatagactggataaagaaaatgtggcgcatatataccatggaatactatgcagtcataaaaaaggatgagttcatgtcctttgcagggacatggatgaagctggaaatcttcattctcatcaaactaacacaggaacaggaaaccaaacaccgcacgttctcactcataagtgggaattgaacaatgagaacacatggacacagggaggggaacatcacacatctgggcctgtcggggggtgggaggctaggggagggatagcattaggagaagtacctaatgtagaagacaggttgatgggtgcagcagaccaccatggcatgtgtatacctatgtaacaaacctgtatgttctgcacatgtatcccagaacttaaagtataataagaataataaatattgagttatctaatatgatatgatttccaggtttccagaaaaattactcaagcatgtcaaaagatccacagaaggtgcctgatgctccctgtccataagggctatagaaagcaattattgttaccaaataactacaacaataactgtcaagggaatggcagtgtcagtgagacttctaggcatctgaggatgctgagcctgatgagctgacatggctgggatgagcttattagatgagatagaatttgattggaatgtttctcatttgactttattttaatgagctctaggagaacaacaaaactattttagcaactactgttttccagcattatccatgtggcagtcactttctgcatcacagaagggaatctacgaatgttaatgtttaattgatcattagccttttctggcaattgttttccataataaatgtttccccacaacaacatcaaagcagctcatactgccttgtggtattaagcctgtttccctagctgccacccaattccattcacagagggatttatgaaaagtaggattccaaaagccctggctttattccaagatgtctaataagatgcataggaaaataaaggcagggagacaggctggataaatggggcactcttatttaagaaagtgcaagagaaaaattggagtgtgtcaaaatgagaaaaatagaggaaaaatcaggaagaaataatcaagagcccatccctagacagaagattagtttatcctgctgaaatgaagcatggttgagaaaaatggatgatacagatataaattattcatggttaaagacatctcagtcattaagatatttacaccatgagtgaagcccatgcatgctgggttgatttatgggctacataattacagaagatacgctgatgactgtttgcatgggaaacactctggatttttattttgttaatcagttttcccacttctgagtcctgcattgcaatcacagtgcaaggcttgattagaacctcccgggggtagtggaaaggctgtgcatggtaatatcaactttgcctgccttacattcctttagataagaaagtaccttttgggagcctttcaacttgctcgttagttaacagtatttttattaatagtacctattcatataatgctattaataatttcaacccttttcagataaaccaaaccccaatacatttttttaaatattttttaaattgctgatttattttttttctattgaaataaagtgcttgggaaagactcacctaaaagtgcaccttccaatgttcaaataagcttcgtcttaaatcctaacttttccccagggagttaaaggagacacagcatgaatatttattgtattgcaagaagagtacaaagcaagtgaaactcgataatacttcccatgctaacttgagtttggataaagcatgtttaattattgactcccactctctgcagcaggctcaccctggtaattgcattaattttggaataacttgaccccttattttacatgacagatttttttggtaccctgcttattaggtaatagtattttaaaaactttttatggaagtatatcaacatgcagagaatgcataaatcacaagtttacaatttgatacattttcataaactgaatatatctgtgtaaccacaccaagacccagaaatagaacattaccagcatcaaataatccccctactcctttacattgctcaccatccaaaaagtaaccattatcctaacttctttttttttttttgagacggagtctcgctctgtcgcccaggctggagtgcagtggcgggatctcggctcactgcaagctccgcctcccgggttcacgccattctcctgcctcagcctcccaagtagctgggactacaggcgcccgccactacgcccggctaattttttgtatttttagtagagacggggtttcaccgttttagccgggatggtctcgatctcctgacctcgtgatccgcccgcctcggcctcccaaagtgctaggattacaggcgtgagccactgcgcccggcccattatcctaacttctaacaggataagttagctttgcttactgttttcctttttagaaatactatttatactcttctttggcttcttttgcacaatattaggattgtaagagtcatgcatattgttaggggtaatttattataattgctatattgtatttcatgaggtgacccatgctataattcatccattctacctaagtttttctgggttttggctattacaaatatttctgctatgctctgcacaatggccaagatgtgaaatcaacctaagtgtctattgatgataggtgaatggataaagaaaatgtacacaatggaatattattcaaccatgaaaaagaatgaaatcctgtcatttgtagcaacatggatgggtctggatgacactatgttaagtgaagtatgccacgcacagaaagacaaatactggatgttctcatttatatgtgggagctaaaaaagttgatctcgtggaggtagagagtagaatggtggttaccagaggttggaaaggagaaggggcgggggtgtgaaaagaggttgcttagtgggtataaaacacatttagatggagggaataagttctagtgtttgatagcacaatagggtgactatagttaccaacactttattgtctatttcaaaagagccagaagagaagatttggaatgttctcaactcaaagaaattataaatgtttgaggtgatggatagatatccctattactctgagttgatcattatacactctatgtaggtatcaaaatatcacgtgtaccctataactatgtactattattatcagtaaaaaatattgctgctatgaacattctagttgtctttggtgagaatgggtatgcatttctgtaggaaccataactaggtttggaattgttgggtcacagggtatgcgtatgctcagcttcagcagatactgtcaaagaggttttctaaagagttttatgaatttgctgtcccaccagaagggaatgagaattccagttgctctatatgtttaccacctcttgttgtggtcagtcttttccactgtagccattcagttgagtgtgtagtggtatcacactgtgttttcaatttgcatttccctgatgactaacgtagtagagcaatttttcatacagttattggccatttgaatattctcttttgtgacgtgtctgatcaggtattttccctgattttttattagttgtctggcttattgctttgtgaaaattaaatatatatatataatttaaaaaataattaaaatagttttaaaaactaaaaaataatttcaaaatatatattctagtatgagtcattgttggatatgtgatttgcaaatatactttcctccctctatgacttaccatttcaatgcttaaaggtgttttttgataaagagaagttctacattatttatattatggttatactttatatgttatgtttaagaaatctttgcttactataaagtcatcgtgatgctctcatatgcttttttttacaggtttcattgtttaattttatatttatatcagtaatcctctgaaattgattcctatgtgttgtgcccggtagagtcaagatatattttctccacatggatataattgatccattatcattttttgaaagggctactttttttctcattgcattacaatgtcacctgtgtcacaaatcaggtgaatatatgtacacagacagattaatatatatattcatatgtaccactcatgtatttatgaatatatacatatgtatatatgtgtgtgtgttttctggacactctgttctgtttgtcttttcttcgtgtgtcagtaccatattgtcttaattacttcagctttttaatagatcttaatatctagcagtatgggttctctccagttctttattgttctttaagactgccctgactttcttgaccccttttagtgtggttttactgtgtatttaattcagcaaaaagtaaagctcagtaactaaataagtgagagagtttaggcccttgccaagggaataataatatatgaaataatcatgttagaatttatgtgacagatttcagtattaaatttgatagactgacatggtttatatatatatatatatttaaaaatactctgtagaatactaataaaagtcttccaacttaaatttctagggtctcaatggtgtcccatgtagccaaagaatttttaaatttttaaggcaggtgatatggtttggctctgtgtccccacccaaatctcatcttgaattgtacttccataattcccacatgttgtgggaggaacctggtgggagataattgaatcatgggggcagtttcccccgtactattctcatggtaatgaataagtctcatgagatctgagggttttatcaggggtttccgcttttgtgtcttcctcattctctctttgcctgttgccatccacttaagatgggacttgctccttcttgccttccaccatgattgtaaggcttccccagctacatggaactgtaagtccagttaaacctctttcttttgtaaattgcccagtcttgggtgtgtcttcatcagcagtgtgaaaacaaactaattcagcagacaataagaaaaagcaggtctcaattttttttttttttttgagtgagggtctcactctgtcacccaggctatagtgcagtggtatgatcatagctcactgcagcctcgaactcctgggctcaagtgatcttcccacctcagcctaccgagtagctggtaccacaggtgtgtgccactgcacccaacgaatttttaattttttaatagaaacagggttttaccatgttgcccaggctggtctcaaactccagacctcaagtgatcctcccaactcagcctcccaaagtgctgggattacagatgtgagtcactatgcctggcacaaaatttcttaaaggtctttctgagctcagacatagtaactgggggcacactttgtacataccatcatggccctcattgcacaagctctggaagcctttacttccattgtcagtactaatgtgaagattttttaaaaaggggcatacaggtcatctacaaagaaacgcccatcagactaactgaaactctcagtggaaaccctacaagccagaagagattgggggccaatatttaacattcttaaagaaaataatttccaacccagaatttcatatctggccaaactaggcttcataagcaaaggagaaataaggtctttttcagacaagcaaatgctgagggaattcatcaccacctcaagcctgctttgcaagagctcctaaatatggaagcactaaatatggaaaggagaaactattaccagccactacaaaaacacactgaaatacacagaccagtgatactatgaagcaaccacataaacaagtctgcaaaataaccagctagcatcatgatgacaggatcaaattaacacataagaatacaaactttaaatgtaaacaggataatgccccaattaaaagacacagaatggcaagctgaataaagagccaaaacccattggtatgctctgttcaagagacccatctcatgtgcaaagacacacgtagactgaaaataaagggatggaggaaaagttaccaagcaaatagaaaacagaaaaaagcagggtttgcaatcctagcttttgacaaaacagactttaaaccaacaaagataaaaaagacaatgggattacataatggtaaagggttcaatccaacaagaagagctaactatcttaaatatatacgcacctaatacaagagcacccagattcataaagcaagttcttagaaatctacagagagacttagactcccacacagtaatagtgggagattttaacacccgacaggcaatattggacagatcattgagatagaaaattagtgaagatattcaggacttgaactcagctctggatcaagtggacctgatagatatctacagaactcttcacacaaaaacaacagaatatacattcttctcattgccacacaatacttactctaaaattgattacataattggaagtaaaacacttctcagcaaatggaaaataactgaaatcataacagtctctcagaccacagcacaatcaaattagaactcatattaagatattaactcaaaatcacacaactacttgaaaatttaacaacctgctcctgagtgacccttgggtatataatgaaattgaggcagaaataaaagagttctttgaaactggtgagaacaaagagacaatataccagaatttttgggatgcagctaaagtaatgttaagaagaaagtttatagtactaaatacccacatctaaaacctagcaagatctcaagttaacaacctaacatcacaactaaagaactagagaaccaagaacaaacaaactcaaaagctagcagaggacaagaaataaccaagatcagagctgaactgaaggagatagagatgtgaaaatcccttcaaaaaatcaacgaatctaggagctgcttttttgaaaaaattaataaaatagaccactagctagattaataaagaagaaaagagagaagaatcaagtaaacacaatcagaaatgataagggtgatatcaccactgacccccacagaaatacaaataactatcagagaatactataaacacctctatgcacacaaactagaaaatctagaagaaatgtataaattcctggatgcatacaccctactaagactgaaccaggaagaaattaattccctgaatagaccaataacaagttctgaaatttagtccgtaataaatagcctaccaaccaaaaaatatccaggaccagacagattcacagctgaattccaccagaggtacaaagaagagctggtaccatttttactgaaagtattcaaacaaattgaaaaggaggggctccttcctaactcattctatgagaccagcatcattctggtgccaaaacccggcagggatacaacaagaaaagaaaatttcaggccaatatccttgatgaacatcaatgcaaaaatcctcaataaaataagtaatggcaaaccaaatccagcagcacaccaaaaggcttatccaccatgatcaagttggcttcatccctgagatgcaaggttggtttaacatatgaaaatcaataaatgtgattcatcgcataagcagcactaaagacaaaaaccacataattatctcaacagatacagaaaaggccttcaacatctcttcatgctaaaaattctcaataaactaggtattgaaagaatatacatcaaaataataagagccatatatgacaaacccatggccaatatcatactgaatgggcaaaagctggaagcattcaccttaaaaactggcacaagacaaggatgccctctcttaccactcctattcaacatagtattggaagttctggccagggcaatcaggcaatagaaagaaataaagggtattcaaataggaagggagaagtcaaattatctttgtttgcagatgatatgatgctgcattgagaatactccatcatctcagcccaaaagcttcttaagcctgacaagcaacttcagcaaagtctcaggatacaaaaccaatgtgcaaaaattactaacattcctaacaccaacaacaaatctctctgatttggcaagtagagagccaaatcataaatgaactcccattcacaattgctacaaagaaaataaaatacctaggaatacagctaataagggaagtgaaggatctctttaaggagcattacaaaccaccatacaaggaaatcagagaggacataaacaaatgaaaaaacattccatgtccatggataggaagaatcaatattgtgaaaatggccatactgcccacagtacagtatagattcaatgttattcccattaaactaccatcgacatccttcacagaattagaaaagaaattttttaatctgtatggaaccaaaaaagagcctgtattgccaaaacaatcctaagctaaaagaacaaagctggaggcatcataccacccaagttcaaactatactacaaggttacagtaaccaaaacaacatggtactggtacaaaaacagacacatagaccaatgaaacatagtagagaacttagaaataagaccacacacctacaaccaactgattttcaacaaaccttacaaaaacaagcaatggggaaaggattccttatttaataagtggtgcttggagaactggctagccataggcagaaaattgaaactggactccttccttacaccttatacaaaaattaacttaagatgggttaaagacttaaatgttaaacccaaaactataaaaaccctaggagaacatctaggcaataccattcaggacataggcatgggcaaagatttcatgatgaaaatactaaaagcaaaaattgacaaatgagatctaattaaactaaagagcttctgcatagcaaaagaagctatcatcagagtgaaaagacaacctacaaaatgggagagaatttttgcaatttatacatctgacaaaggtctaatatccaaaatctacaaggaactaaaacaaatttataagaaaaaaacaatcccattaaaaagtgggcaaaggacatgaacagacatttctaaaagaagacattcatgcacacaacaaacatatgaaaaaaagctccacatcactgatcattagagaaatgcaaatcaaaacaacaatgagataccatctcacaccagtcagaatggcgattattaaaaagtcaagaaacaacagatgttggcaaggttgcgaagaaaaaggaatgcttttacactgttggtgggggtgtaaattagttcaaccattgtggaagacagtgtggcaattcctcaaagacctagaggcagaattaccatttgacccagcaatcccattactgtgtacatgtatacccaaaggaatatgaattattctattttaaaatacatgtatgtgtatgttcattgcagcactattcacaatagcagagatacggaatcaacccaaatgctcatcaatgatagactggataaagaaaatgtggtacacatataccacagaatactatgcagccatataaaataccagatcatgttctttgcagggacatggttggagttggaagccattatcctcagcacaacaacacaggaacagaataccaaatactgcatgtcctcatttataagtgggaactgaatgatgattacacatggacacatgaggaggaacaacacacactggggcctgtcagagtggtggggcttgggggaaagggagagcatcagaaagaatagcttatagatgctgggcttaatacctaggtgatgggttgatctgtgtagcaaaccaccatggcacacatttacctatgtaacaaatctgcacatcctacacatgcacccctgaacttaagagttgaagaaaaaaataagagcaaaaacaaagaaaaaagggggcataattctttgaggaccaatctttcaggaaactcaaagtttatcttcctcatttactttaaaaagtgtaaatagcaaaaccgatccagcatttaaagtgacaattaccaatggaaagatgaaaatacttgccaccaaggcaaaaaattatttgccctacctgttaaaatgatttagtatattacacatggtggctgcacaatcatcacattccctatcatcattctacagaaagtcggattcctcctcaatctaaaaatagtcggggctggataagtgattcacaggaaaaatggaatgaatctccatcaggctctgctgaggcagagaaactgtttaagtagcagccagtgtgtgccagcctgagaaagaattcctactactcatattcttaactttccaagactgggaaggaacagtcagtcaggaagagttaatggctcaacagcaacatgcaaatgctctggcatcttgtgctacagttggcttcatgtttcagttaaaaaaaaaaaaaagtatcctagttctttcagaaccagatgtgaaacgagacaaatgaataccaaccactcagatttcctaaaagccaatttacttggaagttgccaaaaatatactttgaaatatttaaagcatctacatttctgaccgacctccttggtttttataggaggtaaacataaaattaaaaaccaaatactactaaagtaccagtctaaagatgggactagattttttttaataaaaagaacaacaatttgatgattatgtatgaaaataaccaatgtcctgtcaaccgggaagcctgaccagggaatcaagagagccaaggcactgagaggcaccagctgagaccagcatgaccgctgtgtagaagtaataagcacacagtccaggatcttgaattcagtgagtccccaataaatgtgcatttattaatcataaaataaataaaatttccaatttccaattagaagaatttgatatagctagaatttgacctagctagaagggacagcaaataagttggatgtcagaatcaaggaatttagactggctaggccaggcatggtggcttacacctgtaatcccagcactttgggaggccaacgcgagtggatcacttgaggtcaggagttcaagaccagcctggccaacatggtgaaatcccatctctactaaaaatacaaaaattagccaggtatggtggcaggcatctgtaatcctagctactcaggagggtgaggcaggagaatcgcttgaactcggaaggcggaggttgcagtgaaccaagaccatgccactgcactccagcctgggtgacagagactctgtctcaaaacaaacaaacaaacaaaaaattaggtgggctagaatggtgggtgaatactttcaaattactgtttaatatgccttacatttttatagtgagtttacaaagtgcttacacatacatcatgccattttcttgctcacaaaacccctctgggatgggcctgggcattttaaatgctctgtaggtgattctgatgtttggtaagagttgggaactattgctttagactgtagcattgctcagcagtgagttttcttttattagggggttcaaattgagtttggtaaggagatcctgaaggcctcctagcattgtagagtggtccaagtaaatgatgctaatattcaattattgtgtgttaacaactttgcagatcaccatgtccatggaactgtatatgccttcaggagcatgttttgaaactcgtattttcaactgtgcagtgagataggtcttctatagacatctgtttttttgactaggttttagacagcaagggtatttgaaagtgataaatagcactttatgccactggaacatatactaccactaacagaaattgagggaactcctgaaatactgtaaaagaccaaggtagaaaactttcctaaagaaagagccaaatagttctgtggataacttgatctatggaatccaattacatgcagagcacattctgcccatgtccatagaattaaggaaggtgagagacttagctaaagggcaagagttaacagattgtttcattttcaaactttcattatggaaacttgattttaatgatggcactgcaggatcactcatgatacctttattatgttaagaagtgaacacagactctaaattgggagtaaacctgtgttccttttcctgggctgcttattcctctcctctctcctgaggaaagctggattctaacacttcattatgaaaaatctgggctgcaggtgtagtgcccaggaatctgtaaagatgcctctgggtatatgtaaaaaaagaggcaggaggattccaggaaaagtatgcctcactcccttaggctgagtagctttaccataacttgaatcaataaaaatacctgaatgattaaacaagagtagataattaattcattgtctcactttcttccttcttactcagaactctcttaggtgcttaacattaaatatttgatgttctgggattttcctttgggtaaggctcaataatgtacttaaatgtacttaaacctaaaactattatattttaaataataagattctacttttatttttaaacactctgttaagacttttatttttgtaagaatattaactgagtcttaaactttgaattcaaaaatcttacatttagaatatataaagtcacattccaatatttgttctgccttcaaaacttttacctatacttaaaacattgtttcatacatctgctatagtttctttcaatcttctgtgagtataatgtcagatttgtgaggttcatctgggtttaatcctaggtttaacactacatggtctgtgtgaatttgaataaattaatttcttcaagacacagttacttcatctgttaaaaataaggatattaggccaggcacagtggctcatgcctataatcccagcactttgggaggctgaggtgggagggttgcttgaagccaggagtttgagaccagcctgggtaacaaagtgagagtctgtctctaaaaaaacaaattaaaaaaaaaaggtagtgaggtatggtggcacatgcctgtgttcccagctacttgggaggctgaagtaggaggatcgcttgagcccaagagtttgaggctgcaatgagctatgattgcaccactgcactccagccagggtgacagagcaggaaggaaagaagcatctcagaaacaaagaaagcaaaaaagagagaagctcttttaagacagagcatctcaaaaaagaagaaataaaaagaattataatgtatgtgtcctagggttgctataactattagagttaatacaatgtgtaaggtaccttgtacgatgcttgtcgatacaaactgcataaattaatgttagttttcttctctacttcttcctgggttaatcccagggaataaataaggatgccatctatgatgcttaattagttttccagttgatgtgaaaaattactttctttacttggccagagaaagctagagaaaaggctcttaagccaaaaaattaaattacctattcatatgtccccagaacttttaagttaatgttgcttctattacgatgcagtgaagttgttcctaaaagaaagttatgagagaaagagaagggcgagcaggagggagccagacagctttctagtgtatcatcagttagatttgcatgtgccgttccacttaattagctttgagtgttgtgaattatttcaatattaccctatctgcaattttagattatctacactgttatggattgagttttataatctataactaatgaattcatatcttgggcaagatattaaaaaaatctacatgtggagcatgtagactgtacaaattacaaaaatgaaacttttttttcccacaggtggcatagttaatattcctgccaaatagtaccttcagcgtgactgaccaaactaaaatttacgtgagccccccacccccgtgccctcccaagtgtgagaattctgcgggaaaggctgccaagctcctgctctaattttgtttggagagttaaatgtaagggaagcagattccacaaggcgaatgtaccactcagcacgaaatcgacttttaaggaactcaacagatgcactggagttaaggaaatcccttctgagaagtcagaggtcccagagttacacaaagccgttcccggcagcgcgaaacatttcagatgtggtgcagtgaaagcaaaggagtcctcggcggcaggtgagcaatggtgatgaaccgaagcgcgccaggagaaggccggcgggatttcatatgagtgcagctgaaatatgacttcagtacttgaaccaattcttgtgagttaatgataaccactcctttccactctctgaaagagtgtgtgtggctcagtacctttctttttctaacctcttgagggccacaagcttaaatgtgccagaaggaaagtctccagtgagctggaaatgtagtctcgatacttagcttgttcaaatatatgatgtttatctgaagccacacctgaacgtgtctaagagcatctccttttaccagtacctgcaaggttcaggctctgtggaagataggggatatggcaggagctggaccacgaatatggataccaagatttacattccttaaaagacccacagaacacccagctttcgatgagccaagttaccacagcggggcacctttcaaaagctatataactagggacttctaccatgtagactcatatttgctattttgctccaacaagcgttatctaaaataggagggctgaacacaaggtcatacaggccactttgtagactgaccccagtgcttcccaatattcaaagaactggagagaaatgatttgtcactgtgtactactgtaccttctctgggggatgtctcttacagcccttcaaagtctgaatctccagactaatatttactgttagactctggagctatagtgctcctgaatcactagaaattgctaatgaaaatttgggtaggaagtcatctcttggtatgggccaatgaatggcctgaaacccttccacgtggtgctctgagattcaggcatcctgatgcttttatctgcagctggaggaaatgcttctgtaaggaaagggaagaaaagggaaagaagggcaataaggggagggaagagaagggaaaagaaaagaaagagagaggataggagaggaagagaggaaaggagaaggaacaaaagaaaaaaggaaggaaagagaggatgaataagaatacaaattgcttacttaagctgttactgcatcttttactactacctttggagttcttcagggaagagtaaatgtgcactctcaatttagatgaaacactgcttttaagctgtctgcatttcattcagataacaagtatttaacacttttttggtgtgtcaggtacacactatgcatgtagtggcaaaaatgcatacataatgtccctgtttccccgtccctgcccttctggtacttattgtctaatgaaagagaccaacagcttagcttaccaacaaattaccattataattgtgataattactatgaaggaaaagtaagggctccctgggggagtaaaacagggagacctaatctagataggatgttatggaagtttgttttgtctgagtaacagacatttaggctgagtctttaaagaacattgcaaaatagctggtaaagaatgtgtggagggattggagaatcacttcttaggcagagggaacagaacttggaaagtccctgaggacatgaacccggcattggggaggagcttaaaacaagagcattgggaatcaaagggaagagagcaactgggaaagttgaacactgagataggggtggcaattctgggtaaagggcatgtaggatttggaggcaaggcacagatttagtggaatggcattgaatggaagtgatgtgaagagcagaggtagacacgagctgggaggtgactacagttccttgggagagagatggcagcatctgtgagtgagaggcacggacaagtgtgtggacagcaaaaatggagaggagcaggctgactggagagagtcagggaactgtgtacgtcaggcctctgagcccaagccaagccatcgcatcccctgtgacttgcacgtatacgcccagatggcctgaagtaactgaagaatcacaaaagaagtgaatatgccctgccctaccttaactgatgacattccaccacaaaagaagtgtaaatggccggtccttgccttaactgatgacattaccttgtgaaagtccttttcctggctcatcctggctcaaaaagcacccccactgggcaccttgcgacccccactcctgcccgccagagaacaaaccctctttgactgtaattttcatttacctacccaaatcctataaaactgccccacccttatctcccttcgctgactcccttttcggactcagcccgcctgcacccaggtgaaataaacagccatgttgctcacacaaagcctgtttggtggtctcttcacacagacgcgcatgaaagtgtaaggcttgggtgtcagtggagtgggacaaataaaagatggtccaggcttttggcttgagaattgctcaagtggaggcactcatgcctgagatggggaagatgggagaggaacaggctaaggggagaagtactaaacagttaattttaagaattatcatataaacgttgtgttaaagctgctctggttaaattgctgttaagcaagggttctgaaatcaggcataacagtttgaattctggctctcttattttctacctgggcaagttattttatttcctctgatttctcaaatagggattcttaagtctatctcttaaggtaaaaatgcaatgtaataatgtttataaaataccttgaacatcataggaacttagtaaataaaaattactattactataatggcaatgtattatgttagagaaaagactcagttttgactttgacacttataaactgtcatacaggcaaaaaaaaaatgtatttgagatttcttatctttaaaaccagccaaattaccctcttttcctacgtcatgaagaatataaaaatgataattacaactctaacattttttatttagtcttgaacctataccattgataagtgataagaggccttggagtgaaatagtctttgtactacaaggaggagaagattataaatatttatagcctgtgaccacaggagctctgtgaaaaacagtactgtaaagagaatagtgcattgggggaaaggtattatttaaggtcagtctcatgatcactgagaaggagcaaaaagatccctaggacatccaaatgtcaactacaaagttcttacataatattttggaaatgtagccttcaacattaagtgtatggtgaccatgaagcctattatgctctgtatcttttgtttagaaaatgggatttattgtcctcttaagttgcaaatgaattcactagccttgtgtgaactgacctatcactgtggaagtcatgtggattcttccattcatcaaaaagtgacagactcccatgtcatcacagccctttcagtctttttctcaaaaaacaagaggtagcctgcttaccttaaataggttatcatgaggataaaatatgatgaagattataaaagtgcatattaaaccaaaagtactctaaatataagaaattattttggatattattacatttgggagaaaggctcaaaatcaaatactcttcatttatttgttcatttatttgcttcatcaaccaataaacaaataatatcttttatgtacagggcacaacagaggatacaatatgggtagaaatagcttctgttgtcaaggagtttataatgcttaggaggagagacagtcacacacacagataactatagtactacactgaatggggcagagactataggaagcatctaaaaaaagataagatggtatgggagttattagaatagaggtatttcctttagctgggtttaccaggataactctaagaacaggctgggtacaatggctcatgcctgtaataccagcacttttgggaggtcaaggcgagaagatcacttgagcccaggagttcaagatcagcctgggcaacacagggagaccctgtctctacaaaaaaataaaaatacaaaattatccaggcatggttgtgcacgcctgtagtcccagctactcaggaggctgaggtgggaggatagcttgagcccagggggtcagggctgctgtgaacctaccacctcacaacagcctgggcgacagagccaagatcttatctcaaaaaacaaacaaaaaaccccaagaaacaggaacaattttgaaaggctgtaatagcagagtaagaaaattaatctcataacaacaacaataataaaacaacaataaaagcagatttcaaaattttctatatgtgccaaaaatgtgtcaagtgctttaaaggtattaacaactttgatcatcacaataaccataggaaggagctgctatgaccaatccccattgtacagacttagaacggtcacacatccagtaagttgcagagccaggaaacaaatctgagtccttttaatcacaatactctattgtctccagataggacgaaagtcatgaagaaacagaaaaacatagtaaaacctcggtgacaaatcattaggtgttcagtgtggctgaagcacaacaaaaaacaaatctagcagaggtaggtctgggaaaggctgggtagagtcttagtgttagactaaaaattgtggtctttattttataactaacagggagatgtctaaatagggacgatgggaattgtgagaacagatgtcaatgttatgagagagagtctttagagacagaaaaggtaaagaggttcagggaaaaatttcacagtgagtctcttgcattttacttgttcttaagtaaaataattcagtaggagaggtgatctgtgtaatagtcaatcattcaatgttccatgtgaatgactccattagatgctacagtgattttcagtgaggacaagtccaacctgtgatgcccccatagagatcaggtgaaagcttgctggcttttccatttcctattttactgctaccaatagaatgtcttcaggtagtaagaactaggtgttacagaaagaagacattgtatattggtgtgctctcaaaagaaattcacattaaaagtatgatctcaacctgcttctgagaatttgcagtagagaaactcttctttaatcttaaaagtaaaccagagggtccttaccaaaatgctctgacctcctgacctcaagacagtttcagggcagtttctatcacggttgtgaaacctgtgtcacacagaagagccaggagacaggggactcagtgggtgttactgtattgagcaactgtaccctcctgggtgatctcacaggtgtatctaggagtcattttcagtgtcaaagtcatagaaacaagtagtaaaatagtttatctccttgacagcatgactgttggagttaacctggtattttaacacccactggtataccagaaataattcttaaaaaaataattttattacataccaagtactgaagttaatactgttggacaaagatagcttaaacatggagaaaattacgtcacgcctggtggggaatattgtagtcttgtttcttttgaagctatatactattatataatggctaatggaaggtaaaaaagaagaatatttttttccccagtgaatgactggagctcattttattaagaggaatgtaaaattagtatacaatcacagagaaaagtaatcttaattagtacttaatagcactctataaaagatggcctcagactgaccttgtgatcaatagaagtgcttgcctgctactcttctcaaaaggaaaagccattcttgtctaactaatacatatacatgacctcaaagaaactcatcacacaaagagagatcgcctcccctgacagaattcagtcagtttttcctatttttaaaatatgctaaaattaaagggataattttctccctaaaagacatgtttcattttagaagtcccatatataatctgaaaaggagggaattttaaccaacttcccattaatttagtaaatatctcagaatgctaagatcaaaatcttcacagataatggcttcacagcagcatgttggctttacacctactgtgagaatgctgggaagtaatctttgaaaaatttgtaattgtcaatgggactactgggtttgatgtgattaacaagagaaatgatcaactttccttcttagatagtgattttagctataatcactttaaattggttaaactatttttatttatagcatttttgttttgtatttatggttacatcaatgaaaaaagcagtgatgataaattctgaaatattttaagagaatttatcaggtccagagacagaatagtggagctggaaggacctctgagatgatatagtctggtctccttatgttacgagttaggagtagtggcccaaagatttttaaaaaacccttctgattctatcacaatggatattacctaaaatataatcaatttggcccttagagaaaaatttataagttatttgtccatgttactcctactctgaatcaactactcatcaccatggtacctaatacaatgctaagcttctagaaggagctcctaaattatattctacagtattttgtattcttacatttgtgttactcaggaatttgaaagtggttatgaatacctctaatatcatttggatgtcatttccaaatctcatgttgaaatgtaattcccagtgctggaggtggggcctggtgggaggtgtttgggtcatgggggcagattcctcatggcttggtgctgtcctcactatagtgtgttctcataagatttggctgtttaaaattgtgtggtaccctctccttctctcactcttgcttatgctcttgtcctgtgatgtgcctgcttccacttcaccttctgccatgagtaaaagctcactgaggccttccaagatgccaagtatatgctgacaccatgcttgtacagcctgcagaactgtgggccaattaaaccactcttctttataaattacccagtctcaggtatttctttatagcaatgcaagaatggcctaacataatctacactaaaatcagactatccaaattacttcaaagacccagaaatgaacaattagcatattagaaattgttacatgaagttaggcatgagcagggcaggagagggctctgctccccacctacgaggaatgtcaggtgattatcaggtgatggtttggcagttatcacattgctgctctaaaaatgataattcagcagccagtgcaccagggagagataatctcctgacggtccacagctgtcacaatgaagtgttaactgaatgcagacaccagggagaggcaacttcccaaacagataaaaacacttaaaattggtaattggctttcaacagggtctcagaaattgggcgagtgaaccgggcacgtgcattaagagacaaaatggtggactatgacttttgggggcatcccaccagaaaagggaagaaaccttcagatgggcatgcatacaacttcctaaacacactgcacatgctcacttcccaagcataaggagggcacatgcaggcagcccaccctaagggagaaatcgtgggaaagaggtgcaagatgctgaaggtgggccagcatataaagccccagggtcaaggttaaatgcctgcttgggtctcttccaagtgtactttcctttctttcccgttctaaagctttctaaaataaacttccactcctgctccgaaagcttgccttgttctctttttctgccttatgcccctcagttgaattctttcttctgaggaggcaagaatcgaggttgctgcagacccatacggattcgccactggtaacctgaataccttctacccctaacagaatgagttgtcaggatacacatgtgccccctgagctgaaagaaacaatcagagtgtggtgaacaggaggctgcaggcctaagggagaaaagcttgggggagcctacagtggctatgaagagagagactgggactctgccagaaacttcccattcctcccaaatatctgttctgggaaatgtgaggttagaaagagaagactgttgaccacttgggacaggaacttttcatagggatctttttgagagtgtatacaagttaggctgtcttggagctaggctggctaaaacaaaaaggtcattgtgtagagcgggaatcacaaacccaagtgcctgagggacaggcatgatggtgacttgctataaggctgtactgtcagggaaatgatttggacaaactggtgagaacatccccatcaagaggggcagtctgagagtcaactcaagctaagggttacatgcaggaatgttggcccagtgatgtcgaattactaagagtaacccaatatttagatttattctaaatacaaagtctctctttttaggtgttgaaagcaaattccaacttctcaaaaacattgtgaaggctgaaaaatacatgttccacagccatgccctccagtttgttgcctcttgtagagggtgtaaaaaatggggattagttacagtgaaaagatgacaacaaactattctattattcagatttatcatatagaaagcctctgaaactgaattagatatggactggttctttggtctagtggcttgaatctcacttgggtctctaagtgggtgtgggatggtaataagatgcatttgtaatcatatgtacctgtagtgctcaggtagatggtgtaggtaatcacagtgctcttttcctttaaatttcaaaatccttcaagcctcaacaatcttcaaactgcaaaatccttctcaatgcagtatttcagatggccaccaccagttaatcagagatgacataaaaaatagaaaatcattgactccccctggcctagatgagcctcatatataatgtacatagttttgtgatactttatcatttatttgtccaagaatatccagagaaagataataaaacatgctgtagtcaaatatggagattagaaaaaatctcaaaagctacttattcatttgtttgaaaaatattattgagagtatcctttatgccaggcacattgctaggcattggagttgctctagctgataacctctaaacaattggttagacttccaactactggcatttcttttctagtcggttcctgtctctttgtcttgattttggtggacagtcccatgacaggcagaatttctgaatttatcccccaaagattccatgccctaagccacagattctgttaatatgatgatacaatatataactccaatgactatgttatgtcatttggcatcagggaccttaaaaggggagattatgtgggtggtcccaaggtcatcaaatgagtccttaaaagtagaggactttctccaactagtagtatgagaagaaggcagaggagaaagtcagagatatatgaaatacgaggactcaatgaaccgttgctgtcttgaagatggagggccatgtcagaagaaatgtgggtggtttctaggaacagcgaatgattccagagagcagacagcaaggaaatgaggaccttggactgactccaaggaattgattctgccaacaacctgcgttagcttggaagggattatttcccagaccttacagataagagcttagcctgctgtcatcctgacctaggccttgtgagatcctaagcaaaaaactcatccacgcctgcctggatttctaacttataaaactgtaaatcactaccctttgtggcattttgctacaatgtaatagaaaaataatacagtaatggtgggaggggttggtgtggggaacccaagagcaacatctatctaaatattagagaataattttatatattcttccaagcttctgtgtttaattctttaaaaaaattccaaaaagtaacccaaaagtttgttggaatgtatagcttatatgtaccaattttggcatttattttgcattcagtagccaggatgagtttgtaacacataactgaaaaaaggcttgtatacacaatatataaggaaatcatataaaccaataagaagaatagaattatccaatagaaagaaaatggatcagaacacttgagcagaccatttcacaaaaatatctatatggccaatattaaaaggtactcaacattcttattcatctgggaaatagacattaaaaccacaatgagatattattatattcttttcagaatggttaaaatgaaaaagactgacaataccaagtgctggtgaggatgtgaaggatgtgaaactgttagtgggagtgtaaattggtgcaaccacttaggaaacactcgttggcagtatctactaaagcatgtaactgacatgtaacctaaggcctagcaattccactcttaggtataatcttatggaaatgcatacatatgttccccaaaagacaaatattagaatgttcacaatagtattatttataggagtggcaagctgaaaaatacccaaatagtaatcaaataaggaagtattcaaattgtgatctattcacacaatggaatactataaaacaatgaaaaagaatgaactattgctatagacaacaatatgatacaatctcacaaacataatttgggcaaaagaacccagctaccaaagaaatacactgtatgatttcatttatataaagtttaaagtccagcaaaatgaatctctggtttaggaaatcaagacaggggttacacatggggaagggatgggagaaaacacaatggggcttttggtgataataattatgtttcatttcttgacctcgatggagaacacataaatgaaaatttaataagttgtacaactaagatttcagtgcttttctctttgcgtgttgtactataatacaaaagtaaattttaaagcatactctattctaatttagtaatataaaagtaactaaaaattcataacctttcctaaactagggtaactcttttctcacccgctagttttatctccagaaacatagtaagtggctctgagtttgaatatgtaaaagggaatgaggaaggtgggagccagagtattctgcaaaaataaacctttttttttcctctaaaaaacagagaacgtataagaaaatccaatttttatcttagaaaaataacattctaagtaaaataccattgtcatttaaaacttatagacttcttttatatagggaaaccctctgaacttccctttaatgacattttccttgaaaggaaagttaagtcggtaacccacaaggaagcttgtgtgtcgtgttataaatactttagcagcccttggaaaactgtttccagctcattgagatcacctgtaagaaactgataaagtatgggccatgcgtggtggctcacgcctgtaatcccagcactttgggaggccgaggcgggtggatcacgaggtcaggagatggagaccatcctggctaacatggtgaaaccctgtctctactaaaaatacaaaaaattagccgggcatggtagcaggcacctgtagtcccagctacttgggaggctgagtcaggagaatggcgtgaacccaggaggtggagcttgcagtgagccgagatcgtgccactgcactccagcctgggtgaaagagcgagactccatttcaaaaaaagaaaaaaaaaaagaaatcaataaagtatgaatagtggctaatttactcttgcgactggtagaagttttatatcttgatatccccccaaaataaaatacaaactatagccaagatgcagttgtgataatgccaataaacctatagtttttgactgcaagggagttaataatctcttctgaagactcatagcagtcttgataaaaaggaattatttaaaaattgctattttatgtttgctcaagattaaaggcgtataagtaaggactacccatgtagctgctgggcaaagatataataccatagggcattcctttctttctttctttctttctttctttttttttacagagggatcttgctcttccacccattctggagtgcagtggtgtgatcataattcatggcagcctcaaactcctgacctgaaacaatcctccagcctccgcatcctcagtatctaagactacagatgggtgctaccatgcctagctaacactgtagggcatttctaaggaaatgataaaacttttctcagtatccttggttttgcatgctagcataatctaggtgatcaaaaagaaaggtttgaagctgagcaaggaaagtaacagctaaagggaaagacagagatttacaggaattcagaaaaatgtcataggtagattaagaggtgttgtgattgaaagatccacgatgtcattgtgcaatgtaagataaaatcatgtagtaacttcattttaaacctacagcataaacattgatgttctgctacattctacacataccgcttaatgatgatgattcataagaacagctaatctatgggtgaacacattgttcaattcacagttgtctttaagtgccttctaggtatgtgtgagggctccacattaggtgttatggaaatactcagataaagatgattggttagtgtccccacagagtttgtagaactagtggcacaacagaaaaacacacagattattaaggtaaagtaaaatgtaaatactttcaagagtcaccaggaaagtattacagagagtgctccttcctctctcaaaaggaaaaatgagagattgaataatccaaataagaacaggatgaatgagggagatggatttgacctgggccggtactatagttttgcaaagtttgtgcataggaatactagatattgggcacaacagtgggaaagctcagggcatttgggaaaaatattttagttattgttccatctttattatcaactacaatagtttgttggttatatttgaaagctactaagatcactgtaaacattaactgtctctcgttacaattactctacagtgagccttgttttattcagccagcaagaatttcatggttactgactgccgtctgtggttctccccagggaaggaagttataaaatagacaactattagagaatcatgtaattttaaaaatccagagcaagttacaagtcagtacagatttggcacaatcttctacatctcttgtctctgtaacacctgcccaaggattggtgttcagaatgatgttcttgagataattgtgtgctcctccaccaaagactcaagtacctaacttaatatatattctcagggacatattttataaatattttagcaaaggtctaagcaaaataagtattccgatgaacttatagaaaataaaatgatccagaacatgtcatttccaaatatgcttcctagcaacaattcaatgttgtcacagagtgaaccatcagctacatcttaattcagcataataggagacttgaggttcattttagagaagtggagcattaagagccaattaaatttcttggtattcactaacagtttggttaaggcgagcactttacatgtattcactcacttcatcttttcatcagtcctatgaagaagtactaccatcatccctattttagagatggaaaagttgaagcttggagaggttaaatattgtccaaggtcaacagagagccaaaatccaaaaccaaatttgtctgactttaaaaggcactgtattttactacagtcattgctttcagaacttttttccttagatgttcatgctttccaaagacatggacccaaatgcccattaatcacagactggataaagaaaatgtgatacatatacactatagaatattatgcagccataaaaaggaatgagttcatgtcctttgcaggaacatggatggagctggaagccattatcctcagcaaactaatgcaggaacagaaaatcaaacactgcatgttctcacttataagtgagagatgaatgatgagaacacatggacacatggaggggaacaacacacactggggcctgtcacgggggcaggggaagggagagcatcaggaagaatagctactggatgctgggcttaatacttaggtgatgggttgatccgtgcagcaaaccatgatggcacaagtttacctatgtaacaaacctgcacatcctgcacatgtacccctgaacttaaaagttgaagaagaaaaaaaaaagatgctcatgctttccttatacttttatgttacttttccaaccacagggctctcagacccaatcatttggtaatatagttcaaccatattgaagtggaagtttttcccatatgcattttaaataatttgttcacaatttattgagcacatatgatgtgccaagcaccacatatgcattaacccttctgctcctcatagcaacttctgagggtggtagtgtaattactaccattttacacaggaaaaatctggcctccatgactccacgcttggccttcgttcactgtctccatcagtgcattggcctcctcaatttattctatagggccctctacgcattcctggttaactactggatggtctcagagctcagtccttgggcctctctcttctctgtctaagctttctcccctacgtatctcatctagccttgcaatataagtgatgatgacttaaaaatttatatcttctgctctgacctgtgtactgaactccccccaaaatactcaactttcaactcatacctccacttacatgattgacaggcatctcagacttagcatatccaaaattgaactcttaatttttcttcaaacttatttttctcagtcttccttatttcaaaaaaattgtccttaaaatgtcaacacagactaaattaaactttatttaataaaactgatagtttcaatagctttcctaaacagaccactgaatttgctaaagtttatcatttgagatttactgaataaatatatctgactccagggttgaggtattgatatctatattgtacacacatacaccacacacacacactttctaagaaataatttgtgtacttgtaatagtatgtaaataaatcaaagtattattaatgaaagtaaaaccaaagccataagcatgtctcactggcaatgaaaaggtgctccacattgttattcatccaggaaatgtatatcaaacttaaaatgagatactaccacatgctgatcagaatggttagaatgaaacaggcagagaatactgatatggtttggctgtgtccccatccaaatctcatcttgaattgtagctctcacaattcccacgtgttgtgggaagggcatggtgggaggtaattgaatcatggtggtgggtctttcccatgctattctcgtgatagtgaataagtctcatgagatctgatggttttataaaggagagtttccctgcacaagttctcttctcctgtctgctgccatgggaaatgttcctttcaccttctgccatgattgtgaagcctccccagccatgtggaactgtgagtccgttaaacctctttcttttgtaaattgcctagtcttgagtatgtctttatcagcagcatgaaaatggactaatacaaataccaagcactagtgaggatgtgaagcaaaggaaactctcatatactattagtgggaatataatatttaacacttaattgtgtcttaaaatggcacctattattttctttgtcaatcccacatcatctactttgggaaattgctatttctctggcttattctgtttgggccattcaacatatgttcttgccttccataccacagttgtagagtgcactatatccctggacacagtgctcagtatagtgatcagcatttgccccaagctaaatcattaagagtcttttagaggagatcagtcttgtttctttttctggcatcacaaactctcaaaataatgtagacttttgggtggtaggaccatcttgccatgacataggagagcctttctcaggcaaggagaactgagagacaaaactcctatgacattattaaacttgtttctaaagccaggatatatcttgggcttttaaggctaataaattccctccttaggctagttgatatagtttggctttgtgttcctacccaaatctcctcttgaattgtaatcccacatgttgctggagggacctggtgggaggtgattggatcatgggagcagttttctcccatgctgttctcatgatagtgagtgagttctcacaagatctgatggtttaaaagtgcgtggtgcttcctctttctctctcttgtcacaatgtaagatgtgccttgcttctccatgattgttaagtttcctgaggcctccccagccatgcagacttgtgggtcaattaaacctcttttctttataaattacccagtcttaggtagttctttagagcagtgtgaaaacggactaacacagaaaattggtattgagagaaatggggcactgctataaagatactcgaaaatgtggaagtgactttggaactcgataacaggcagaggttggaacagtttggagggctcagaagaagatagaagatgtgggaaagtttggaaattcctagagacttgttgaatggttttgaccaaaatgctgatagtgacatgtacatataccactgaactattgttccttatctaatttaagatcttaagtttttaactgaaattgttgtatctatttagctttatctaagagtgatagaaagctattacaatggaagtccataaataactttgaagggaaataaacaactgagaaaagtttttatgaaaaacagatgactaatgcctttaatatataaatagttaatacaagccaataaacaaaaaactaaaagcacctccaactgaaaaatgaataaaggacataaatgacaacagaaaatgaaaatgaccatatgaaaaaatacttacctgcactataaattttttgagttaaattaaaatataatgcaatgtttacctaacaaatcagatatattaaaaatgataatattcaatattgacaaaccctgatgagatgtacacttaaagcattgctggtagtaatataaaatagtgcaacttttctggaagacaattggaattatgtatgaaatatatttaacacattgtctaaatgaaatgagaaatacagacaaacatttaggtagaaagatattctttttagttatttataatagcaatctactgggaaatggttaagtaaatatagaatttatttttgggtgtaatatgaagtaggaatttaattttccccaagtggctaattgtcccagcatcatttacttattagttgaacatttcttcactgatgtttgactatacctctggttccatatggacagtggtctgtttcaggcattttatcctcttctactggtctctttattatcccatgttaatatcagatagacttaaggccacaattttagaatgagtcttgatattgggtagaacaatattctctgtcttcagattgtttcaaaaatattttgactatttttccctgcttccttttctaacttcatgtacattttagaaacagcttattcgggtaacctcaaagatgctttttttgcgattttaaatagaattaaatttgttgatacatttgggagaaatgacatattttagctattaaagcttcccctccaagatcataatataggtctttatgtatttaagtattcttttatgcatctgtatatgcatatgcatatctatatctataatgggttcatgtaacttctataaggtttattccttttggaaccttataattttattgctattataaaggataccttaaaattttaactttctgttttggctgatatacagaaaggaaactgattttttgtataatgatcttatattcagcaaccttgaggaactcttaaaatgagtttccttcctgatggcccactttctcctataaggagctgactaggaactctagggtgtgaaaactgtcaggtttcattcagaatgtgagagtgagttgcaaagaaggcaaacaggtagggacaccccattccctcctgaccctggcaatagtgaaacttggagggctcttccctaaaatggtatctatcccagtggatgagaccttgtctctctgatgtggaatgctgcagccttacagagactattgtcttcagtctgggagctggttccttctaagcctttgggttttaacctgttacctcttcactgactgctctatttaaatcacctgccaaccctcacctgtgcctgcccttattccctattacagaatactgttcttgtcctttatggcaacgatcacactttatgagtttatttgtttggtaatattcttgtttactgtctgtttttcctatccattgcaagcttcataagagcagggaccaggtctattttgttcaccttcttcctggtccctgccatttagttcaataaatgtttgtagactgaatacatgagttagatgtcaaatacctgcttcaatttttaatgttaacaatccacttgtctcatcatttaaaatataccctacttatgtaatctgattttatcttcataattgtctttaaaatagggatgctagtccccatttgacaaataaggcacagggaaatcaaatcatgtgctccaaattaatatctagaaattagtagagttgaaaacagaacccaaatcatctaactcaacatctaattaaaataaaacatataacaaaaagaagagagaaagaaaggaaggaaggaaggatggagagaagaaaggagagaggaaaaaagcaaggtggaaagtaagggaggcgatattcatttgtgaactttccatgtcaagggcataccacatcatttatccttctaaaaactccttaagtttcatactttcccattaggaaacctcatagtctccagacatttcaggccagcagacagattaagaatagtcttgtatgacattgttatatatgagtcatacagtgtgagaaataaaggagtatgcagttatagagtaagcctctttttctcagctacatttcacaacataaaactagctggtaaagtcaggtcacctaatcgagtctgataattgtaaggtttactcacagcatgatttaagtttcaatttcaagttccaattcattctcttataatttttctgccttagtcaacattacacaagacgttggctctcttaacatttaagatccacatgagaatatcttgtcggttttactataggtatgagtgtagaaatagtttctttctagtagaatcataatttaaaaaaagaaaactgcactcaagtttttattttaatcaatgatactacatctcctttatttttcttatccctaaatctgattgtgaaataaatggtcgtttctattattttgattagctggctttgtactgtgaagttacaagaaggaaaggaatcacctactgctgtcagtctctatgtaataataaaaaaaaaaagtaccagtccttaagttaataatactatttttgtgatttggaggggaaaaaacactttgctgccaaagggtaatccacatagaagagctgattgctaggtgaaacactgacagaatgagactctattatggaacctattgacatgagaactctacatcactgtaaagtacagccactcacatattcctgaactcaaacagagtaaaatgatatagtatttatgaattctgtctgctccaggagggcatgacaatacatacttaatccaacatggtttatcagggacagacagtgacgttctggtgcttagagatcacaccctcaggaccccaacatacccattactgagacatcatattctatcagcagtgctgcttcttgtccacattgtttaagaatactcatggcttcagcatgcgtagttccaagaagccgaattccatccacactgagcaacctgtcaccgggtttgatcgtgccctctctgaagggagaataaaggaatagtcttgattaatttagcataatggggcttagtattaatagtcactttagccaaattcgttttgtcacacatattctgccatccatctcatttgcattctttttaagcatcaaatgtgacagtaagagtataaagaagtaaccctgaacagaaaattgctgtaatatgaaaatcagtaatgagaaaataactacacattagcaaaaaaacctaattacccacaggtaattcttggagtacaaaagtaagaagggcacattttccctttttctaggtttttgcctgaatgtctaaaatggatttattggaggccagaaaatactattcacctattttcccaaagtcaggtaagcagaaaagcctgcgaatttcattcaaatcattactagtgaatccaagcaggataggaactgctggtaagaaatctcccttgtctataaatttccctactgatttataaggccatttggcaataattcaattgattcgatctcacattccctggaagaggaaggcaaatgctatcctccctgctgtgaccacagacactcaaggcattgagagatgactcaggacttcagtgacaccacaaaagtacagccagggtggcccccagataacactccctgcctcagggaggggcacaaaaataagaaaatcaaatggtgggattatatgtttaggatttggaaagaataataatgacctttgaaataaaaatgtttcacctagttcactctctaagtcttttggctccaatttttttcttaaattctcagatttctttgagttctaaattaatttggtaatacaagtatgccactcacaagctcgtagcctatgttttgacatttctgtcaactccaactctaaatgttaataagaaatgaaaacattctaatttgcttcaggaagagtgattcactagacacatgagaagggaaaaggggaaactcttggacattttgttacccgctgcaaaagcaaatatacgtcagcaaaagtaagaaaccagtgttttcctattttctaattttatatgaaatatcactttcttaaaagtgagctaatcatatgagtttcaaaggaaaagaagcctgaattcctcccgcagttctttgacttactcactgccatactggcagttctgtcatctgtaaatgtggatacaaagacctcatgtagagggtggttgtaaggataaaataagataatgtccaccaagccctcagaacagtccctagcacgtagtaaatgcttaataaataatggttattattattattatctctatctcttaacaaaggtttttaagtttatcctggtctgaaacagagagacaggaggaatcagtgcattttcctcctccccttcaacaatctctaatggcagcagttgtgttcccccatcattatagagtcaacttttgctgtgggaaactaatacagagatgagtatctccagagacacctaagttgtgagtttactcggggccctaattataacaggaaagttgaaggcatttgcccttcacatattcaaattaacaaggaagagaaatgcaaagaaaactctacagactaatgaaatgtcttccattttacggaaagtcacttccattctgacctacacagtcactatcaaagaataacactaataataagaatgttgagaatggtaagaatctcaccaccaccacctatctgtccaggctgggagattagcaacaggcgaagatgcatttccagcatctgcctaaatgctgagttctgtaagtacctcccctgtgccatgccccctgcaaggcattatatatctccaatctttgataaaactgatcagctctgaaaggtggtattattacctacatttccaatggtggtggaaattgacctcagtattaagtcacttgacaaagatatagtaagtatagaatctagaggcaaaccttttttttttctgattccatagttcagactctcaattttcacattgtaacatgtttgcttaatagctacattttactgtaaaatttctaatttatcaacttctatgttaaagtccccagctttatttattctattttggatagtgacacagaaagataaagtttacctgtcagcaggccctccaggacgaacacatgttatcacaactggacgagatttatttctatcatcatgtgctccccctagcaaagaaaaggaacagagcttaaaactgctttcattgttggcatttaaaaaaaatcacctacaagatatcagctgagaaatgtcctacttgatgtacggaggaaaatatgtaaaattttccttgaggcatacaaaagccttaaaggtcttgctcattttatatagaatatatttttgaagtcaccatttctccatctttcaataaatatatggctgtaaccaggtaatatataaagtatttaacaactggaatggcaagagaatcaaccgattatatcaagtactggcccgatttgaacagctgtcagttatacagtacagatgtgtatatctgtgccaatcaaactgatctaaaatactggtcagtaggtctacaacctaacataaaggaaacaaaaaccaaagtaaaagaaaaatcctagtactaaaaaagaaagccaaaaaaaaaaattcaagtgaccaagtggctttcattaaaagtgagatgttcaaaaatttggggcaaaattttcagactgtgtcaagccagctgcaatccttgaatgggaattttaactttctgttagaaaacttctccacaagaattcatagaaacatagatgtttcaagatggaaggtaatttattgtaaattttctttttaatccatgacccttttgtacaatttccttaatctgtgctcccccagcgtctgcatgaaatgcacgcgtgctggcctacttactagatgtgaggctgctcactccacatttggacaccaaggagtgttagaaagttcttcctaatatttaactgatatctcttttcctttaactttcatccactcgtctttgttctatgatccagagcagtaaaataaaaatgtatgctctcttttacaaaaatgcttttccgaaagttgaaaacagagattatacgctggctaaatctcaccttcttaatgttgaacaatgccagtttccttatctattctttatgtgacctgatttctttgcacatcaccatcctgactgtccatctgggagttttctagtttgccaatatctgataaatataaacctattgtcaattattgctcccttaatgtttgcctgctagaacagatggacatttcccaaacctggcataggccgaaaggtcaacttatagaaaatagcctaagagaaaaattaaaaggcattcacagttcctcaggaaggcaaatgcttcttttgtgctcacttctacgacaagtgatttgtttagtgtgattgattggtaaaagctctcattcagtattttattcttgcattgtgtttagcttctttagaaattcctctttaaaataagaaattcaccactttctcagaaaaaaattttaaaataaaaattttaaatgttaccacaaatgcttgcccatatttatgtaaatactgttacataatttctcttttgcaaggtgatcataaaggataggtttgcttttccctaaaggaaaactgattgagaaaaggatgggggtcaaagatagcaagaaatcgttccataattttggtttgtatttacaaatttcaatatgtaatatcgaatgcttgttaaagtgtgaggtagttttatatttcttgatatgtggcattttactgttatttgtaatgaaccaagttccctgtgtgacttacttaggttctggaagtttgcagcagcaaggccaaacaggaaccactcagagaccagtgatattctcaatcctggtgtacattagtatcaactgggatgctttttgaaaatatcaatgccagggccacagtgcagaccaaatctgaacatcaagcagcatatgttaaatgactaggcccacctacaattttacatttgagaattactagagaaggtttccttgtctaaagtgtaaagcaacttcatggcagagtgcctttcctatcagtccaactcatctcttctggcttgcttgcattaactgaaatttaaccctccaaggtttaggccagaacatcatttttattctatggatgcaagcttctattgtttagggaataaaggttttagaacctgtgacttatagcattagaaatataattccattcatcagctaaaagcttaatgttgcaagttccattctattaggttagaacttctcccatactaaacagatatgctccatctgcaatatcttctctttcctgactgtcctagtattttctattgatctaagtttagctcaactcccatctatgccaaaatatcttatctgccatactaatatttactcacagcactttctcattctgattaaccagtgattcttaagtgatgggtagtgaccaccttttgaacagggaaaatcctccagatggacctctaactaatctaaaaacagaaatcctatatttgattctcattgagaaattattcaaaactccaaaaacttttatgttcaaccaacatattaagggagttattaaggcctataaaaatgcggtcctcataaactaatactggcttattgtaacttaagttttttaaaatcagtataatactatgaagtctgatgtccacacaaatctaggcaacattcaatcattcacttattaagtgcctccacataccaggcagtattctaagctcacattataaaactcctggatatacacacagatagtggaaattcctgcaaactgtgggaagggtgttttactaacattacatcatcagttgtcttgaggtggttgtgcatttcagttgcttctattctgtttatttcttgataataaattactcttggtttagctctttcattagtaatttgattcgctattgactaaccatacagtcactatcaatgaatatctgcaacagcagtatattttggtacagtgtttcaataattaggctatgtatgcatgtgattcaagaaccttctcgttcagatctgtattgcaaaacagatttgtatatatcacccttcagccaaaaattacttgtacagtgacttttcactatattcatctagttattttaaacagaaatttaggaatggttagggtaaatgatcttgggctctgttgctccacctaaaaataggccttggtcagaaaaatgtaataactacaagtctaaacctctcaatgagttcctagttccacatcctctctactactcacttgagcactctatcaacttttgtcttaaattcactggactgtaattccttgtagatcaaggtattgtcttatgactccatagtacttctttccatgctgacatgttgacatgtgcttaataaacatttgattgattgatttgttaagtgactggcacaaaatgaaagctactatttaaaactcaatcacttaagacaaatccaaatctgtacaagtttatccacatctcttttattctttgatgcatacatatttattaagatgtttaattttaattaatgttttaataattttgatagaatttttactctggtgaagtataaaatcttataggtgaagacaaaaacaatcaagaaatgtgaactgttaaaacattcctggtggagccaagtggccaaataggaacagctccagtctacagctcccagcgtgagtgacgcagaagacgggtgatttctgcatttccatctgaggtaccaggttcatctcactagggagtgccagacagtgggtgcaggacagtgggtgcagcgcaccgggcgcgagccaaagcagggtgaggcaatgcctcactcgggaagtgcaaggggtcagggagttccctttcctagtcaaagaaaggggtgacagacggcacctggaaaatcgggtcactcccaccctaatactgagcttttccaacgggcttaaaaaacagcacaccaggagattatatcccgtacctggcttggagggtcctacgcccatggagtctcgctgattgctagcacagcagtctgagatcaaactgcaaggcggcagtgaggctgggggagggtgcctgccattgcccaggattgattaggtaaacaaagcagctgggaagctcaaactgggcggagcccaccacagctcaaggaggcctgcctgcctctgtaggatccacctctcggggcagggcacagacaaacaaaaagacagcagtaacctctgcagacttaaatgtccctgtctgacagctttgaagagagtagtggttctcccagcatgcagctgtagatctgagaacaggcaaactgcctcctcaagtgggtccctgacccccgagcagactaactgggaggcacccccaaataggggcagactgacacctcacacggccgggtactcctcttagacaaaacttccagaggaacgatcaggcagcagcatttgcggatcaccaatatccgctgttctacagccactgctgttctacagccaccgctgttctgcggccaccgctgctgatacccaggcaaacagggtttggagcggacctctagcaaactccaacagacctgcagctgagggtcctgtctgttagaaggaaaactaacaaagagaaaggacatccacaccaaaaacacatctgtacgtcaccatcatcaaagaccaaaagtagataaaaccacaaagatggggaaaaaacagagcagaaaaactggaaactctaaaaagcagagtgcctctcctcttccaaaggaacgcagctcctcaccagcaatggaacagagctggatggagaatgacaagttgagagaagaagacttcagacgatcaaactactctgaactacaggaggaaattcaaaccaatggcaaagaagttaaaaactttgaaaaaaaattagacgaatggatacctagaataaccaatgcagagaagtccttaaaggagctgatggagctgaaagccaaggcttgagaactatgtgaagaatgcagaagcctcaggagccgatgcgctcaactggaagaaagagtatcagtgatggaagatgaaatgaatgaaatgaagcaagaagggaaattcagagaaaaaagaataaaaagaaacaaacaaagcctccaagaaatatgggactatgtgaaaagaccaaatctacgtctgactggtgtacctgaaagtgatggggagaatggaatcaagtgggaaaacactctgcaggatattatccaggagaacttccccaatctagcaaggcaggccaacattcagattcaggaaatacagagaacaccacaaagatactcctcgagaagagcaactccaagacacataattgtcagattcaccaaagttgaaatgaaggaaaaaatgttaaaggcagccagagagaaaggtcgggttacccacaaagggaagcccatcagattaacagctgatctcttggcagaagctctacaagccagaagagagtgggggccaatattcaacattcttaaagaaaataattttcaacccagaatttcatatccagccaaactaagcttcataagtgaaggagaaataaaatactttacagacaagcaaatgctgagagattttgtcaccaccaggcctgccctaaaagaactcctgaaggaagcactaaacatggaaaggaacaactggtaccagccgctgcaaaaacatgccaaaatgtaaagaccatcgagactaggaagaaactgcatcaactaacgagcaaaatcaccagctaacatcataatgacaggaccaaattcacacataacaatttaactttaaatgtaaatgggctaaaagctccaattagaagacacagactggcaaattggataaagagtcaagacccatcagtgtgctgtattcaggaaacccatctcacatgcagagacacacataggctcaaaataaagggatggaggaagatctaccaagcaaacagaaaacaaaaaaaggcaggggttgcaatcctagtctctgattaaacagactttaaaccaacaaagatcaaaagagacaaagaaggccattacataatggtaaagggatcaattcaacaagaagagctaactatcctaaatatatatacacccaatacaggagcacccagattcataaagcaagtccttagtgacctacaaagagacttagactcccacacaataataatgggagacttaacaccccactgtcaacattagacagatcaacgagacagaaagttaacaaggatacccaggaattgaactcagctctgcaccaagtggacctaatagacatctacagaactctccaccccaaatcaacagaatatacatttttttcagcaccacactgcacctattccaaaattgaccacatagttggaagtaaagcacccctcagcaaatgtaaaagaacacaaattataacaaactgtccctcagactacagtgcaatcaaactagaactcaggattaagaaactcactcaaaaccactcaactacatggaaactgaacaacctgctcctgaatgactactgggtacataacgaaatgaaggcagaaacaaagatgttctttgaaaccaatgagaacaaagacacaacataccagaatctctgggacacattcaaagcagtgtgtagagggaaatttatagcactaaatgcccacaagagaaagcaggaaagatccaaaattgacaccctaacatcacaattaaaagaactagaaaagcaagagcaaacacattcaaaagctagcagaaggcaagaaataactaaaatcagagcagaactgacggaaatagagacacaaaaaactcttcaaaaaaattaatgaatccaggagctggttttttgaaaagatcaacaaaattgatagaccactagcaagactaataaagaagaatagagagaagaatcaaatagatgcaataaaaaatgataaaggggatatcaccactgatcccaaagaaatacaaactaccatcagagaatactacaaatacctctacgcaaataaactagaaaatctagaagaaatggatacattcctcgacacatacaccctcccaagactaaaccaggaagaagttgaatctctgaatagaccaataacaggctctgaaattgtggcaataatcagtagcttaccaaccaaaaaaagtccaggaacagatgaattcacagccgaattctaccaaagctacaaggaggagctggtgccattccttctgaaattattccaatcaatagaaaaagagggaatcctccctaactcaatttatgaggtttgcattatcctgataccaaagcctggcagagacacaaccaaaaaagagaattttagaccaatatgcttgatgaacattgatgcaaaaatcctcaataaaatactggcaaaccaaatccagcagcacatcaaaaagcttatccaccatgatcaagtgggcttcatccctgggatgcaaggctggttgaatctacacaaatcaataaatgtaatccagcatataaacagaaccaaagacaaaaaccacatgattatctcaatagatgcagaaaaggcctttgacaaaattcaacaacacttcatgctaaaaactctcaataaattaggtattgatgggacatatctcaaaataataagagctatctatgacaaacccacagccaatatcatactgaatgggcaaaaactggaagcattccctctgaaaactggcacaagacagggatgccctctctcaccactcctattaaacgtagtgttggaagttctggccagggcaattaggcaggagaaggaaataaagggtattcaattaggaaaagaggaagtcaaattgtccctgtttgcagatgatgtgattgtatatctagaaaaccccatcgtctcagcccaaaatctccttaagctgataagcaacttcagcaaagtctcaggatacaaaatcaatgtacaaaaatcacaagcattcttatacaccaataacagacaaacagagagccaaatcatgagttaactcccattcacaattgcttcaaagagaataaaatacctaggaatccaacttacaagggttgtgaaggacctcttcaaggagaactacaaaccactgctcaatgaaataaaagaggatacaaacaaatggaagaacattccatactcatcgataggaagaatcaacgtgaaaatggccatactgcccaaggtaatttatagattcaatgccatccccaacaagctaccaatgactttcttcacagaattggaaaaaactactttaaagttcatatggaaccaaaaaagagcctgcattgccaagtcaatcctaagccaaaaaaacaaagctggaggcatcaagctacctgacttcaaactatactacaaggctacagtaaccaaaacagcatggtactggtacaaaaacacagatatagatcaatggaacagaacagagccctcagaaataatgctgcatgtctacaaccatctgatctttgacaaacctgactaaaacaagaaatggggaaaggattccctatttaataaatggtgctgggaaaactggctagccatatgtagaaagctgaaactggatcccttccttacaccttatacaaaaattaattcaagatggattaaagacttaaatgttagacctaaaacaataaaaaccctagaagaaaacctaggcaatatcattcaggacataggcatgggcaaggacttcatgtctaaaacaccaaaagcaatggcaacaaaagccaaaattgacaaatgggatctaattaaactaaagagcttctgcacagcaaaagaaactaccatcagagtgaacaggcaacctacagaatgggagagaatttttgcaatctactcatctgacaaagagctaatatccagaatctacaatgaactcaaacaaatttacaagaaaaaaacaaccccatcaaaaagtgggtgaaggatatgaacagacacttctcaaaagaagacatttacgcagccaaaaaacacatgaagaaatgctcatcatcactggccatcagagaaatgcaaatcaaaaccagaaggagataccatctcataccagttagaatggcgatcattaaaaagtcaggtaacaacaggtgctggagaggatgtggagaaataggaacatttttacactgttggtgggactgtaaactagttcaaccattgtggaagtcagtgtggcgattcctcagggatctagaactagaaataccatttgacctagccatcccattactgggtatatacccaaaggattataaatcatgctgctataaagacacatgcacacgtatgtttattgcggcactattcacgatagcaaagacttggaaccaacccaaatgtccaacaatgatagactggattaagaaaatgtggcacatatacaccatggaatactatgcagccataaaaaatgatgagttcatgtcctttatagggacatggatgaaactggaaaccatcattctcagcaaactatcgcaaggacaaaaaaccaaacactgcatgttctcactcataggtgggaattgaacaatgagaacatggacacaggaaggggaacatcacactccggggagtgttgtggggtgtggggatgggggagggatagcattaggagatatacctaatgctaaatgacaagttaatggatgcagcacaccaacatggcacatgtatacatatgtaacaaacctgtacattgtgcacatgtaccctaaaacttaaagtataataataacaaaattaaaaaaaaatttctgactgtggaaaaccaaatactgcatgttctcacttataagtgggtgctaagcattgagtacacatggacacaaagaagggaacaacagacactgaggcctatttgagggtggaggttggagggtgggaggaggaggaggatgaggattgaaaaactgattgagtatgatgatgattacttggatgacaaaattatctgtaccccaagcccccatgacatgcaattcccccatgtaacaaacctgaacatgtaccccttgaacctaagatagaagttggaaagaaaaaaaatccctgatgtttatatagctccctattgaagctcattgtcatcctatgagttgagagttgttaatgtaggcacagtctttaaggaataaaattactaatgagaaaatataatgcaagatagaattatactttagaattagtaggttttttttttttttttttgagatggagtctggctctatcacccaggctggagtgcagtggcacgatctgggctcactgcaagctccacctcccgggttcacaccattctcctgcctcagcctcctgagtagctgggactacaggcgcctgccaccacgcccggctaatgtttttgtattttttcagtagagatggggtttcaccgtgttagccaggatggtctcgatctcctgacctcattatctgcctgcctcggcctcccaaagtgctgggattacaggcgtgagtcactgtgcccggcctagaattagtagttttatgataagttggagtcacctgaaattgttattatcaatgccatactataatatgatgacttgagctgaagcacatagatacccaagagattagaatcttcgatccatttttagaaagctacaataaccaaatgtgtttctggagaaatttatttaaataaagtcccttaatcctagtgtattaaatcaaatcaagcatactaatcaacatttttcagtgatatcgaaaaatataaaaggaaagacaaaagacatgttgaaaagtataggatgactgaattgacaaggtttataaacattggctttttgctctgtattaatgaaccaaaaatagagctacatatggtttccagttttattatcattcaatgttgcgtttatttaaagaagagaagatttttctaacccagagagtgagagaaaatctttacaaccaatacatccaacaaaggactaatatccagaatctgtagggaactcaaagaaattagcaagaaaaaaccaaacaatcccatcaaaaagtgggctaaggacatgaatagacaattctcaaaagaagatataaaaatggccaacaaacatatgaaaaaatgctcaacatcactaatgatcagggaaatgcaaatcaaaaccacaatgtggtaccaccttattcctgcaagagtggccataatcaaaaaataaaaaaaaaaatgttgacgtggatgcagtgaaaagggaacacttctacactgctggagggaatgtaaactagtacaaccactatagaaaacagtgtggggatccttaaagaacaaaaagtagaactatcatttgatccagcaattccacaactggatatctaccagaggaaaagaagtcataatacaaaaaagatacttgcacatgcatatttacagcagcacgatttgcaattgcaaaaatatggaaccagcccaaatacccatcaatcaactagtggataaagaaactggtatacatatacaatagaatactactcagccataaaaaggaatgaattaatggaatttgcagcaatctggatggaattggagaccattattttaagtgaagtaactcaggaaaggaaaatcaaatatcgtatgttctcactcgtaagtaggagctaagctatgagaatgcaaaggcataagaaagatacaagggactttcaggactcggggaaagggggagggggctgaggaataaaaggctacaaattgggttcagtgtatactgctcgggtcgtgggtgcaccaaaatctcacaaatcaccactaaataacttattcatgtaaccaaatacccaaataccacctgttctctgaaaacctatggaaatattttttttaaagtagatttttctaaccaacacctacctcgaattacaaaaccaaaggtattgccttctttatgtaatgtgacctccactgttcggaaaataacacttgatccttgcacagctgaataaaggaaagagagaaggaaatataacttgtaagtcatcataacatttctaaatcattcaatgtggcataaaatattacagatccctgttgcaaataagttttgagtaataagcaacaattccttttcaaagaaaatgtttaaaaaactgtaatgacataaaaataccataaaacagtcatctgtataagtgactcatatagatacaagtggaaacaaaatcatagctagctcatttccttctatatagttcgtttctagataagagggggatatttacattgtttaaactctacctaacaagagagacaatatttatataagtagaattgttttccttttgtaaaatgcaaaaacaatatttttgtaacacttgtacaataacttctgtatttatttttattttgcagctggcacaggaagaaaaattatcattctcagattgctatcaacaattaggctgatgctaatagatgttctgacatataaatagctattaaactaagacacagcaacccagatgaaacttagagggcaaaagaaattctaagtgcatttaaaatactactactatctaagaaactacagattgacttaattttacttgatatattatgcttatgttgtgtttgcatgattatcactttcatttaacaaaatggaattgtattgtcaagctgcaatctctagtcacattacatacatgtatgatggtataaggtatatgaaggtacatttactaaaatattctgtaagattgcttacaagaacctgttgagtcattctagttgtactatatacaccatttctgcataaaaaaacccataaaacttccacaaactggtattttatcattatgcacagagaaatgtttttattcatagagacttgtaatgtgtaggagaattttagatctttattttgaatttgtacctagttaataccatgttcattaccaagtaacacatttttttacattgctactagatcctgaagggtttattagataaaactatcagcaaaaagtatacagtcaggccaggcgcggtggctcacgcctgtaatcccagcactttgggatgccaaggcgggtggatcacaaggtcaggaattcaaggccagcctggctaagatcgtgaaacctcatctctactaaaaatgcaaaaatcagctgggcgtggtggaagatgcctgtaatcccagctactttggaggctgaggcaggagaatcacttgaacccgcgggggcggaggttgcagtgagctgagatcgtgccactgcactccagcctgggtgacagagtgagactctgtctcaaaaaaaaaaaaaaaaaatatatatatatatatatatatatatatatatatatatatatatatatatacacacacacacacatacatatacatatatacatatatatacacacacaggcagaatccaaaggcattgtttaaaaaaacttttcttacagaaatagcaagtagttttaggctttaattacaattatttttaattatcagaaattctgaaccctcaagggaagaaacatgattaagaaaagtacacatttaaattcataaaactgtccactatctggctgggacataaagtacaataaaaatttggatcggctgaaaaacaacataaacctacagttcaaaaatgttttggtatactgctgatttaattaaatgtcatattcttgctatcaggggaatttcagcttagactaatcaactaggaacagtactcacaaacagatgaaagtgttgaggtacagttttaattaaacaaaaaaaattgagttcattccaaatattttcttatttccatggcccaacaagccacttgaagaaattggttaagaaaatgattttttttttgttctcttggtaagtgaggaaaggaaaggatatggaaagaaataattaataagaatttactgtgtgctcagaactctgcaaaaatggtttacacatattatttcatttactcaataaatcagctttcaatgacatataattgaattctaattctgggccacctgtcctttttggctgggtatctgttatgggaatgcaaagtactgcaattttgattttgctgtagctaaatcttgctgactataaaatcttacaatcaaatttaaagtcaatataaaggctctgtattttctacagctttagattatctacgctattgttctccatcatttacaaagataaatttgaatgttgactgcgttttaatacaattaatgaaatagatttggtctttcttgtttttatttgcatggctggctcttcatgattgggttttcacgtgcagtaccagacatcctgcattgccatgtaaattttactaatgactcatacatatgtatgtatacacaaagttccaattaaggtgcttacccaaaagatcaaaaagtaggtagaaaccaaattcacaatgcaaaaattctcctcggtctttcaattgtgctgttgtcccttctttctacatgtggatattcatgtacttctacacagttattttcctatggtagatgaggtttttgaaattacaaactccttccctgcctccctattccctgtctcaataggagttgtgaactttcctacctcattatgctgcacttgcccatgtgacttacttttgccactaggatgttaacagacacaagcagaggctggaattgcacttacatggttgtgcttgccctgttttccctctgccattgccacaagaagagcgtcctccaggtagctgctgctccctcaaactgaatcccagagtaaatcacatggaggagacctgagactctttctccctctctcctcctccacttcaccaccaccaccaccaccaccaccatcatctgtctattttagaactgagaagtcagaaggctgtcaaagggacatgctttaacacatttatttgagttaaaaatgactccttaggatagaaaggtcatgtgagttagctaatggagtaacagtgaagagtgcctttgccaatcagattatagggcagactgtttttcattaaatgaagtaaacctgtagctccaaggtttgcatgaaaacagaatctaaagacagataaaacaaacaatatgctaggaattgcatcctttctaactattcatgcttatgataattttaggtgttaactaaaaatggatgagaattatgtaacatttcaaaattctttaagagttaagtgaccaaaaaatttgaaggcactgctctagaccaaatttttatttttattatttatttatttttaattgagacagggtctttctatgttgcccagggtggtcttaaactcctgggctcaagggatcctcctgcctcagcctcccaaagtgctaggattacaggtgtaagccaccacagctggcctagaccagcttttaatacataaatatcaggccgggcgtggtggctcatgcctgtaatcccagcactttaggaggctgaggcaggtgatcacctgaggtcaggagtttgagaccagcctggtcaatgtggtaaaaccccatctctactacaaatataaaaattagccggacataatggtgggcacctgtaatcccagctactcaggaggctgaggcaggagaattgcttgaatctgagaggtggaggttgcagtgagccgagattgtgccactgcactccggcctgggtgacaagagcgaaactccatctcaaaacaaacaaacaaaaatacataaatatctaagatacaggttggtaatattctctctaaacacagtctcaaagaatcacataattttaaagtcagaaagagctttagagcttatatagaccaatcattttattttcataaagaaactgaatcttagaaagggccaaggtcaaaccagttttcttctatcagattacacacacacacacacacacactcacacacacacacacatacacacactctctctctctctctcttttctgattctttctgaactctgtggttagctgagactcaaactgctgtgatcctgagatagctaccagtcttggccttgggtcgcttgtcttttagcagtcagttctccttatggaccttcaggtgtggatggcctgtttctgctctagctgtctgagctaagtgaaaggggaacttattaattccttcaaccactctcaactcaagtatccgattactttcttcaaatatagtagaaagagacagattattcttggagaatagaccccttttgatttccgtcacaacaattcacacttttgtgtttaaaaatattttgccccttttccatcagctttattgtatgacagggaaaaagatggtactgcataatgaccaagtcacgataggttttaactcctaaacatttctgatactcatctcctttaactctactaatgctatttttatttaggatatcacttctcttttggaaaatcctaacagtctttgggcttgtagcctctggtcttttctctattttgcctcctacaatgataaatctaaatactcagatcttatgatgctgttctcctttaagggctcctcacggcccactggatgccaagctccaacaatatggcttataaggccatattatacactatttaaattctcatttggtcctcgtgtacctcattggcctcatctatctccaagccccctctttctttgtccctccttctccgtctttctccctctttctctcttcccttcctcccttccttccttctgtccattcttccttctctctctctctctttttgagatggagtcttgctctgttgcccaggctggagtgcagtggcataatctcggctcaccacaacctctgcctcccaggttcaagtgattctcctgcctcagcctcccaaatagctgggattactggcgcccaccaccatgcctggctaatttttgtgtttttagtagatacagggtttcaccatgttggccaggctggtctcgagctcctgaactcaagtgatccatctgccttggcctcccaaagtgctgggattacaggcatcagccaccacacctagccccctctctgtctttccctatctgtttgtagtttaactgtgggctgggctgtcatcttcccttcgcgctgcaccctttgtctgaaatattcctcttcccacctggctagcatgacctcctttaagtcttcctggaaacgcctagctctgaatcacccacaacactggacaaatcttcactattagcctttgcctaaaagctatacttagagtttcttttaggaaggggttgtgttttattgatattcatatccccagaggaatacagatgtataatcaaagagcattagctctagataactggtttctcttatgtctttggcaatggtttgagagagtaatttcaaagcaaactgactcatttaaagttaaaaaaaaaaacacagtactttcagtataataatgtaataatggtaataaggctaatgttattagttacttacaaagtgtttgataatggtctcaataatgatcatgtgattataacatttaatcattacaaaaatcctgcaactactatagctattttatagattagaaactgaaggctcagagaatttaaataacatgcccaaggtcacaaagacagaaatgagcaaagctgccatgtaactgctgacacagtctaagcctttacactctattttattgcctagtcttgctgaaaacgaaaaaatgttgtagcaaggtttgtgaacatagtcttaaattgattttgttacaaaatgactactaaatctttggtgttagactttatgtgaagaatacgaacttgtgactgattatgcacatgtttcctgagtactggaatctgatccccaagcttcgaacaccatctatattcccattactctcaaatgtatatttacagtacagatctttctctcaaactccaaatcatatcttcaggtcttgacatttcctcttgcatgtcaaataggcacctcaaatgtagtatttcaagccatgaactgctgatctttccctcacaaatcagctctgcccacattcttatccattcctgttaacggatactctgtccttccagctgctcatgctcaaaaccttggggttaactttgactcctctttttctgcacaactcacaaatccattaggtaatcctgtaggctctcccttcagaacagatctggaatctgactgcttttcactgtctccactgccatctctcacatggatcactgtaactgccctccagctcatctcccagcttctaccctggtctcttacagtctgttgtcaacacagcagccagagagcctctgaaaacaaatcacatcatgtcactcctctgccccaaaccatatagtgacttcctgtatcattcagagaaaaacttaaggtcctcccagtggcctatagtgataccccacccccttacatttctgaccccatttcctaattctcttactgctcattctgctatagccacactgtcctccttaatgtttctataacaaccgtaagtatattcctggcttttggtcttagcaatgactgttcattcttccgggaactcttttcccccagaaatccatacaaccaactccctcacctccttcacaagtcattgactaatctcacattctcaatgatgctgtcctaaccaccctatttgcaattgtattcccaccctgatcccagcactctcaatccctctccttgcactgctttttcgcatagcattcatagtattcatactgtataattatttattatggttttattttattatctgtcttctgctacaatataaactctactcatgttccccaagctcctagtacatagtggtggctggaacatagtaaatgctcaataagtcattgctgaacaaatgaattctaccaactcttcataatcaacctgagttctcattagtatggaagagcaaaaagctatctcagggtagcatccatgttcatagctaataataggagaggtggtgctagaacagcataaacactgggcagcagtcatatatcagtatacctcacaatgaatatgcatatggactttggagtctggcagcctggattcagatattgaatccaggctttgtaaaatgagaaaaaaaaatgcctatcttgtagtgttgattgcctttttattgaaaactttgatagtgccaggcactattctaaatgttttccaaatactaacttaattaatcctcataacaaatctatgagtaggaactaataatattcgcattttacagatgtggaaactaagacatagaaagtgtaagtaactttctcaaaggcatgtagctagtaaaatgtggagctgggatttgaacctgtctatttgatactaaagttcatctctgctatgctgacactccttgtggaaaggattaaataattcaatgcaagtcaagttctttgtaatgccagacatttggtacaatcaaaatctgttggctactgctgttataattactattattactacttgacaatatgtgttctgaagctattttcatgcttcagaaatggatatatcatatatatatatatatgtatacctactatgtacccacagaaattaaaaattaaaaaagaaattaatgtatccataaagaactaatataaaacatactaaatatgcttttcctaaacctagtcactaagtacaaaacctggatggtacttattgcacagaacttacaaacatgttgaattaaaatggcttaggtggcaaacagaacatgggcccttcataatttcattgttagtgatgcctttttaaattcttcctgagtaggttgtaagttttccaattcaaataatttttaaatactaagaaagttggctttgccattcctgtaatgagatattgatggcaaagggaaaaaattcagaagctgattttgctttggaaaaactggtgccgctgttcttcctctgcgttatgattatagcaattcctccttatctgcagttttattttctgtggtttcagttacctccaattaactgcagtctgaaaatattaagtagacaattccagaaataaaccatccctgttttaaattgtgtgctgttaggagtagtgtgatgataatctcacattgtctgctctatccatctggatgtctggcacattcacgctgtttacactacctgccttagtcactttgcagccatctttggtatcagattggctgttgtgttcttgctgtacttttttttttttttttttaaacagggttttgctctgtcacctaggctggagtgcaatgacacaatcatagctcactgcagcctcgaccttctgggctcaaggaatccttctgcctcagcctcccaagtagctgggactacaggcatatgccaccatgcccgactaatctttttttggtagaaacatggtctcattttgttgcccaggctggtcttcaactcctggcttcaagtgatcctcccgcctcagccttccaaagttctgggattacaggcatatgccaccatgcctagcccttgcagtacttgtgttcaaggaacccttattttacttaataatggctgaaagcagaagagtagtgagattggcatattgatataattattccattttattaatgttgtgtgtgtttgtttttttgagacagggccttgctatgtcccccaggctggatggcagtggcgtgatcatgtctcactgcagcctcaacatcttgggctcaagcaatcctcccactttaacctcctgagtaactgggactacaggtgtgcaccaccatgcccgactaatttttctattttttgtagaggtggggctttgccatgttgcccaggctggtctcgaaccactgggctcaagcaatcctcctgcctcagcctcccaaagtgctaggattatagacgtgagccaccgcgcccagccagttattgttgtcaatgtcttactgtgccaaatttatcaattaaactttatcataagtatgtatgtatagaaaaaaacctgatatatatagggtttggtattatgagcagttttaggcatccactgggggtcttggaatgtatcccctatggataaggggggctactgtacttacagaccggtggaagctcgtactctacttcaagaaccactctttctcccacattcttcagcaagctgatgatctcgtcatggcggaatttggccaggttgattccattcactgctttgatgtagtcacccacatccagctggtcacttctgcaaaatagacaatgttgtttcaacagacccaccctctccataggccagtctgactatatttccactttcccttcatggtaagcatgcaagtgtagaagcaagcctagaaggctgacagcagaagtccctgcctcctaggagacggtgggcccttaagggtaagagtacagctgaagtcagatgagagccagggatcccttttactcatgcagcctgtgatactttggaagtcctgctctgattctgccactatctctgatttttttcctttttgcctgttttatttttaaaagcaccataaaacaaaatcaagagaagcttttttttttttttttttttttttcagttctttgccctaaaccagttggttctctgggatgggatccagatcctagacacaacacatgtctttttattctcaatccctcttgtttttgctgcctcccttttgtacatttcacctctttcaataacttcactgggagtttgtccaggactaaggaaagggtcagcttattttgctatttattgcttacagcaggattgataagaagagtattggtgaaggagaaatcacaatgcaaatattgggtttcagtaacattcttatctctctataccaccataacagaatattggctgctcttggactttagtcaaactccgtttctaaaccaagagcaggtagcaagaccaataataagagttaaaattcatgtcactgataaggaccttcaataacattttctcccaaaacagaaatagctaatgcatttattttatatataaatccagctccaatcattcctccttcaaagagcctcctaatctgctccagtctgcagtacatgcatggcccttacctcactttcctgacacttatgtcaacttaaccgcctaatgctctgtaataacttctgtgctgttgctttttgctatcatgcaatgccatttttactcccaaatgtttcatgttttttatgccttatctccactaatagattgtgagcccctttagggcaaggatctcatctttaattattctgatttactaccttcaaaatggtagtgcctttaacagtgactatttggtgatttttaattctcaatataactggcacagtaatacttttaattacagaattaatacaactgaaaatgctaccctttcctccattcacacttgccttaagggagagctataaagaagctctggagacttatgaacccctagcatcatgaactggccatgattgttataaaataaaggaggttgtgggtgtggaaagatgcttcttaaaagcctaaagaaagcagattgaggtgcttgtgtccacaccagcctcccttacaaacaataacttctgatcatggaggcaatccactggattaagtttataaattgtacaaacaggttgatcattaaaattaatcacagaaatcaccacttcagatgacattttatggggcaagaactcagatttaacctggaattatgtggatatgaatattggtggccagaatttaaggtactttggcctcacttttattttttatttttacttatttatttatttatttatttgagatggagtttcgctgctgttgtccaggctggagtgcaatggcacagtcttagttcactgcaacctccgcctcctgggcggattcaagtgattctcctgcctcagcctcccaagtagctgggattacaggcatgtgccatcacacctggctttttttttttaattttttttttaaatttttttagtagagatgggtttcaccatgttggtcaagctggtctcgaactcctgacctcaggtgattcacctgccttggcctcccaatgtgctgggattacaggcatgagtcactgcccggcctggcctcatttttaatgaaacctgatcttctgtcccctttttctgaggcagatttagaatgtatctcaaggaagcccacccctgcccagtatccaggacattctgcctttggcaataactagtggaatttgcagttcatggaaagaaagacaggtgagacctcctcctctaagccttctgtcctttcggaaaccaactctttaaaatctcacaggtagaaaaggagagaggatgtgagataaacaaaattttcactgaaaactcagagttaggtctcccattctttctagggtagccatgtcccctctctggcacttttccccattcacattatatgggtcatctgtttcacatttagatgattggagtgtctccttcccactgcagcttgtctgctgttcagtggcacatttgcagacaagattcacataggctttttgaaattaaaatcttgtgagggcctggcagctcctgagatgacacaagaacctccctgggactgcagcctaggctagaacagccacatgggcagacctggggaacagcttctgaaacgtgccccactgtgcttctgctggcctgtgctgcctggcagatggcagctgtcatttatttattagtgaccacttttgatggagctttaatttttgaattaattacaccctgtgttcctttcagtagatttccccaagaggcagttacctagcagcaattcctccttgccgcagattagatactcttggcttgccatccttatcaattcctcccgataccgtcagacccagggtagtgccttccttcttcatcagctcgacgactgtggagcccttgaattcctctgttaaaagaaaagcatttgccttattaaaatgagagtagaatcaccaatgtcatttctcctccccagaagttctttccactttttcttttatgagaaaagatatttatggcctccttccattgtaatttgaagaatatttcataaagatgtgcatgcaggtaatgctgaggcagatattctattagaggttatgaaaatgggcactggtggggtattcactccaggttgacaatagtccaaattgtcttatgtacaaataatattcaccctttattttctgccattctcaggtgacattctctggtttctctccttgtaactccaatgggaacaattaaaaattgtaaagtacagaattagaacagaattttagatgataatacgaacatatatagcacagtggcacactccaagttcatggtatgtctcaggttaggaagccaactgaaaggagaagagtgctttctacaggttctagaaaaatattattgactttactttctttgtctttcaaaaacaaagtatgatggcttatgtaacaattcatgtcattcttgcagaatatgtcacagtatggcaaggcaggattgatcctcagaatttccaggtaactgacataaatctttcattctctgcttacgaaattttaaaatttcacagatcttgtggggataatatctatatagcaagatagaactcaactcttttgattttagtcagagcagaaggtaagaaaactgtaagaatatccttcccttcaaaaataaaaatgagtagagtcaatatttaccttccagaggctaattaggataaatgctgttttaaaattatctgtgatgttattcccctatctgcaaatatattttcttggtagggatggggaaattgtccaattttccaacttctcctaaattaagttacacatttcaggggtaatgaacttctagaacatcaaagacgcatattaaaatgcaaaaacaaactcgctctttcaaagtgaaatttaaaaaaagattatttgcacaccttaaccctttccctaattacagttatttataatgttgaaaatatttataaatgtgtatcataaaggtttttaaattgctgctgctagtacattatcctactagccaatgaaaaaatgaaattacattaggtaaggaaacagtatctcaactgatctagtgaggagaacagagtacttgggggaagaaggctggggacggcaggctacttatttcctcagcagcctagagaatgtccttcaaggcagggcttttgagtttgccagctcctgtgactttaacatcccagcataccatcactggaatcctgccttttcatggcagtctcatgacactgtatacataagtcattatcgtcttttaaagtagaagccaaggaggagtctgagcgtgtatgatgtcagcttcatctactacattttgtatgacagaccaaataaaaattgaaattcaagaatgaaaattcttgtcaagtgcatgaaagtacaggaccttttacatcatttaccagaaacatctgtaacaaaattctatcactgtgtgcacttcccttgtgctacttaaaacaaaacaaagcaaaccccagaaatctcatgaaaacatacgtagattcaactgatattgaagacatcaccttaataaacaatccctctaaacccttgctggcagaaggctaggtataaatttttttaaaataaagttaataattaaagtaaccaaaatgacatagatgatgaccgttcatattaaagagatataatgtgcccaacaattttgccaacaaaaagattctctgcatcttctttaaatatgcagagtatcctatatatttagacatctgattatagaactttacatgtagagttggaagcatagttttttttaagtgcttatcttaaaggtctatccaattttcatgaagaagcaactctaaaatactaacaccaggcatgtgagaagtaagtttctattcataaaaattttccttctactccaagttttcaaggacatgcttcctgcataaaataggatgcacgggtacagccttatgggaggcagacaatgtcattttctccagaaggaacccaggtgcttcctgggcttccggctgaatcctgaaaatctagaaaagctcaattattttagtttaatttcatcattattaaaatataaattcatcgatctggctactttttcaactgatacttgtcaattaccctatcatttaaaaacatttcaaatgttttcctaagagctaattttaataatgtgaaattgagaaaatattcctgcaccagttaattgagtaatttgtgcattcattgattcaagcacgtattgaatgcctactctgagccagacaataaaactcaaagatggaaaaagcaaaggccattatcctcaagatgggccacagcctagtcaaagaggcaacgtcacagaccactgtaccatacagcatgagttgtagggaagcagccacagagaagatggtccaggcaacaacgtagagcgaaggcctgagattccaaatgcaccatctattttacaattttgtcttctagccaatctgctgtacttatcgaccagggttagctgagcagagcagaccaaagaaggaatataaattaggcaaaactcaggagtaaagatagaacatacttgcaagaaaatttgctgaatcgcaagaatggtaactgccaataagtatctctggtcccagaagaattgactaaatcttttatggatgtttctgtagggggtgggagagaagtggtcaggagagaaaggaacctgcttttggagtttgcttttggctcacctgaagtctccacttggctaattaatcatttaataccctttttggtgtttaatgtttgcatagtgatctaacgaagacagaagaaatgaagacagatgcattcatttgcatgagttcacttatatatcaaggcttactgaacaaacactgtggtaaaacagtggaacttgggcaagtcaatatgtactgatgatttctttcttttgtgatttaaattgcaaatatcactccctcaattaagaggaccttgtagggagcactgtacactctttcaattagcaagcagcacaggcaacagatgatgtctaactagtgaggaaggaaatggttctgaatttgactttttccttaatcaccatatttatttatcttagaaaataaatggtataggtttacagctataccattacttactcaacataactgaacagaatcccactgatgaaatgaaatttagttgtttgctgtttttctttgtgtttgtaattcaatctttttaattactgaactccagaaatttttaagaaaagtaacagtgatggttggcaaacacaagagaattatgaaaagttcttacgaacaaataagaatatttaaaaacacagatggttatacaattaatatgcagaaaactatatcctttatatagacaaacaacagccagtaaaaggttattatagaagagaaggccccatttacaatagccaaaaggtaaaatccctggaaaaaacttaacaaaactgtgcaacatctatatgaagacaactttaaagtgcttctgaaggatataagattagaataaatgaaaaggcatcccattcattcattcaataagaactgagcacttactatgtgccagacagtgtttgaggcattggagatacaacactgaacaaaatggatactattcctgccatctaagaactaatattccagtggatagcataagtcaacagaaaaaagcattgattttctttaatcagttgtatatctatatagtagcaatgaacatatgtaccttaaaattaataatgaaatatcatatataattgttcaaaaaatgaaattcttaggtgtacaagtaacaaaacatacagtacttacattgtgaaaactaaaaaatgctgttgaaagaaattaaagaaggcctaaataattggagagacaaacatgtgcatggactgggagactcagcataacaaagacattaattctttccaaattgatatataggtttaatgcaaaccttatcaaaatcccagcaaaatattttgtaactatagacaagattattctaaaatttatatgaaagggaaaggaacaatttttaaaaagaagaaagtgggagtatttagtctactcaatttcaaaacttacatagttaagagtaataaagactgtgtggtaggccaggtgcagtggctcatgcctataattccagcactttgagaggctgagaggggagaatcatttgagaccaggtgttcaagagcagcaacacagtgagatctcatctctgcataattttttttttttttaaatagctgggcatggtagtgtgcacctgtagtcccagctactcaggaggctgaggcagtaggatcacttgagcctgggaggtcaaggctgcagtaagctatgatcatgccattgcactccagtctgggcgatagagtgataccctgtatcaaaaatcataagtaaaaccactgtggtattgatggagggatagacatatagatcactggaacaaaacagaggacccaggaatagactcgcacaaatatgacatactgttttttgacaagatgcaaatgcaattcaatagaggaaaggtagcctattcaacaaatgatgctggagcaatttgacatccacaggcaaaataaataaataaatcccacaacttgaccagagtttcacaccttgtataaaatttaactcaaaataaatcacagtcaaaaatgtaaaccataatattatagaaactgtatgaaatatttagaaactgtaggaaaacaggataaaaattttaagatctaggtttagcgaagggtttctagacttgacataagcatgatccataaaaggaaaaaaaaatcagcaaattggacttcatcaaaattaaaaatgaatgctctctgcaagacctgcttaagatgaaaagaacatctacagaccaggaaaaaatatctgcaaactacatatccaacaaaagacaaaagactagtatttcaaatatacaagcaactttcaaaactcaacagtaaaaaagcaaacaatctaattagaaaatgggaaaaagacatgaaatattttattaaagaggatatacagatggcaggtaagtacacacgaaaaaatgctcaacattttccattggggaaatggctcaaattacttaaaaattaaaactacaattgatatcattacacacttatcagaaaggctaaaataaaaattagtgacaacaccaaatgctggtgaggatgcagaaaattagatcactctgacgctactgatgggaatgtaaaataggacaactactctggaaaacagtttagcagtttattagaaaactaaatatgcaaccaccctatgagccagaaattatactcctgggcattaatcctagagaaatgaatgctttcattcacaccaaaacctgtaagtgaataattatcacagccttattcacaatagcaggaaacagaaacaaccaagatatcctgcaacaggtaaatggctaaacaagtgtggtttgtctataccacggaatacttctcagcaatcaaaagggtcaaactagtgctacaagtaacgacccagatcaattaccagagaactatgctaagggcaaaaagtcaaccccaaagatttcacattgtgtgattccatttatttaacattcttgaaatgacaaaattatagcactagagtatgggttagaagttgccaggggtaagggcaggagggaagtggatgcaggtataaaagagtaaaggattgatccttgtggtgatggatatgttctgtatcttgactccatccatgtcaatatcctggttgtgatattacatatagttctgtagatatttctattggggaaaacaaggtaaaggatataaggaatttctatattattttctacaactgcatatgaatctacaattatctcaaaattaggagtttaattttttaaaaaatgtcccatcagtgggtatatgattcaattggtctggagtacgcctaggcatcagtatttgaaaagttcctccagtggattctaacatgcagctagaattgaggaactacttgtggttacttaagagtgaaatgaacatgtgttgttcttttagtttatatatatcttttttcaaatggctaataagttgttaggataaaatatgaactgtgttgtttggacctaactacttagtaaattgaactagtggtatttcatttggcctggaggtgctgtaaaaaattctgagacactaaaggctctgtggactgagaaagtttagaaacttctgccctaggactttatcttgttttcattcagctggtggaaggggaaagacagctctcttgaaagccattactggcctgcttatgttcacatcccaagggcaagaacttattccatccatgtacacacataaattcaaaggaggctgagaactagagtctaaatagagacccatgcaatgggggtagggtggatatggagggacaggtactgactatgccacccagaggcaacacatgatggactaaaatacatcagaggctatgtggatgacatggacaccagacatattaatgaggaggaattttccggagttagagaccaattaggatgtgggaagcatggaagtgagtgaggatcaaaaaggccccaaggtttccaacttgtttgattggtggatgttgacatctgtcactgagaaagggaatctagaaaacaggaagtttgtgttgctgcgggtgattggagtggggcaggcacactatataatgtcatataagataaatttaacattgaaataccacagaaaaacttggtcttaaaatacttttcatcacacctcaaaatgctctataagatcttcaccacatggctgtagcgtaaaaagagaaagtacaatttcaaagcaaccactagaggcatattcagcaaaacaggcgaagctctttacttcttgaagtactattaactgcagagatttttaaaaatactattaacagttaaatagaaatactattggtgaaaactctgtaaagtaagtcacaaattttgaaatgctggtgtcaacaagagtgttttttccctgctgtatctccagcatctagaatagtgcctggaacattcacaggtcctccctggtaactgctggatgaacgagcacatcagtcccaaaacagggaattataatggggtggtgagcatcagcttgtggcaaacagaattattgctggacggtgcagaagcaaaatgataaaggagcagaatctgaacaggagcagacagagttatttccctaagcttacttggttgattaattgtaccaatgccttagtaaggggaattagggcacgcaccagaatactatagctatatctgtgtactactattgaaaaaaatattattgctcatactacagttttatctgtatattacttttggtggtgccactaggaagtttattcccctcaggaaataaacagatgctttttccaatactcatttcaagctcttcctaatatcccctggttcagcaaagctgtggggatcaaagctgggtttctgtgatgaactgctgcattttcagtctcagtttttgccacccagactagcagagaaaggtttttgggcattttccacctctgtgtagtgacatgagggatatactagaatttttctcatcccttgggagtctgaacataaatttgatcagtggcagggatgtacagcacataaatattacctggcacaaatattcatgtgaaacaaaattatgattgggatttatctcatgcagtgatgggagggctggattaatatctgtatgtttcctattgcacctccaaagaaaggggatatacaaatatgcagtgtcaaatacaaaaatatgtgacccctgaagatatgtgatatatgggtcaggattcttttaaaaatagattgaacagagatgttgactgtttttctggcataactgattcaggtatcaaatgccttctaaagcattaagttaaaaaaaaatccctgcttttaaaatatggcaatacgagaattgttccaatttctactgctcccaaaatcagttatttaattgtcaaaatttgctattaagctttccaatgtcaaacttattaacaagttatttagttttcacgggtcttagtttcctcacatctaatttagggataataatggtatctacttacagaatgtggtgaaattaagtaatacaattcttataaggaacttatggtaataacccacacagtaagtgttcaatatatgttagccaaggtattattgttgtcttattgtcattattattgttatttggatattggaaatttccagatatgcaaactgccaattttctactatattttgattgttatgaatataagacaaaagaattaacagtggtatttaactgttggtgaagtcacagactactttgagaatttaatgaaagcagtgaacgcttgtcccagaaaaattgtgtgcattatttcaggggaattcatgaattccccctggggtttatccatataccctactttagaaactctgacctagaagatcaggtttgagcaatgtgacaatcaaagaacaatttacgctggagtgacattttataattcgtgtgtatgttgggtagggggatgtagaatagcaaacagcacccacatctatcagtcacgtattcctacacaatcatctgatagtctaaataaaaccatgatgcaagatatcagaaacaggaaatggctcacctcagtgaaaccgcctctcttcctaagcatgatggcctgagtggtggacatttaaatgtaagagttgataagggccaggagaaagcactgggcaggatatctcggaatcacacttgcttcaagagcctcaggcagttttcctttggaaaaactttccatctgtaattttcacttgtaagctattataaaatcacattgttgacatgattgaaaatcggagtttacaagtaaaactgaagcaattggcatggctatctttgaatttaattactctgattttcaatgttcccttagataagttaactacattcttacaactacttatggactgttttgtcctaaaaacgtttttaagcatttataattgccagactctgtggtagaggctagtattttgaagaccaataatcactgcctctacctttctgcaattcacattctaaatgtctaagagacaaacatctaataattgcaatgaaatgtcgtcagtccatagcatggcctgggagcctgaaagggaataacagctcaacgtatgctgctgagaaagtcctctataggctacagatggctatttagaggtttaagttcttctttagatgaaagtagaatatttacttgcagtattactgttgtttccacttaatagagaagtgaagataccaagtattgcttagcaaattaatgagctatttttgggaggaaatcatttatttttgcatgtatttttgggtgtccttttggctagaatccttttttttttttttttttttgagacaaggtctcactctattgcccagactgtactgtagtggtgcaatttttgcttactacagtcttaacttattgggctcaagggatcctcctgcctcagccccctgagtagtgtgtgtcactaggcccagctaattttttaaaacaattttgttgttgttgttgttgttgtacagatggggtctcactatgttgcttcggctggttttgaactcctgggctcaagcgatggtcctgcctcagcctaccaaagtgctgggactacaggcatgagccacagtgccaggcagggcagtatcttatgttgaataactatttaaatatgaaaatccagaactactgtgcggggattagaatgatcagatgttctgatctgggagtccagctgaacaacaagggatgggagcagctgggtggataaaaagaaagaacactctggaagtgaaagaagatcctgagaaagatatcaggtaaggctgcactacagctagtgagagctagtcattgctgagttaggtcgcttagtgtttaacataaggggccaaatgttgcatcttcaaagacaactaagaggacaaggcttgaggttccattgtgcctgaaagggaaatggagaaaggataaacttcaacaagaaatcagacttcttaaataatcagggcaaagtagaacttagagctacactcacttggcctttttcttccatgaatatctaagtacccacgaatctaacatgagctaggaacctgactgaatagagagattaaaatgaagaaatttgtgatacttttaaagactatccattcttttaaagcagtttatacttttccaagtattcttacatccattcactaacttagccttcagaaaaactctgtaaagaagggcatactaccattttatagattagggacactgagacttgaaaattagggtcctttcattaggccgaacttcatgtctattttacgtacatgaaatttccgcctcatgtaactaaatgctacaaagtttcagactcatcatacagtaattgtcaaacaatggaccaaaagaatgtatagatgaaatacttttgagaaaagggaagaaaagtaaagctagcctcaagcagactccaagccacaagggcactagtaaatcagtcctcattttgtcacagatgcctgtgcatcaggggcatttatttgattgtcccttgtttgatgagacttgattcatttcaaatagaggaacagatggaaaactaatagtgtagtcactgcagatcaccaagaagcaaagcatctggggagccctatggactttccatggagaagccatgggcctgctgcagtgagtcagagcttcatgagagccctactcagacccactggaattcagaactggagaaggctgtgctgcctatatcaaggacagctctcacaccctgtatttggctttctctatcctaacagggagggtaccattctctcctggcccctctcctggtccctttcatttcttctgctctacatgggaaaccattttcttgtcacagagaaatgttccccattgcagtaagcagaaagagaatgagcagataaagcagtcactactgtttcctctttgatgccatccatcctttttattagtacctcaatcaccttatgtaacactatcttacccaagtataactatcttctagcctcactctgagtttgaaatgctttagtccctccctctcttcctcatttcctccctccttccctctccctcccttgtttccctccctatcttccattgaatatctattgataatttcctaaattctaggcactttgctatctagcagtaaatgatgtagacttagtccctgacctcaaggaatttatattctattaaaaaatacagaccttgggaggcagagcaagatggctgaatagaagcctccactgatcatcctccctgcaggaacaccaaatttaacaactatctacacaggaaaagcaccttcgtaggaaccaaaaatcaggtgagcgatcacagtacctggttttaacttcatatcactgaaagagccactgacaagagtaggaaaaacagtcttgaattgccgatgccaccccttccccatcccgcatgtctcatggcacgaagaatttatgagcttgggggaggaaaagtgctgtgattttgggactttgcattggaacttggtgctttcctatcacaatggaaagcaataccaagcagaagtcagccaacacccatggaggaagcatttggaccagccctagctggaagggaatcctccatcccagcagttgccatgtgagctccgacaagccccaccacagtggactaaagtggtttggggccctaaatctacttgaaaggcagtctaagccacaaggactgcaactcctaggcaagtcctagtgctgtgctgggctaagagcccattgacttggtgggcatgtgacctagtaagataccagctggggtggctaagggagtgcttgcaccactcctcccccaagcccaggcagcacagtttgcagttccaaaagtgaccccttccatcttcttgaggagagaagagggaagagtaaagaggactttgtcttgcaacttggataccaactcagctacagtcagagagggcaccacacaaagttgggaggtgtagcttctgaacaagatttctagacaaaacctgggccaaaactcactgccttgaagggaagaatccaattctggcaggtttcatcagcttctgacttaagagctcttggccctgaatagtcagcagtggtagccaggtgtagtacatgccatgggccttgggtgagaatctgagacatgctggcttcaagtgtgacctagcatattcccaactgtggtggccatgaggaaagactctgcttgagaaaaacagaggaagagtgaaggggactttgtcttgcaacttaggtaccagtttggccacaggggagtagagcacgaagtgggccattggggttcccattccaggccttggctcatgaatggcatttatggacctgctttgggctagaggggggcccactgccctgaagggagaatcctggggctggaagcattcattacaagctgactgaagagtccatggaccttaagtgaacatcggtggtactttggcagtattccccatggcacactggaggtggtggccatggggagaggctcctctgcctgtggaaagcagaggtagagtgggaaggactttttattgtgctttgggtaccagttcagctgcagtagaatagagcaccaggtagctttctaaggttcctgactccaggacctggctcctgaatgccatctctgaacccatccaggatccagaggaactctctaccctgaagggaactcttcaccctgaaggatggctggttctgctacttgctgattatagagttctagggccttgagaaaacataggtggtagccaagtagtggttacagcaggccttaggtgagacccactgctgtgctggcttcaggtctgacccagtgcagtcccagtgatagtggccacaggggtgcatgtgtcactccttccccatctccaggtggctcagcacagagacagactctgtctgtttgggagaaagtatggcaagacagtaagagtctctacctagtaatccagataatttttctggatcttatccaaaaccaccaagatgatgcctctatgagtctataagagccatagcattactgggcttggggtgccccctaatgcagatatggctgcagtgaccaaaaaattagattccaacacccacgtcccttcaaatacctgcagagctctcccaagaaggatgggtacaaacaagcccagactgcgacgactacaataaatacttaactcatcaatgctcagacactgatgaacatcaataaacatcaagaccatctaaaaacatgacctcatcaactgaataacataaggcaccagggaccaaacccagagaaatagagctatgtaacctttcagagagagaatgcaaaataggtgactggaggaaacttgatgaaatttaagataatacagtgaagaaattcagaatcctatcagataaatttaacaaagagattcaaataattaaaaagaattgagcagaaatgctggagttgaaaacatgcaattgacgtactaaagaatgcaccacagtctgttaataggagaagtgatcaagcagaaggaagaattaatgaacttgaagacagtctatttgaaaatagaggagacaaaagaaaaaagaatgaaaaaggaataaggcatgcctattagacccagaaaatagcctcaaaagggcaaacctaagagttattaaccttaatgaggatgtagagacagatagggatgtagagacagatattattcaaagtgataataacagagaacttcccaaacctagagaaatatatcaatatttaagtacaaaaaggttatagaacaccaaacagattgagcccaaagaagactgcctcaagacatttaataatcaaactctcaaaggcaaaggaaaaagaaagaatcctaaaggcagcaagagaaaataaacaaataacatagaatggagctccagtaaatctagcagcagacttttcaatggaaatcttacaggccaggagagcgtggcattacatatttaaagtactgaaagaaaaaaaacttttatcctcgaatagtatatctggcaaaaattgctttaagcatgaaggagaaataaagaccttcctagacaaacaaaagctgagggattccatgagcaccagacctgtcctacaagaaatgctaaggggaattcttcaatctgaaagaaaaggatgttagtgagcaataagaaatcatctgaagttacaaaattcactggtaataggaagcaccaagaaaaacacagtataacactgtaatggtggtatgcaaacttaagaagaaagactaaatgatgaaccaatcaaaaataataactatgacaacttttcaagaaatagccagtatgataaaacattaaaaaaaaaacaacaacaaaatgttaaaaagcagggggacaagttgaagtgtagagtttttgttagttttccttttgcatatttgtttatgaaatcagtgttaagttgtcatcagtttaaaataatgggttataagacagtatttgcaagccttatggtaacctcaaattgaaaacatacaacagatacataaagtataaaaaggaagagattaaaacataccaccagagaaacattaccactaaaaggaagacaggaaggaatgacagaaaaaaaaataagaccacaaaacaaccacaaaactaataacaaaatggcaggagtaaatccttacttatcaataataacattgaatgtaaatggactaaattctccaatcaagagacacagagtggctgaatggataaaaaaaaagactcaactatctgttgtctataagaaacacacttcacctataatgactcatagactgaaaacaagggatggaaaaagacatcctatgccaatggaaaccacaaaagggcagaagtagctatatttctatcagacaaaatagattttgagacaaaaactgtgagaagagacaaagagggctcattatataatgataaaagggtaaattcagcaagaggatataaccattgtaaatatatgtacacccaacactggagtacgcagatatacaaagcaaatattattagagtttaagagagagatagaactcaatacaataatagctggtgaccctactttcaggattggacaaatcatccagacataaaatcaacaaagaaacaatggacttaatctggactacagaccaaatgaacctaattggtatctacggaacattttattcaacagttgcagcatacacattctcctcagcacgtggatcatcctcgagaatagatcatatgttagcacaaaacaaatctctaaaaattccaaaaaatttgaaatggtgtcaagtatattctctgaccacagtggaataaaactagaaatcagtaacaagaggaattttggaaattcaacaaacacatggaaatgaaacagtatgctcctgaatgaccaatgggtcaatgaggaaattaagaagaaaatttaaaaatctcttgaaacaaataacatcacaaacacaacataccaaaacctatgggatacagcaaaagcagcactaagagggaagttatagctattaatactacatcaaaaaatagaaaaccttcaaataaacaacctaagaatgcatcttaaagaactagaaaagcaagagcaaaccaaacccaaaattagtagcataaaagaaaagagcagaaataaatgaaactgaaatgaagaaaacaataccaatgatcaattaaaagttgtttcttttctttaaagttagttttttgaataaacaaaattgataaacctttagccagactatgaaaacagagagaagacctaaataaataaaatcaaagatgaaaatgaagacattacagctgatactacagaaactcaaaggacctatattagtccgttttcatgctgctgataaagtcataacaagactgggtaatttataaaggaaaagaggtttaatggactcacagttacacatggctggagagactcacaatcatggaggaaggcgaaaggcatctcttacatggtggcaggcaagggcgaatgagagagccaagcaaaaaggaaaacctcttataaaatcatcagatcctgtaagacttactcactaccacaagaacagtatggggaaaacacccccgtgattcaattatctcccactgggtccctcacacaacatgtgtgaattatgggagctataattcaagatgagatttgggtgggaaaacagccaaatcatatgaggaccattagagattactatgggcaagtatatgccaataaattggaaagcctagaagaaatgtataaattcctatataaataaaatgtaccaagattgagccatgctgaaatccaaaatctgaactgaccataactcataacaagtaatgagattaaagctgtaataaaaagcctcccagcaaagaaaagtccaggacctgatggcttcactgctgatttttaccaaacatttgaagaagaactaatgccaatcctgctcaaactattccaaaaaataaaggagagaatacttcagaactcactctacaaggccagtattaccctgataccaaaaccaaacaaagacacatgaaaaaagaaaactacaagctaatattcccaataaaccctgttgcaaaaatcctcaacaaaatagcagcaaaccaaattcaagatcacattgaaaacatcattcatcatgaccaagtgaaatttatcccaggggtgcaaggatggtttaacctacacaaatcaatcagtgtgatatacccacaacagaatgaaggacaaaaaccacatgatcatctcaattgatgctgaaaaagcatttgataaaattcaatatcccttcatgataaaaaaaaaaaaaccctcaaaaaacagggtatagcaggaacatacctcaacataataaaaaccatataaggcagacccacagctaacatcatgctgaatggggaaaaactgaaagtgttttctctaagatctggaacttagaaagatgctcagtgtcactactgttattcaacatagtactggaagccctagctagagcaatcagataagagaaagaagcaaaaggcatccaaatcggaaaggaagaagtcaaattatccttgtttacaaatgacatgatcttatatttggaaaacccttaagactccaccaaaaacctattagatctgacaaattcagtgaaattgcagaatacaaaatcaacataaaaaatcagtggcatatctatatgccaacagtgaacaatctgaaaaagaaatttaaaaagtaattccatttacaacagctacaaataaaattaaatagctaggaattaaaagaagtgaaaggtctttacaatgaaaactttaaaaccttgatgaaagaaattgaagaggacacacaaaaaatggaaagatactccatgttcatggattggaagaatcaatattgttacgatgtcatactacggaaagcaatctactaattcaatgcaatctctattgaaatatcaatgacattcttcacagaaatagaaaaaacaatcctaaaatttatatggacccacaaaagacccagaatagccaaaagtatcctgaggaaaaataaaactggatggatcacattacctgacttcaaaatatactacagttctatagtagccaaaactgcatggtactggcataaaaacagatacacagaccaatggaacagaacagagaacccagaaacaaatccatacacctacagagaactcattttcaacaaaggtgccaagaatatacactggggaaaaggcagtttcttcaataaatcatgctgggaaaactagatatccatatgcagaagaatgaaactagacccccatctcttgccatatacaaaaatcaaatcaaagtggattaaagaattaaatcccagacctcaaattatgaaagtacaataaggaaacatcaagggcactctccaggacattgatttgggcaaaaatttcttgagtaatactccacaagcacaggcaaccaaagtaaaaatggataaatgggatcacatcaagttaaaaagcttctgcacagcaaaggaaacaatcaataaagtgaagagacaacccacagaatgggagaaaatatttgtaaactatacatctgacaagggattagtaaccagaatatataaggagctcaaacaactctatagtaaaagttttaatgtaataatccaattgaaaaatgggcaaaatatttgattagacatttctcaaaaaaaaagagagacaaatggcaaacaggtatatgaaatggtgctcaacatcattgatcagcagagaaatccaaatcaaaactacaattaaatataataacatctcaccccagttaaaagaaagggaataacaaatgctggtgaggacatggagaaaagggaagtcttgtacactgttggtgggaatataaattagtacaatcacaatgcagagcagtttggcggttcctcacaaaactaaaaatagagctaccatatgatccagcaatccctagcagcatatacccatatactgctaggtataagccctaaagaaaggaaattgatatatcaaagaaatatctgcacttccatatttattgcagcactatgtacaacaaccaggatttggaagcaacctgtgttcatcaacagatgaatggataaagaaaatgtggtacatacacacaatggagtactattcagccctaaaaaagaatgagatcctgtcatttgcaacaatatgaatggaaataaaggtcattatgttaagtgaaataagccaggcacagaaagacaaacacatgttgtcacttaattgtgggagctgaaaattaaaacaattgaattcatggagctagagagtagaataaaggttaccagaagctgggaagttagcaggggagtggaaggaaagtgaggatggctaatgggtacaaaaacattagaaagaatgaataagatgcagtatttgataacacagcaggtgactatagtcgataataattgtacatcttaaaataactaaaagagtataattggattgtttgtagcacaaaggataagtgcttgaggtgatggataccccatttaccctgatgtgattattatgcattgcatggctgtatcaaaacatctcatgtaccccataaatatatatacttactatatacccacaaaaattaaaaactaaaaaaaaagaaatactgacttaaagaaatagaaaattataacaatatggttagttatgattatttagaaaaacaaagggttaatctggggctaagttgggacagtcacttgaaaaatatttgcaaatggttcattatgccctaaaaaaccagccctattgcctcgcctctggcaagtcactaaatccttgtgtgccctaatctctgaactgtaaaatgagagaactgaagtatatggcttaaaaaaatatatatattttattgactttaaggtgccagcgatcgtaaggcacactgttattttatttgctgctaagaaagaatatgtctgggtttggtggctcatgcctgtaatcctagtaatttgggaggctgaggtgggaggattgcttgagctaagcagtttgagaccaccctggacaacttggtgaaactctgtctctacaaaaagatttaaaaattacccaggcatggtggtgtgctcctgtagtcccagctacctggtgggggatgtgggggtgttgaggtgagaggattgcttgagcctgggaggttgaggctgcagtgagccatgattgcactacagcactccagcctgggtcagagcaagatcctgtctcaaacaaaacaaaataaaacaaaagaatacgctgtcaatcaaattacaacataatgcttatcactaaggttgtttaagtattatacttattaaataactcaaagcacatgcatgaaaagaaaaatgtcagtgaaataaatcagtcaaggtgctcctacaacttttccacattcaccctctgaaccagtgtcactgatgtccatattttctatacgatattgtcctcatcaccagtactttgggcaccaagagcactgtgatgctgcattttttacagtgctctgttattgccccttggattttctttcaagctgctgaggctcatttggcaagtttcaatttttttgaaaaattactttatgaagcttgaagaaatattgagtataattaaactataatctaggcttatatacagcttaataatagttcagttccaaaagaaaagctattgcaggtgagaccgtaacatttcccaacacgattttaagacactgtgctgatttctcaaaacaactctgaggaacccatatttacagtagaaggagtttttatgaaaaatctggcattatgtatctttgttgcatgattatatatgtatgtacgtataatacaatgttagatgcaccatcacccccgaccccctgccgcacagttgaaaatccacatgtaacttttgactatcccaaaacttaactattaatagcctactgttgactggaagctttactgacaacataaacacatattgtgtatgttatatgtatgatatactatattcttataataaaagagaatgttgttaagaaaatcataaggaagaaaatatatttactatttattaagtggaagaggatcatcataaaggtcttcatccttgtcttcttcacgttaggtaggctgaggagaaggaagaggagggttggacttgctatctcgggggtggcagaggtggtagaaaatctgtgtttatgtagacctgtgcagttcaaacctgtgttgttcaagggtcaactgcatatgtatgtgtgtatgtatacagttatactatatatacagtatatacactatatacactgtgtgtgtgtatatatacacatataatccaacatatggactgtatatacacaaacacacacataatccaacatcataagaactagaaaacagaagttgtattccttaacatcagtattagagtgtagagtttgaggcttggatttagaaatgcttttcaacatgtagggtttggaaaaggagcaatcatcttgttttcaaaacctgaagtttttctcaggacttatgaccataactgccacagaggaaaaagggaagcttttcccactgtaattgttcatctgtgtcagaaagtcccatatcctgtgtagatcttataaatattttgctagatttatggcaaagagagacattgatgctgcaactgaagcaaaacacaaacttgaaaaagacaaacagaagaaacccaagaaaggaaggagaaggaaatccaatgggagacaagcttatttcatgaagatggaagatgttgggtttatgatgaatcattactgaattatcttggtgctgccaagcattgggctaggaatttctatttacttgattttttatgttgttgcaaatggtactgctttttaaatttccaattatgcattgtatataattaaatacaattgatttttaattgtaaaaaataaaaaaacaagaaagtctcatatccctgagaaaccattgcaataagaagggaatgaacaggttctcccaaagggagaatgtttgttgcttaattatgcttactgccctggccatcaggtataaactttacatttcctagcccaaggcttggcagcaccaagataattcagtaatagttcatcataaacccaatatcttccaacttcatgaaataagcttgtctcccattggatttccttctccttcctttcttgggtttcttctctgtctttttcaagtttgtgttttgcttcagttgccgcatcaatatctctgattttttttcttaatattttaagttctagggtacatgtgcacaacgtgcaggtttgttacatatgtatacatgtgccatgctggtgtgctgcacccattaactcatcatttacattaggtatttctcctaatgctatccctcccccctccccccaccccacaacaggctccggtgtgtgatgttccctaccctgtgtcccagtgttctcattgtttagttcccacctatgagtgagaagatgtagtgtttggttttctgtccttgtgatagtttgctcagaatgatggtttccagcttcatccatgtccctacaaaagacattaactcatcgttttttatggctgcatagtattccatggtatatatgtgccacattttcttaatccagtctactattgttggacatttgggttggttccaagtctttgctatcgtgaatagtgccacaataaacatatgtgtgcatgtgtctttatagcagcatgatttataatcctttgggtatatacccagtaatgggatggctgggtcaaatggtatttctagttctagatccctgaggaatcgccacactgtcttccacaatggttgaactagtttacagtcccaccaacagtgtaaaagtgttcctatttctccacatcctctccagcacctgttgtttcctgactttttaatgatcgccattctaactggtgtgagatggtatctccttgtggttttgatttgcacttctctgatggccagtgatgatgagcattttttcatgtgcctgttggctacagaaatgtcttcttttgagaagtgtctgttcacacccttcacccactttttgatggggttgattttttcttgtaaatttgtttagattctttgtagattctggatattagccctttgtcagatgggtagattgcaaaaattttcccccattctgtaggttgctggttcactctgatggtagtttcttttgctgtgcagaagctctttagtttaattagatcccatttgtcaattttggcttttgttgccattgcttttggtgttttagacatgaagtccttgcccatgcctatggcctgaatggtattgcctaggttttcttctggggtttttatggttttaggtctaacatttaagtctttaatccatcttgaattaatttttgtataaggtgtaaggaagggatccagtttcagctttcaatatatggctagccagttctcccagcaccatttattaaatagggaatcctttccccatttcttgtttttgtcaggtttgtcaaagattagatgattgtagatgtgtggtactatttctgagggctctgttctgttccattggtctatatctctgttttggtaccagtaccatgctgttttggttactgtagccttgtagtatagtttgaagtcaggtagcgtgatgcctccagctttgttcttttggcttaggactgtcttggcaatgcaggctcttttttggttccatatgaactttaaaatagtttttttccaattctgtgaagaaagtcattggtagcttgatggggatggcattgaatctataagttaccttgggcagtatggccattttcacgatattgattcttcctatccatgagcatggaatgtttttccatttgtttgtgtcctcttttatttcgttgagcagtggtttgtagttctccttgaagaggtccttcatgtcccttgtaagtgggattcctaggtattttattctctttgaaacaattgtgaatgggggttcactcatgatttcactgtttgtctgttactggtgtataggaatgcttgtgatttttgtacattgattttgtatcctgagactttgctgaagttgcttatcagcttaatgagattttgggctgagacgatggggttttctaaatatacaatcatgtcatctgcaaacagagacaatttgacttcctcttttcctaactgaataccctttatttatttctcctgcctaattgccctggccagaacttccaacactatgttgaacaggagtggtgagagagggcatccctgtcttgtgccagttttcaaagggaatgcttcagtttttgcccattcagtatgatattggctgtgggtttatcataaatagctcttatattttgagatatgtcccatcaatacctaatttattgagagtttttagcatgaaggttgttgaattttgtcaaaggccttttctgcatctattgagataatcgtgtggtttttgtctttggttctgtttatatgatggataatgtttattgattttagtatgttgaaccagccttgcatctcaagggatgaagcccacttgaccgtggtggataagctttttgatgtgctgcttgattcagtttgccagtattttattgaggatttttgcattgattttcatcagggatattggtctaaaattcttttttgttgttgttgtgtccttgccaggctttggtatcaggatgatgctggcctcataaaatgagttagggaggattccctctttttctattgattgaaatagtttcagaaggaatggtaccagctgttgtttgtatccctggtaaaattcggctgtgaatccgtcttccaaaaaaaatccaggactttttttggttggtaagctattaatcattgcttcaatttcagagcctgttattggtctattcagggattcaacttcttcctagtttagtcttgggagggtgtatgtgtcgaggaatttacccatttcttctagattttctagtttattttcatggaggtgtttatagtattctctgatggtagtttgtatttccgtaggatcagtggtgatatcccctttatcattttttattgcatgtattctctcttttcttctttattagtcttgctagctgtctatcaattttgttgatcttttcaaaaaaccagctcctggattcattgattttttgaaggtttttttgtgtctctatctccttcagttctgctctgatcttagttatttcttgccttcagctagcttttgaatgtgtttgctcttgcttctatagttcttttaattgtgatgttagggtatcgattttagatcttttctgctttctcttgtgggcatttaacgctataaatttccctctgaacactgctttaaatgtctcctggagattctggtatgttgtgtctttgttctcattggtttcaaagaacatctttatttctgccttcatttcattatttacccagtagtcttccaaaactgaccacatagttggaagtaaagcactcctcagcaaatgtaaaagaacagaaattataacaaactgtctctcagaccacagtgcaatcaaattagaactcaggattaagaaactcactcaaaattgcacaactgcatggaaactgaatgtctctgatttttaagttgaaagtacatccttctaaaggcagtgagattcatattttttctgatctttcaacttcctatcttcttcattatagacatcttcttggtatctacaaagactgcattttcccctgttgcatattttgcatacattacaccattccattccccttcagttgagcagaaggcttctcatcctttggagaaaaaaatcacagtggtaattctgtgcttcctgtccccagagaaaggttcagtgtggaagatgatgtttgcactatcaccagttttggaataattaatattgcattctcctcctagttccattcagagcactgcgaggatagaacatccgtaaacactggggaatgtgaggatgtaatgtttctcatagttaaaacaaaagacacagggcttgtggccccaccctatgttgtgtgtcccaattgacatcctgaggaattttgattaggtccagatatcaccaatgaattgaatctttctgataaacactcagcataaaaggctaaagtaggtggatgatgggaaatctgttcagctacaaattttacattgtttttggaaacccagggaactggtccttctaaaactagctctgtgttctctttggtatcatttggtaatatccattgacactgaaagatcttgctaaaatgactttttgacaattgattctttccttcttgcatgaaaggctgagaggtaccatttcacattctgaaccgttcaatccctggtcaccaatgttcgcaaaaaggttggatatgcaaaaaatgtctgcatatgcttctaaaagagatcctctttcaagaaaaaatggtggaagatctactttagtaagatccatactaagcctaacctgtgacaagaagtgtgtggtaacgctcttatgctcctccatggaccctgcctcctccttgtcaggtctctcatcatgtgaatcaagagtcagcatcacttgttccattggatgtgaaagaattaagtgattctgtgctatctgggcactttagtctgttttccgcactgccatgtgtcaagattgacgcagattcagaagaatctattaagtgctttggggatgagccatgttgatgacattcatcagcattgtagaattcatcttcactgctggaataagagaattctgggattgtatttagagaagccattgacatggcttggagaagttagaccgctactaggtggtgaatgggcactgcctctactatttggtgttggagtctaatgatgtcccaaggcaattagtacaggtccaactggtcaggaagatgaactctgctctgtcttatgcagttgagtaggttccagagggaggtgagacagtctgggaaggcattgtgctgatcacaggttcccagggactaggttgatacactgcatctacaagattaatagtacttataattctatctgcgtgcttctcagcattattctggtcttcagcagtctgcatcaacacagtgcagtgtttcattgattccaccatgctatttgcttctctttgagagtttcagttttctttctctgcttattatctttgcagttttgaagcttgtgatcaaaaaactttaattgttctatcaagatttgtaggtgggcatcagtctctggagcggtggctcacgtctgtaatcccagcactttgggaggctgaggtgggtggaacacgaggtcaggagttcaagaccagcctggccaagacagtgaaatcccgtctctgctaaaaatacaaaaattagctgggtgcggtggcaggcgcctgcaatcccagctactggggaagctgaggcaggagaatcgcttgaacccaggggacagaggttgccgtgagccaagattgccccactacactccagcctgggtgacagagtgagacttcgtctgaaaaaaaaaagaagttaactttcctgtcaaagttttggacactaggaacaaatcctgaatccaaatctctggaggtgacaaggaaggaggcaaggaaagtgtgacatctgagcccatagcctggccctgggcaggcaccagggaccatgggactcaggggtggaggttaggcctctcccagaccctcagggtgtactcactccacaagtgtccagcaagaaagtaatttgcaagacccccacactctgtgcctccaggatagagagggggctgggggctgcttccgagcaccccttttccttctccacttgattggatcctcatttggcaagttttgatacttgtgcttcttgagcttatgggaaagtatcaacagaacagtttagacaacagtacatattccctcctcaggtttatttcaggttctactcagtttcaggtttatttcctgaaacttcaagaagttacatttatccaatgatatcaccaggaactgcaaccaagtaagtgcatgcacaggcaataataataatattatgattatcacatgtctaagaacaactataaaatgcatcccagttcacagttgttaaaatgtgtatgttggggggtagtttgtaggcattgcatgtatgtatgtatgtatgtatgtatatattagagacagggtcttactccgtcacccaggctggagtgcactggtatgatctagctcactgcaaccttgaattcctgggctcaagtgatcctccagcctcagcctcctgagtagctgggaatacaggtgcatgccaccatgcctggctaatttttaaaatttttgtacaggtagagtcttgttatttgctcaggccagtctcaaactcctggcctcaagtgatcccagcctctgaaagtgctaggattagagaggcatgagccaccacaccgggcctcaactgaaattcttccagagaagatagagaccaaataggcatatctctaagtcctaggtcccatcttcagttatgctagtcagttttttcctcttattcctccacataagattttgaaaagaggtttctactgctaaaaaaacaagtgtgaacccctgtcacacttgtatggccatttctagctttagcattctctaagtctataataatgctgcacaggctaagtaactgagtctcgaatttctgggaccttaactggcacaggcttcttccaaagtcttgggaggcatcctagcaatgtattcacaccaccatatggttttgtcaaattcgaaaaatgatatttttgtattttttttcttaaagaactccctcccctcaaattgtataaacttgaggcggcacaaaacctagatcttcctttgatcatacaattttatatcaagacagcacttaagttggccagaagagtcacatacatttgattctcacagaaacccaggatcctacagatgaaaaatctgaagcttttgaaggttagacaacttgcctaaggacaggtatcaggcaaatccttttgtgaggacttaaaactctaacttcagttctcattccacatccagtcttctttctgcactatcactttagttaacatgggttgtcttggcttgaccaggttgccaaagtgactcttatcataaaagagttctgaattctaattgcaagttctaagactatttttcttttattctgaatgtaaacatgaaactgtaaaaccaattgtagctcaagtagcctgtgaaagtcactttcacacgatgtgtaagagaatatttaccgatttgtattgagtaaaccacctgccaaaccctcacttgggaggccacaccagttccagagaataacaactttgtgttaaaattccagaaaaatatgcctgctgagtatcttttttgttgtgtttgtttaatctttgttaagctcagtgatatatgcacatataagaacatatttttctcatatctgaaatctggatacatacttcctgaaaatgtattactactgcctttgtttttttttcattgcatattttcctttcacagattcatcatgtagtctgaatataatacccactcttgttgtcaagcacaaacagaaaagagtacagtttccctttaaaagcacaatgccctattgatgcctttaaaagtcattaaagaatatctcacaaagcccaggagagcattacaataattgcttccctttcctaggtgaaaaaggacatatctgtcaaatagaaaagtgcagaagcaattaacaccttaatactctactgggaaattgcctgaattaacagagatgcttcatggttattgtatttctaaagtttagttactagcatgactgtcctcagtcatttccatttactttccccaggacaacagggctcggagttaggtatgggcatggcagagggtgtatttgagtgtttgcatatgaggcacacatggttcttcagtcacatgtttcagaggatgaatgcagaagtagggctggtgtatgcacttatgaaatcaatacgtaaggatacatatgttttaaatcaacttctcaggcctaaaaaaaccccacacttctggattctgtgctgcccacccatggaactgccttatcagtcctcttccagggctggggtactcaacagaaagtttatatttaccaggccttcctcagaaacagcggaggcacatgaacgaactggggagtgaatcaaacaggtaaaaacccttgtatatcagcggcaagatctagaaagagcctagcagtccaattcattatctctccctcttccaggagatgttagatggtgtttattgagtacagtctaggcatacctacctggttagaattttgagagacactgaaaaagtaaacagggcctgggtcccttttccttaggaagaaacaaacctgtaaattatagtaaaggtaaagtgtgtttccttcctcccaccccacccccaagcatggctattctatgagggatcagggcaactctcagaattctcagagaaaatcatatggggtgttctagtttccatttttacacaggtgaaatcagacaaaagtgaaaaaagacagcatggaaaaaagaaagtagtaatgaactcaggacaatgctgaaggaggagggggcagttggttcaccttgtctggtgacagggtaatctcaggtgaccttcaggagctatctggctcaacgcctatttccatttggttttctttgctacgtgtctacagtctccacccagtaatggtctgaatacccccagtgtgagaaactaatcctcccagaaagccatctatgccttcttcagatagcttccatggataataactcacatttattaaaaactttatatgcagtaggcctgacttggtatgccatggaggacggtgttctctatgatctcatatgttttctatatgacagttctctatgatccttaactcctgatgttcactgcccttagatgtcctctttccttgagtgtgggcatgacctatggcttacctctaaccagtagatatggcaaagcttccagatgcatgttgttatatatatgccgactatgcacatataacatatgtatatatgtcggcatatatatgttgtatatatgtcggcatatatatgttatatatatgccgactgtagcacctatcatgctcacagccttgtctcccttgtgggctttgaggctggggctgaaggcagcctctggggctgacagccagcaagaaaccaaagccctgaactgaattcggccaacaacctgggtgcgcctgggagtagatcctctctgagtcaagactcagtcgagactgctattctatttgacaccttgattgtagctctgtgagaccctaaaaaggaccagatgagccgtgcctagaatcctgacccacagaaactgtgggataataaacgtgtattgttttaagctgctaaatttgtagtaatattgttacatggtgatagataactaatgtaaatgctttatgtgtattaactcgtataatcctcattacactctcatttcacacaatgggaaaactgaagcatgaaactgaagcaaccagcttaattccacacagtagtaggtggcagggccggcattcaagtaaggcaggctagctccagagcctgcgttcctaaccagataggtgtgctgccttcctatgcttagaaagttctaccttaagctgcttcctagtctgattccctaaagcttgaccccacagcacgaatcaaacatccaaacacaggtgctagtcagagaaactgaaagaaacaagctgtgctggacacacatgtacagggtacggatgtgaaacagggtgaagagcaacaggtgctgcctcccagtattcaccagccaaacgagatgcttctgtgtttagacggtgactgctgagagggggatcatgctggttggtgccctctggcctatgagttctagttctgcctctaagatcatggaaaacatgataatcccttttccatatgagctgaaatatttcaaactattgatctttttttcccccaaatcctctattttctcttactcacataaatggtgagttgtttttgctgttctcttttgcaaatggtcttcttgacacgtgcagaaacaaatggttgtaggctctgtgtggtatcagctggcagagatgcctcgtcttcttcctcatctgcagggctgggtcagggatgccccccacccacccaagatatggttctgataggcagcgtcaattcactgatattctttcctgtcattatagcggttttaaaaaaattatccaggtaataaacaaatgcgttttagtgtaagattccaatgagacagaaggatttggggcaaagcccaagggcactcctctgcactctccttctactcctcccatctcagaggaagccactgtcaaaatttgtgccaacctttcactctctcttttaaaacactaacatttcacctaaattggattgaacaccacaaaatgacttgctgttttccaacataccaatatgtcttggagatcttttcatgacatggcctacaggtctacctcatacgtttaacagttttataaaccttcctagaataatgacatcctaatttgtttgaccattcctctattgatagatattttaggttgcttacaatatttcattaacatcttcaacatgcatctctgtacagactgacttgctattatattttatacccagttctgcccactttcatggtcaactccactctacttgtcctcttgcagctgactgaaggaactctctgttcccacttttcttttttttttttttagacggagtctcgctctgtcgccgccctggctggagtgcagtggtgtgatctcagctccgccttctggattcaagcgattcttatgcctcatcttcctggtataacaggcacccagccaccatgcccagctattttttttttctatttttaatagagacggggtttcaccatgttggccaggatcatcccgaacttctgacttcaggtgatctgcctgcctcagcctccgaaagtattgggattacaggcattagccaccgtgcccggcctccattcccacttttcaacagtgaatcagagttgggagaggtcccttcctattcctggtgacaccctcttccaaaccaactgacattctccctcagaggcagtgactgatgataacagtggttgtcaagtctacttatatatttttttgaagcattcctttatcagattaggatgattctaaaaattcaccaccttttatgagtagcaagcacagttacatcttcatgcacaggtgtgagtattattaaaggatatattcccagaaatattgggaaaaacatacattttaaaatatttttattgatgataccaatgtgtcttccaaaaagtttatattcctatgaacaattagaagtgtttatttttcggtatcctagataacacttgatataatcagcattttaaatatttaccacttcatttattataaactcctaaaactttctttccttcattccttgtgtctgaagagcagaagaagagttcttgccaccataatgacaaccaccttcatctggcctcctagaaagaatagatcctggataggctttattagcttataggcaatgttatcctgcaagaatggtagctaaaaggtgttcaggacaactagaaaatttttccaagttctgtagtcccaaataagaagaacataggcaagaagtctctgcttgtagaagctggtataaagttacttttagcatttagctgaaatactgagctactcagttccaatgttgtacctccagtggcttcaaaggagaaaaatcttaaagtagaaaggattgactttaaggttaaaagaaaccttatgccaaaggtaggcaaaatcatattaaaagaatgccctagctgtttagaatatattcaagtttctagagtcagataaagttaagccagagaattaaaataatgtataaacatgactatgaaatgaagataaaaatcaaaggtatgctgaaaggctggaatgagcaagaatctcaatttctatattgaaggatgccagaaatcttagacctctgggatatgtcctggcaacattttagaaaggattattataccactgaagaataaggaaggtaaaccaccaccatatagaaagataatatacactagttatgatattttagtatttcagtgggacttttagaaagatctctcataataacctgtagagaggatggactaccatgaactgagtgaaaatgatacccaaagcctgcaaatcagcatgcatgggtaaaaggcaagatctctgccggggatgctgcaaagctctgtccttggcactgctatgctcaaaattgttaacactatttgatgcttatcaaatttgaagctaattcattgctaagaagagtagtagatgtatgtgatgatcaggaatagagactatttcatcaagttggaaagagaagctgactcactcgagagctgtgtacatagctgaaagaagacagcctttgaattaaggtgattctaaactcaaatatcagtcccgttgttgggtagacttggacaagttacctaagcctctgtgagccttaatttcttcctccacaaaagagggataacacctctgttttttaaataaataagactgacatgatttttggtacataacagatgctcactagtagtactcttcctcctctcctcttctcaaacattactggcagaatataagagaaataaatgtgcagacaattgaatggagagtacagagttgcacagcattacacagagtactacccctcaagggtggaaacctagctcttaagagtgattcataagaataagacctgtatgtgttagttgatggcaagttcaatataaacaaacatcattatttcatttaaaaatacagtcataatctgcgttgagtattacatccagatcaggtgagctaatggttttcttgaactctgttcttttcagaccagcagcgtggcaaagtgtctagttttggctgctccatgctaaagaccattgacaaactaaagaaagactagcaggatatggaaaacatgttctataaggcagaaccggaggaaggaacatattttatctggtttaaacaacaacagcaactcaagcaagagatgatagatgtattcaagtatctgaatgactgactttggggaagctcagaaagattagaagagccagtgggtagcggttcaagataagaaacttcagtccatcagggtaaggaatgctcaacagagatgtaaaaaagcaggggttactttgtaagacagtaagtttcctgtgtctaaaaatattgaagcagaagaaattagatgtggagtttccaatagtgaaagtagaacacaaaggggaaaatatgtgtatgtgatgcacgcacatatttttttaggtgtttattagagaaagatcagtaagagcactccgagttccactctatcattctatttcatcattgtgtaagggttgatttataatattgatgagatcctaaggcaggtgatgaaaggagactctttgatttgacaaacatgggttgcactctgctatgaacactactgggcaaaactttgtgggtggaacttttaataaagatacattttcagctgggtgcagtggctcacgcctgtaattccagtactttgggaggctgagatgggaggattgcttgagcccaggaattcaaaaccatcctgggcaacatggcaagattgtgtacctacaaaaaaagttaaaaaaaaattagctgggcatagtggcatgtgcctgtggtctctgctactcggatgctgaagtgagaggatgacttgagcccaggaggtaaagcttttagtgagccatgatcatgccactgcactccagcctggctgacagagcaagatcctgctttaaaaccaaccaaccaatcaacaaaacaaataaacattttcttgaatttaagggactataaccttaaattaaatgtaagtctgcaatccaggaaaacaattgcagagcaacttgaaacaggatgagtgaaactgctgaaaacttcaataaaaatataaaatattctgggacaggcatggtggctcaggcctgtaatcccagcattttgggaagccaaggcaggtggatcaacagagggcaggagttcaataccagcctgactaatatggcaaaaccgcggtttttttttttttttttgtaaaaatacaaaattgaggggaggagcaaagatggccaaataggaacagctctggtctacagctcccagtgtgagcgacgcagaagacgggtgatttctgcatttccatctgaggtaccaggttcatctcactagggagtgccagacagtgggtgcaggtcagtgggtgcagcgcaccgtgcgcgagccaaagcagggcgaggcattgcctcactcgggaagtgcaaggggtcagggagttccctttcctagtcaaagaaacgggtgacagagggcacctggaaaatcgggtcactcccacccaaatactgcgcttttccaaagggcttaaaaaatggtgcaccaggagattatatcccgcacctggctcagagggtcctatgcccacggagtctcgctgattgctagcacagcagtctgagatcaaactgcaaggtggcagcgaggctgggggaggggcgcccacgattgcccaggcttgcttaggtaaacaaagcagccgggaagctccaacggggtggagcccaccacagctcaaggaggcctgcctgcctccgtaggctccacctctcggggcagggcacagacaaacaaaaagacagcagtaacctctgcagacttaaatctccctgtctgacagctttgaagagagcagtggttctcccagcacgcagctggagatctgagaacgggcagactgcctcctcaagtgggtccctgacccctgacccctgagcagcctaactgggaggcaccccccagtaggggcagactgacacctaacacagccgggtactcctctgagacaaaacttccagaggaacgatcagacagcagcattcacggttcacgaaaaaccactgttctgcagacaccgctgctgatacccaggcaaacagggtctggagtggacctctagcaaactccaacagacctgcagctgagggtcctgtctgttagaaggaaaactaacaaagagaaaggacatccacaccaaaaacccatctgtacatcaccatcatcaaagaccaaaagtagataaaaccacaaagatggggaaaaaacagagcagaaaaactggaaactctaaaaagcaaagcacctctcctcctccaaaggatcgcagttcctcaccagcaatggaacaaagctggacggagaatgactttgacaagttgagagaagaaggcttcagacgatcaaactacgagctacaggaggaaattcaaaccaaaggcaaagaagttaaaaactttgaaaaaaacttagatgaatgtataactagaataaccaatacagagaagtgcttaaaggagctgatgaagctgaaagccaaggctcgagaactacgtaaagaatgcagaagcctcaggagccgatgcgatcaactggaagaaagggtatcagcaatggaagatgaaacacgtgaaatgaagcaagaagggaagtttagagaaaaaagaataaaaagaaacaaacaaagcctccaagaaatatgggactatgtgaaaagaccaaatctacatctgattggtgtccgtgaaagtgacggggagaatggaaccaagttggaaaacactctgcaggatattatccaggagaacttccccaatctagcaaggcaggccaacattcatattcaggaaatacagagaacaccacaaagatactcctcgagaagagcaactccaagacacataattgtcagattcaccaaagttgaaatgaaggaaaaaatgttaagggcagccagagagaaaggtcgggttacccacaaagggaagcccatcagactaacagcggatctcttggcagaaactctacaagccagaagacagtgggggccaatattcaacattcttaaagaaaagaattttcaacccagaatttcatatccagccaaactaagcttcataagtgaaggagaaataaaatactttacagacaagcaaatgctgagagattttgtcaccaccaggcctgccctaaaagagctcctgaaggaagcactaaacatggaaaggaacaactggtaccagctgctgcaaaatcatgccaaaatgtaaagaccatcgagactaggaagaaactgcatcaactaacgagcaaaatcaccagctaacatcatcatgacaggatcaaattcacacataacaatattaactttaaatgtaaagggactaaatgctccaattaaaagacacagactggcaaattggctaaagagtcaagacccatcagtgtgttgtactcaggaaacccatctcacatgcagagacacacataggctcaaaataaaaggatggaggaagatctaccaagcaaatggaaaacaaaaaaaggcaggggttgcaatcctagtctctgataaaacagactttaaaccaacaaagatcaaaagagacaaagaaggccattacataatggtaaagggatcaattcaacaagaagagctaactatcctaaatatatatgcacccaatacaggagcacccagattcataaagcaagtccttagtgacctacaaagagacttagactcccacacattaataatgggagactttaacaccccactgtcaacattagacagatcaacgagacagaaagtcaacaaggatacccaggaattgaactcagctctgcatcaagcggacctaatagacatctacagaactctccaccccaaatcaacagaatatacatttttttcagcaccacaccacagctattccaaaattgaccacatagttggaagtaaagctctcctcaggaaatgtaaaagaacagaaattataacaaactgtcagaccacagtgcaatcaaactagaactcaggattaagtaactcactcaaaaccactcaactacatggaaactgaacaacctgctcctgaatgactactgggtacataacgaaatgaaggcagaaataaagatgttctttgaaaccaaagagaacaaagatacaacataccagaatctctgggacacattcaaagcagcgtgtagagggaaattgatagcactaaatgcccacaagagaaagcaggaaagatccaaaattgacaccctaacatcacaattaaaagaactagaaaagcaagagcaaacacattcaaaagctagcagaaggcaagaaataactaaaatcagagcagaattgaaggaaatagagacacaaaaaacccttcaaaaaattaatgaatccaggagctggttttttgaaaggatcaacaaaattgatagaccactagcaagactaataaagaaaaaaagagagaagaatcaaatagatgcaataaaaaatgataaaggggatatcaccactgatcccacagaaatacaaactaccatcagagaatactacaaacacctctacgcaaataaactagaaaatctagaagaaatggataaattccttgatacatacactctcccaagactaaaccaggaagaagttgaatctctgaatagaccaataacaggagctgaaattgtggcaataatcaatagctttccaacgaaaaagaatccaggaccagatggattcacagccgaattctaccagaggtacaaggaggaactggtactattccttctgaaagtattccaatcaatagaaaaagagggaatcctccctaactcattttatgaggccagcatcatcctgataccaaagccaggcagagacacaacgaaaaaagagaattttagacccgtatccttgatgaacattgatgcaaaaatcctcaataaaatactggcaaactgaatccagcagcacatcaaaaagcttatccaccatgatcaagtgggcttcaaccctgggatgcaaggctgattcaatatatgcaaatcaataaatgtaatccagcatataaacagaaccaaagacaaaaaccacatgattatctcaatagatgcagaaaaggcctttgacaaaattcaacaacccttcatgctaaaaacactcaataaattaggtattgatgggacgtatctcaaaataataagagctatctatgacaaaccaacagccaatatcatactgaatgggcaaaaactggaagcattccctctgaaaactggcacaagacagggatgccctctctcaccactcctattcaacatagtgttggaagttctggccagggcaattaggcaggagaaggaaataaagggtattcaattaagaaaagaggaagtcaaattgtctctgtttgcagatgacatgattgtatatctagaaaaccccattgtctcagcccaaaatctccttaagctgataagcaacttcagcaaagtctcaggatacaaaatcaacgtacaaaaatcacaagcattcttatacaccaataacagacaaacagagagccaaatcatgagtgaactcccattcacaattgcttcaaagagagtaaaatacctaggaatccaacttacaagggacatgaaggacctcttcaaggagaactacaaaccactgctcaatgaaataaaagaggatacaaacaaatggaagaacattccatgctcatgggtaggaagaatcaatatcgtgaaaatggccatactgcccaaggtaatttatagattcaatgccatccccatcaagctaccaatgactttcttcacagaattggaaaaaactactttaaagttcatatggaaccaaaaaagagcccgcatcgccaagtcaatcctaagccaaaagaacaaagctggaggcatcacgctacctgacttcaaactacactacaaggctacagtaaccaaaacagcatggtactggtaccaaaacagagatatagatcaatggaacagaacagagccctcagaaataacgccgcatatctacaaccatctgatctttgacaaacctgagaaaaacaagcaatggcgaaaggattccctatttaataaatggtgctgggaaaactggctagccatatgtagaaagctgaaactggatcccttccttacaccttacacaaaaattaattcaagatggattaaagacttaaacgttagacctaaaaccataaaaaccctagaagaaaacctaggcgttaccattcaggacataggcatgggcaaggacttcatgtctaaaacaccaaaagcaatggcaacaaaagccaaaattgacaaatgggatctaattaaactaaagagcttctgcacagcaaaagaaactaccatcagagtgaacaggcaacctacaaaatgggagaaaattttcgcaacctactcatctgacaaagggctaatatccagaatctacaatgaactcaaaccaatttacaagaaaaaaacaaacaaccccatcaaaaagtgggcgaaggacgtgaacagacacctctcaaaagaagacatttacgcagccaaaaaacacatgaaaaaatgctcatcatcactggccatcagagaaatgcaaatcaaaaccacagtgatataccatctcacaccagttggaatggcaatcattaaaaagtcaggaaacaacaggtgctggagaggatgtggagaaataggaacacttttacactgttggtgggactgtaaactagttcaaccattgtggaagtcagtgtggcgattcctcagggatctagaactagaaataccatttgatccagccatcccattactgggtatatacccaaaggactataaatcatgctgctataaagacacatgcacacgtatgtttattgcggcattattcacaatagcaaagacttgcaaccaacccaaatgtccaacaatgatagactggattaagaaaatgtggcacatatataccatggaatactatgcagccataaaaaaggatgagttcatgtcctttgtagggacatggatgaaactggaaatcatcattctcagtaaactatcgcaagaacaaaaaaccaaacaccgcatattctcactcataggtgggaattgaacaatgagatcacatggacacaggaaggggaacatcacactctggggactgttgtggggtgggggaggtgggagggatagcattgggagatatacctaatgctagatgacgagttagtgggtgcagcgcaccagcatggcacatgtatacatatgtaactaacctgcacattgtgcacatgtaccctaaaacttaaagtataataaaaaaaaatacaaaattagccaggcgtggtggcacatctctgtaatcccagctactcgggaggctgaggcaggagaatcacttgaacccgggaggcggaggttgcaatgagctgaggtcacgccattgcatgccagctggggaaataaataaaataaaatattctgggtgttataaaaatgattatggaagggagaagttagaggagagaacccagtggaatggaatatgctatatgggaatgtcacgggcctcagcattagaagggtaagtttaatttgtccctttttaatttgaggaggcagggtttgtaagaaggaagaggggtctattagttagcgctatactgcactgcagggtaatactctgacagtgtcctaggtaatccactctcccagtctttgaaatgatacctcctctctctctgcgccttgaacatctccttcccctccatactctctgtggatgacctcacctcttatttcactaaggaaatagagcaatcagaagatgactcacacatcttctcagcagggactgtagcaccctcctgcctctatgcccttccacactgccttccctcccgctgacccgttggtgcacactggatgcacccctgcctcttttgtttttttatatttgattattttattattttatcaattatgatattcagatatacttcttttttttccttctttttttttattatactttaagttttagggtacatgtgcacattgtgcaggttagttacatatgtatacatgtgccatgctggtgtgctgcacccactaactcgtcatctagcattaggtatatctcccaatgctatccctcccccctccccccaccccaccaccgtccccagagtgtgatattccccttcctgtgtccatatgatctcattgttcaattcccacctatgagtgagaatatgcggtgtttggttttttgttcttgcgatagtttactgagaatgatgatttccagtttcatccatgtccctacaaaggacatgaactcatcattttttatggctgcatagtattccatggtgtatatgtgctacattttcttaatccagtctatcattgttggacatttgggttggttgcaagtctttgctattgtgaataatgccgcaataaaaatacgtgtgcatgtgtctttatagcagcatgatttatagtcctttgggtatatacccagtaatgggatggctgggtcaaatggtatttctagttctagatccctgaggaatcgccacactgacttccacaatggttgaactagtttacagtcccaccaacagtgtaaaagtgttcctatttctccacatcctctccagcacctgttgtttcctgactttttaatgatcgccattctaactggtgtgagatggtatctcactgtggttttgatttgcatttctctgatggccagtgatgatgagcattttttcatgtgttttttggctgcataaatgtcttcttttgagaagtgtctgacccctgcctcttcaaagactgcttttgcttttatcccctcttcctcctgcacgattttctctcattccactatatcatccgcatcagcacacgaacatgctgcatcctctcttatgtatatattttaaagttctccatagaccacatgctccctctggccactctcccatttttctgctccctttgatagagaaactctgtttagagttgtccacattctctgcctgttactcaagtcctattctcacctccacccattcaaatgaggcttttactcccaccttttcaccgaatctatttttgtcagggtcaccaaacctctcttcttatagaatcttatggccaattctcattcatctcatcatcaatatttgacctagtttttctctccctctttagtgacatgtggctcataacttggattccagggtactacattctcctgatcctcataatcactgcttttgtttcttcatatctttggctgaatcttccttcactgccaacctctgaggcttagtatgccccagtttcaaaccttggacctcatctcaatctatctgtgccacctagaagacctgtcgcccaccctcaagggtgtaactaccattgacaaactgagagcttcaaaatttctatctccacctaagctctcctctgagttccccactcccctgttccactgatccatttcttcctgggttattttctgtttcagtaaatggcatcagtatttacccaattgttaagagcaaaaaccctggaattatcccagacttctcttttcctctctcagcccacatccaatttgtcagtaggttatttaggttctttcttcaaaatttgaccatattttactacttccacctctacctcctagtctaagccatcatcatttcttgcctcaaatactgtggcagcctgctaactggtcttcttgtttccacttttgtctccttaaagtctattttccatatagcagttagagaaattaaaataaacaaaaaagaaattacatcaatacattaacccctacaatggcttcctatactgctcagaataatatccaaactcttaccatggcctaaaagctctacaggacacagccttgtctcttctccagactcatcccttacaccctcagccttgcttcccagtttctggccatgctcagccattcaatttggcataatattgttcaacctcctctctcttttcttgtttcttttcacttattagcagaagtttctttctctgtttatttaaaagccaaggtttttctgccttcagggactttgcatttgctcttcttttggcctagaatcctcttcctccagatcattacgtggttcaccactctcaccactcatttcaggcttactccaaagtcaccagctcatggaggccaaccttggcctttggaggcaatggaggcctcaggttttctatctgagcatggaccccataactttctgctcccacactctctactgtttacactagttcatttccctttattgtacatagcatagcctgaccttaggccaggcattcaatgtttgctgaatgcctgtttcaactgctagcctgccagctccaggaggacagaggctaataggctggattcacatctatattcctagcaccaggaacagtacctggcacacagtgactgctcaacgagtaactgttggataattacatgttgaatgaatgtatgagggtcagtttagaggaacactcagaatcaaaaagtgagagatcattttagttataatggatgtagcgagcaagtaaaggatgggccagagcaaaaaggagaatgcagcgagtgtgcacgggtgaagggcaagggatcaatgtgtcagtggtttacattccgtgcagaaggcagaggggttccaggggtgcaatcaaactgctaaagagagcaaagagctttgccaggtgctgtaaagtatttccacccacattttgaaggggaaatctttataacatctgtttaatgtgtagcccagtaataggttttagaaatgtataagaatatttgattttaaaagaatttgtgtatcacttatatattttatatatttatatatagatattatcagagtcagtgagtcaagactgactatgatgccacagaacacagtgactcgtttcattttctcggtgttattttacagctttgcattattctgtggttttaaaggggaaacataaagcatagttatggtgttaccagtttcagaataagtagttaaaagccttcttggccaattttaatttttttccttgactggaaagctctgaaaggcataagtgtatggaacgaactgtaacacaacccgaagccctggtagttcgcctcctcggtttctcctggtactcagttacttagagagataatggcatgagccctgtgaccccaagccattactcattaacccccctctaattgagggctctagtcaatgaggactgagatggatggagtctgtgacttggatggacagagatcacccacattcagaggcttctgctcacctcacactttcttgatacttctgagcagaggctcaactggccttgagaagtcagtcttcacatttcattctaagtaaggattctcttcaccaccttttcccttccctcactactcaggattatggtcaaaatttatatttaactggggtttatccaaggtctaccgttttctagccctgtaattttagacaagcgactttagctctcagaacttcagtttgctggtggggtgcagtggcttacgcttgtaatcccagcactttgggaggccgaggcaggtagatcatgaggtcaggagttcaagaccagcctggccaacataatgaaaccccatctctactaaaaatacaaaaattagctgggcatggtggtgtacgtctgtaatcccagctactcgggaggctgaggcaggagaatcgcttgaacctgggaggtggaggttgcagtgagctgagattgcaacattgcactccagcctgggtgacacagcaagaccgtgtccccctcctacaaaaaaaaaaattaaataaataaataaataaataaataaataaaagaacttcagtttgctcatgtgtaacaggggaattaataaaacttattttcccccggtgatgtttctgaggaagaaatgagatgatattcataaaaatggctagtccaatacttggtacttagcatgaaatacatggtaactagtacttgtataattattcccctcccccaccttctctctctctctctctctctctctctctctctgtctgtctgtctctctctctctcttactctcgctctaggttaggttactcctatgatcatttcattcttgttattccctaagctttggcgtaatattgttcaacttcctctttctcttttctcgtttcttttcatttgttaaaagaagcccccaaagcctttcactgtcattcaaatgacatgtttctgcactacaaatcaacaactacttactgactactgacaaagtgaagttttgtggttgtcaaagtcatgtcttctgagaagcatctcattccaagtcagtgtttcccaaagtaggtgtgtataaatattgatggatgcaagatgatttaaggtgacatagaaacctttgtttttaattttcagagttagaaaacatttatttatattagaaaaatatgattagcatataaaattacagagagtaaagcctacgataaacctaagtaaagaagtataccaatttaaacttacttaaaataatattaattatagtataggtggaacacaaatatataacaaaaatcatgaggatgacatgtgagtaactgacatttgggaagctgttctgagtcaatataaggtcaatagataagaaaagagtattaataggcccaacttctctattcaacagtaatctatgtaagatgcttcttcactttcctcagtgccaatcaagccatacatcttttacccaatttaattttctgaagtcacctacaaccctaggttgaaggtctagccaaacccaggaatgagagaattaatttttttttcactgcaaaagtaatagagggaagagactttttccttatagctcttatggacatatcctcagtcggcctctaaaatttttctgacactggaggctgttgctagctgtcatcagagtcactccgataccacatgtacctggagcacaacattgaccaagtgccacctctcctgtgacaaaggggtacccaaacggggattcgggaaatatcaaagcacagtcaccacaaaaaaatttcccctaaattgcatgctggaagaattattgtttaaaaatcacttgctgcatatgcaccactttattgtatttcagccaatgtttactaaggcatgaaagaagttcaaacataatagactgtcattcctccaaatcactaatgaaagctatggctctgaacacacaaatcaaggtgctggttttgccttgtgctatttgaggagcactcagtatgtactcccagccacatagcaaactggatcagttctctggaggagataattaatgcgtacctgccataataagtaatatgttcggctctgcattgctctatttatagactagggtttttcctcatattttttagcacttttctacaagcagaacatgtgaatgaatcactcttatcttgtcaattttattattaaatggtgctcaactttttcctagggtgttttaggactgcacagacattttctgggcaaacagaaacaaatgaggctggggggaacctctggcttttcaaagtctctagcttctggctgacctatattccattcattagtcttgggcagcaggcattttgttggaaatgtcatgttgggtggagcttcaaggccaaatgtgagaatctgctgcagcatacaatgagacagaaaacatgtggtcaacagagaacttgttgcacttttttttgtaggaaagtatgccagtcttagggccacagattcctcacagagaaaatctacctgctgacttttgcttattcattcattccacaagtattgatccaatacctaacatttactaagcactgttctatgcactggagataacaggtgaacaagatatagaggacctgccctcctgtagcttacattttagctagggactgagaaataaaaaaataataaatttatcagttaatttcatatagcgataactactatggaaaacaaaacaagacatgggagagggacagaatctcaggtatatttgcaatgctatcagtcttgactttataatcatagaaacttatctgtaaagaagcaatgtaatttagctactttcttaaatattcagtaattttaacactcgtaaacataattttaggttctttcttaaggctgacactgaatggctttggcagagtacacccggcccttagttctcattgtcctcactttggcccactgggagcttgtgaggatacagggacagcccaactgagaagcaaaggtacttatcccttggtattttccccatgttgatcatgtcctcattaatagcagattttgccttagtttctttgggcagcaaccgtgtactttgtatgacatttcatacttgcttgattcaactgactttggtttctcatccctgagatgcactcattttttttgtttatttttattttttactttttgagaggggctctcactctgtcacccaggctggagaacagtggtgcaatcaagattcactgcagccttgatttcctgggctcaggcaatcctcctacctcaatgtcctgagtagctgggaccacacgtgcatgccaccatccccagctgatttttgcattttttgtagagacagggtttcaccatgttgcccaggctgtaactcccaagctgaagagatctgcccgccttggcctcccaaagttctgggattataggtgtaagccactgtttctggcgtcactcatttttttggagagtctcaatagtagaactaaccagatgaagcagaaccaggcatttacacacctgaacagtggtatagctgtaaagtcctagtgtaaaagtcacactatatatcttctgtaataataaaaaattacacaaatgaagcatctaattatatgaataaaaaagactggaaacatttggaacagagagggcagaaccttcaaattcctgttgtagcctcttaacttaaggttaccagctcctccctggtgtcaagggtatggtattatggggattattttccagactttgattgttcaacagatgttgaatttcctggatgcattctaatcagcttgactgtatacatcttgggctactggacattttagattctcagcttcatatttttactacccacttccaaatacctaaatgtgagcaacaacaaagactgatgtaaactgtactcccttaagaccaaattgataagcatttcttacagtctaggaggggaaaagaaatcccacacaaacattcatggcattattctggatacagatttaagaaaatttccctgggtgcatcaaagtttagaaatgtaatagatatgaatatttgacatcttcctgcatttgtcaattgtccagaattctttgggcaattaatcaagagtgacataagcaaaaaaagatgtcctatatagaaagaggaggcaagtcaaataagtaatatactaactctaggctttgaggtcaagtgtagtatcctgtcttcccttcacaaatgagacagacattattaaatgcctcatctctaagtgggcaagaccacaaattattgcaaaatatgccaaactcaaagtctgtacagattttctctaatgacttggacaaacccttcaagtggtcaaacttcatttcaccagtaatctgtcaaatacaggagaatcaatagattctttttaataaacattgatatatggtagaatctgttagttctgaatacctttgtccttggaatttatcttatttttgaaaactaatggggagaaatgaaattgaaaatacatctccctaatatttttaatcaaatattaagtctctaatacaaacttaaactttggtgtcatagggacactcatgtcattttttactatcatccatattaaaattttcattaaaccttatggaaaactaaaaaatccttttattcttacatttaatgccatatgagacatgattaaaatgacaagttcccaaataacatgaataatgtatttctcctttatcgaaagcaaacgcattttgctcctaagagtgtttaatccatttcctttttcaggaagaggaaaggagggtgataaaaggatttacggttagaattggtatttaatgaaagacacatatttggcttgtgattataaaataactgctgtagttattctgagtttagataggagtcatatattttgacatgaataaaaacaaattatgattctgttaacattcagatttacctctttaggacagaaatgtttaaagttactctgtattagtcatggaaatagtagagtctatattaagaagccttatttctgtgtatgtatataaatgttaacttcaggaagcaccagatctacatttatagaataagtttcaaagaacagcttaaaatatcataaaacttagatagagaagcttaaggtgccttctgctactttacactctttttccactgcattccaccccattcatcagagaaagtgctaatatgaacggtcaaatccagtcatcaactttggaccactgggagtggagctttaggggagatataggcaaaagccatagctctgttaagatttcagcctcggctgggcacggtggctcacacctgtaatccctgcactttgggaggctgaggtgggcggatcacgaggtcatgagatggagaccatcctggtcaacatggtgaaaccccgtctctactaaaaatacaaaaaattagctgggtgtggtggtggatgcctgtagtcccagctgctggggaggctgaggcaggagaatggtgtgaacccgggaggtggagcttgcagtgagccgagatcgtgccactgtactccagcctgggtgacagagcaagactccgtctcaaaaaaaaaaaaaaaaaaaaaaaaagatttcagcctccttgtgtttgcttactccccagcagctgggacaggtcaatggccctggagctgcatcttacttgggaggggcctctgcatggagaaggtcagaaactagtacattagccaaactctcctttagggcttcttttcattggtgcacttttctctagaggcatctttccatgctaccggggtgttaaaaataccttgagggaagtaggattgggagtgagcacaggagaaggagactaagactgtaaatgtcatctagattaagcttgtccaatccacaacccataggctgtaatacagcccaggacggctttgaatgtgccccaacacaaatttgtaaatgttttaaaaacattatgagatttttttgtgattcttttttatttttattattactttttttagttcatcagctatcattagtgttagtgtattttatgtgtggcccaagacaattcttccaatgtggcccagggaagctaaaagattggactctcctgaattctggtgcttacagctctatatggtccagcttagtccaggagtggtcaggagaccacttcaggatttttcatttgaagctctggtaaataataaagaggatacatttacttggccttttcctctgtgcatttttctctctctcatggacttagtgggggcacaagtggacatggtaggtgattgctcaagacttctggatgttgggtttcacctctctttaagttacttcttggccaaagatctgagaatactcttctttttgccagaacaaaagttcataggtacttttaagtaagacagtaagggatcagaactccatgagtcattagtcagtcaggaggcaatttccaagaagtttgttaattctctccctaaaatactattaagtaataatctactgttaactactttggtttcttagccctctggctggtgcaatcttttttcttgaactgttctaaataactaagaaaattctgaacactcctaatatctctggcccctaccttaagagagatgaacaaaaagggttctatcaatggtcaagctccaggaaaacatctcgtaaaactcaccaacagttaatgattccagtgacttttaaatctaacataaagagaaggaaaaaacaaaattcatgatgaaaaataatgtgtgccacaaaccagggattatgatgaaccaattctgtgtatttaacatgtaacttaaaaaactactttatgactttaagaaaaaggaaggccttcaaatgtgttgtcatttagaatgtggcattagagaacccatgaaaagaaaacattgataatagcatatttgcttagtatcccatagagttgtaaggacactgggaagtctcctgcttcttcccagcagtggaatactcagtaccagtgaatgtagggtagccaagaaagaattgatgggtaactgatattcttgaacttcaaacgggatatttctttaatgctgacaaggagaaagaggataacacagtccagagctgactgtaatagtttttctaaatgcgaccagcatgaagaatgatgttttataggataaaatagaagacatctcggcactgggtgatgccatctaattgtagaattcaaattgctttagaatcttcaaagcaccaaaacaaggatgtataacatattcataatatgtgtcttcataagtcctatactttcaaaatgaatctgagcctttggaataagagtgaaaataaccacctgaaatttttataaaaataaagaataatcatgaagagagttactcacaaatgggattcatcttgctctttattcaaatggaaaattcttcctttcactgacacatttgccaaaccattccagttaatgtaggaaacaccactttgtttctcctgaattgctaaaactattgtactctaaaatcctgtagctgaggtttagctgtactcaatttgcttgtataaaatatataatacatcattttacataaacgtttaaatgcattaatgcttttaactcttctaagtacaattgcttccataaggaatttttccatgaattatttagttcagattgtttgaatagcattttgaatttcctttcctctttaatttcagaacttacatgtttttgtgtcattcacaaatcaaagcttcaaaatattgacgttttggggtaaagacatttaaagatatttcttcaaaatgttttgttggaaagacatatatatgactcattgtattacaataatatgactcacactttcctaaggaaacaaaatcacaaattttataagagctgtccaatggaagcaaactcaggttcaaagagatgagaagaaaagaataattttgcattcagcatacatgatctgttgcggcaattgtgaatcccttatttctgccagctatggctcagtaaagaaatggatgctattgtgaaagtcatcccctgaaaatgagatgagagtaagtaaatgagtagagttgatacaaattcaagtcattttgcaaaggattttacaatgatggattacaagatgaattctcacaagttggcaaggttttccaaagtctagcttttatgaatattgtttgaacaagtgttgtagaattcagtctatgctctgtgaaataacatgatttattattattattattatttttaccaagttggaattatttagaatcaccaaataacaggattcaaaagtaaaacagctgaaaaatccaacagtctggtctaacctgggatgctctgtctcctcacagccaacgctccatcaggcggctttgtctggctggcggatttagtgtagggactctcatctgcaaaggtacaatgaagcgtttggttaatttccatccagtttctaatgcagtgaagatttttaacggattgcaatccttctgcgagagagaagtggtacagtacagtggaaagtgtcggtaggcctgggtcctatacttgggttagctgtgggataaatctttgaaaatgttgtgaatatgtttcttcccctataaaagagagataaaattctcatctacttcttagggttgtcaggatcaaaagctatagtgctcgtgaagatatttatgaaacggtaagaagtatgcaaatatagtatacaaattatttgtcacctacatttattgataaataaataccagtgaataggtgtaatgaagacaaagaagaaataaaatggttcaatgggcactaagaataatcaggtagaaagaagaacaaagaaagtaaaaaggaaggtaatatttcagataagcagatgacagagagttagtattgcaagggaaataaagccactcagagttagtaggttcctcctgggagtgtgaactggcagccagtgcaaagcagagggatagagatgttcagagggaagaccagaggagctaggttgagaatagggaaggaacgatggtttggcaaaagaagacatatattgcaatgagctggtttgtgctcttttagaaagagatgaaaataacttgcagaattattaaaagagcaactgagaagacagaaggtctaaagcttaatgtatgtgtgagagttaggtaagaagctgaatgactaaaacagcaggtgacaagatcatggagacaatgggtccatccagctctaagtaaggtgatttttttttaaccttgaaaaggattttatctgactaggaataaaggagtagtaatctaggatggcaaatattaaggttaaaattgaaaggacaattcttcctaattgggatggtggcatttataaaaagtaaaagaaatgtgaataacacccttaaacatttcaagaataagatgcacatggcttgagtaaatagaatgtaaaataattatctagcatattcagtcaagctagataatctaaatgtcactgctggccacgctataagatgtatcgttgttgttaccattttataatagcaggaaatcgttaaagaatttaaagaaaccatactgtgcatgacaaactattacatataacaaggatttattcagaacaaggccttatcatctgagaatattaattctcccaactaaatagcttgtgtttcaaaattgaggaactcatttcctctctaggatgaacttctggtttgaaatgattcatgatttcttcataaaattaacaaggtctttatacgcaatgacaaaaggaaaagattaacactgctgtaagtggcaattaacttaaaaaatagaagtcacgctgtttcatgtttatatttaatttgtcacacaattttttatattcttccaaccataaagataaactaccaactttcagataccaattcaatcaatatcgcttttgctttagaagtggtatcttaggtcttcgactcttctctttgcaaacaccattttgagtataattaaaatccacaaaacaaaatacaaaatgtaaacattacactataaaagtctccctttgcctcaccattgtcacttgaatatttgagcgcttttctcacagtgttaataaacaggcaatatgcttcatttagcaccttttaaaacagacgtactatgtattaaaacctgggattctttataagactgctttaaaaatgtatttcctttcattgtccaaaaccttgaaacagtgtgtttatgagcatagagcactgagccagaaaataatcacaacaaccaggcttaggtacggcatcttggaagcctaaaagatttcctcagttttctatttgtcaagattccagccaattaaagtcttgaattgaatccagtgttggatttttataaagggcaataagagattttcccaggagactctggggttatctgcacttgatgctctattttaaggagctagttctttagaaatgtacccagtttgcatttcagaagtagtgaaccctggtaaaatggttttctcatttatatttgaaaacaacttccttgatttagaactgagatagtctagttgagcacatctttaaaaggttgaaactgaattatagatgaccacctggccagcctctccatcaccacccccaacctccactcctgctcccagtatcaagagtgaacttactgagcacaggcaaaagtaaataattatctagaagccaaatcttgtattggttaaaggatcagaatgaaaaagttcagtgttatctaatgttgtcccaagcagtgttattgctttcaccctcactgccaaagccaatcagtgtaaaagcaataattcctaatggaagggaggcagaggcttggcaacattgatcatcagagttaaggagggcatagcagcagagcagcatggcacaatgtaacacttggtttttaagagactttccttaagagtgtctctttattttaaataccttagaggcaccatggccttttataaaaagctacccatcacagaataaacaccagctctcttgacgtgatttactgaaagtcaactcttgattcaaacttgtttgaaaatagaaatggagaaaacacactgaatgaatccgtggctgatggctccacagtaggatactaaaggacaagagtgtccagggtgcatttcaaacccttgagcgtaaagtcatggagaactatggaggcttctatcttctcttgcgtctctaaatgcagctttatagatatatccctagaatttcatgcttataagggataatctagaccactctttcattataaatggaactaaggcccagaaagataaatttatagaagggcacacatctaaattgagtctagatgaaatttcttatgttcttagtcccatgttctttcttctttatcttatttccttttagatagacaataagatttcataagtcattgggtccacatgttgctgtgtcacaggagtgagtgagtgggcacactgtaccagcagagaccttgtatggtgtaagttaattgctacagtgaagcctttgaaaaggagcctgagccacagagccaattattttcgtgtgtatataaatcccattcttccctcctccacatatttgttgcctaaagcaaacaacacttacaaatggtactacagaactaatttatgcttttcagttcatttccttgaagataaaattcaaaagcaatgtcaatatagctcactgatccccaggatgagccttaaaagagtcactgaattataagatctatgttaataattttcctttgtttcattggagagatactaaataggctttcaagttacatccagatatataaacgaacaaaaaaaaggtcaaatgacaaggaaagaaatcaatcagaaccatccctagcacatcgtaggcattcactaaatgtttgctgataaaatatgtgaattaattatattcactttttcaaactagagcatttattgtaatcaaagaacctgaagaaagtgaaacatttgttataaagctatattccctcctacttctgcttttctttttctaggttgatagcctattccttttaaagtcacattatcatccaatagctattaagtattgacttaatgtgaaaaatctgactataaaaatggtatctacatatatttccttccattttcattcagattatagaatgatttattgaccaacctttaaaataatgtctttaaacaaaagaattatgattttcatagcagactctcagcccagacttcgatgatcatattaacaagggattctcactaaaagtcactacggggcaaagcagacattcagctagtgagctactgctcgctgaaatgaatgctccaagcaatcattaagggcatctcagggtatcagcactgccagccttttctaacgacatcttagcagctaggtaatcaccgtcacacatgatggccctccacaggggcttacatgttggtcacaataaggaagaacatgggtccctttagagtgacatctcatgaggctagggaaaaatgccctccattaacagggagaattgacatggtgacaaaggcacagaaagcattagtcaagcatacacttaaagcagaagaagaacaataggagggaccatctgtccctctcattccccccaatttggccagtctcctcatgtgccaaacactggaggggcaaacacagatcatttgttttgatcacatgaagctggtgtttataaacttggaaagcaaccagtgggcacctaaggagcaatgcttcactctgcatcacaaactgcctatgctggagctgggagaatcacattgtgaggaagggagtcaggtctcctcatgctctcaaatcctccaacgtttgcttggtatcaaacagcatccttgtgtcatcaggctggttcctgtttctccatttcctgagactctcatttctcactctgggctatgcagaggcacccgatatgaatatggtttcaggaatctctagctgtgttcaaagctttgctgaagaaagaaaatttaatttcctttggctgagactaatcgtcctatgctaaacaattcctagcaactaattatgcacaattgaggcacctgctaagccagcagacccccttaacatcttgattaggaaaaaataaggcatttggtgcagttaaacattatgaccatttcccagcagagaggagacaggcagggcatgccacagtgttcatgcatgtccttacaaacttgaaagaaaagtctggtttccattaatgaacaaaataaaatccgctgtggatgaaacaatctgtcccttgaattcaattaaatgccacacaatttagtacctactatgtgcaaactaagactaaaaatacacaaaagataatgacaccttcagtggagtggtgatggcagaatcattactacctacatttgagactagaacatggtactggattacccgacggggtgagtgagcatgggcttagggttaggtggaggtgaagcacaggatgagaaagggagatccaccattaggaatttatctatggttttttaatcagaaaagtcaagaaacaagccattttaggctttcagataacatggtagttttgtgtggtggggagccataatcttttcagtaactgggtcctgtgaacattttatcccagtcagcatgaacatatcatggttgcttctctcccatagacaccagccttccagttccatttgcttccctggtggtttgacagcacactttgaaatttaagcaagatttcctgaaggataactgttaaggctttttgacaacagagcttaattatatctttctcttcttgctaaaatgatgtgtaactacaatcacgggggccccgcataatttaaagaaattaaattgttcataattcctgatccaaataaccctatttttctagggccaagcaaaaagtgcattcatgatctctcctagagtcagaaggctgccaagtcctacacaggctttggctctacagctttggtatgtggaggctgcaacatttcatttccttccctaatctgatggagtggtccatacagctaagtttacaccagaagattagggaatgatctgagcttgatggcaagaagcagaggcagtgtgcttccctgtgatagtctctttcctatgaaaagatgacttcccccttctaccttccctcctcccttttgttatttgttttgcatctgcatggcattaatgtctatccttgactctgcaggtttcctcattgtttcataattcagacacaaatgtgctctatattcctaaagggaccagatcttttgcttttttttttttttttttttttttttttgagatagggtctcactctgtcaccctgcctggaatgcagtgatatgatcgtggctcactgcagcctcaaactcctgagctcaagtgctcctcccacctcagcctctgagcagctgggattgcaggtgcatgccaccaagcctgacttttttaaaattattttttatagaggctaggtctcactatgttgcccaggctggtctcaaaaactcctggcctcaagtgatcctcccacctcagtcttccataatgctggattataggcatgaaccaccacatctggctttcttttacttttgaactttggaaaaaaaaaaacacccaaacagagcacaatttcattttaagaacaaatatagagtggtttcttcacaatgatagaatgtcttctaattaaccataatctgataaacacttcagggattaaatattgaagctaaaaagaatggcaacaatatagctcacattgttttaggcctgtgttataagatcatttcttcccctactgctctattatctaactcttgcttctcaaaatgtggaccatggatgagcagcaggagcatacctgggaactgtcaaaaatgcagaatctcagcctccaccccaacccagggaatcagagtctgcatttagcaaaatctccaggttatttgtatgcacgttcatgtttggaaagccctgctccaactgatacgaccaacagcaactgcacaggtagtgaggatacacctgttccaatgtctcacttggttgcatcagaggcagcctacaaagcagctggcagaatgccagtcatatcagcaaattccaagagtatccccaggcctgcaatgatcaaattgctcatggaatggtttcttcaaatggaaaggaaactgttgtaatggtatggttttgagtgaattcaatcttcccttgatccattttaaacctctcaacaatcctgaaatggctgaattataggagtaactagatctatctaaggtcagattcactggagcaagtgactgattgtaataataatctattagtcaatttacattttaaggtggagagaggaaatggtattgaattactaccccttagctagtaaaggtcaaatgaaaataaaaagttatattctgcctcatggcagggacatgagggaagaatcttccatggcactgtctccttaaattcttcctcctcagatacaaatttgcttccttgcatctgcacagttctcctgcaaccaggaagggctccagcacagaacccagcctctgatctgcacacagggacaaacagaactgcgatggccccggagcatctggacaaccttgtggaagtggtctgtgctagctagtctgctcagtgatgcctgcaggccttttgggaaagtaatatctttagccaggttaatttgtaaatcctctctgaaattaatgagcatgaaattgcacattttctgcctctggcattcctattcctaatgtgtctgaatcacaaatgataactcctatgcttcttcctaatattgtttccagcaaggacagctgaaccagtctgttaatggcagtcacagacctgcctcatcaccgaagaatcaaaatttgtcaagggctggaatgtattccataaagttcattttcatgaccatatcagatcccaattaaaaacattaaaatcttaaattcagtatatctttcacattttttctttgtgagagggctatgtgctttaaagctttggtttagccatcagattatgccagctgacattttcagtctctcataggttcaataaatgcttagctttagaatgacaatttggtgcaaaatttggattgcctcagctgacattttcagtctctcataggttcaataagtgactagctttagaatgacaatttggtgcaaaatttggattacctcagagtaatgagtactggctatttaaaatcacattttaaattcttgtttaaaaagcacactattcttcaggaaaaagtatgtattaacaggtataaacttgctagaacatatccgagtattcctggagggataagaaccagtgtttgatttcatgtaatggcaactgagtggtaggattaatagaaatcaataatacatttggagtaattaaggtttctccatttttttttaactaatgaatatgaaattcagaagtcacttatatatatatatacatatatatatattcacaatttggactgcagtaaatttaggggaaaatttaaaatagtacataggttttccttagataattcaagaaagaatgtttaaaatgttctcatggaaaagactgaaagtgatttttaaacaaataagaatgattagtttcaaaactgaatcatttaaacaattatatctcttgactacttaaattgcttctttttttgccccttgtttggaacgtttttggatttctaatgtaaaccgtagagaaaaagagggagctttctgttaaatcagggctctcaagagtccttcttttacatgacattactgcaaaggtttccatatttagaaattttcagtatgatagctgctagaatgaagtcaagactgatgggaaaacaagcagcagcaaaatgcaatcaggatgacttcatttgaagaggtctaaatcttgtgccagtgtgtgaatgagcactgatgtctaggaaaatgatccacatatatctgtggggcggagcattcctgtgtatgtttgattattgagaaattagcctttaatgctctcacctgttgctctgacaatcggtgacaggataaaactttataacttcggtaactttaaaacctggttcagtggctcactatgatctttccttctttttttctgttaatcaagtgtagtgtaaattgatacatgtcaactgcaggcaaattatataaataattgatcagatagtcaccactgctgagaaatttctaaataaaatggaaataaaagtattatcaccactgtttagactcagtttccaatacacaaaatgaaaatgcctctatatctagcatcctggaataacaaggggacaatgtatagtatatatttataaccttgagtaacattttggagctaagagcacagatgattcttcccagggtcattgatttgactgaggaacaagggctatgtgtgattgcctagatgtgtgaaaatcactgtgcaactctcaactccctctctcgtgtcttaagtgtgtaacggccttagaaacaatggtccaaaggatgttcccaataagccaagggaaaccaagatttttccaggcatcaattttcattaatttttaaaacagtgaaataggtgatgggactttgtggtaatggagaaaatggattaagtcagaacttatcagagtgcaaagtcgatggcaggaaaagtaaacctcaggttgatgtccctggttgtatgtaaggggtataagttacacgaagaaaaatgagagtttaattataatcatatatttttagatgcctctttcattaaacagcaatcccactggtttcctctataagtaatctaaataatttcttagagatctgttatttcattctgagttcagtttgagtgtacttcagtcaaccagaagcctttttaatgtaaatgatactaataactttataaataattagagctaatacttacagagcattcatgagatgccaacatgagtctaaatcctttatatgtataatcttatctcttctcacaataactcaataaaatgtaaaataacaaaacagataattccattttacaaaaggagtagtggttttaagaaagaatttgtcctcatctaaataggttgcatggcaaatctgaaatggaactgctattatattaaagcctagggcagggcaggcatattacatgcctagcactctgcttggtacctcacatacattatcagtactcacaacaatgtaattgcacaggtacaattacataacttgaagtatggggatacagaggcttatagagatgaaattatgtgcctaaatttaccctggaagcaacaagcaaaaatgaagctttaacatacgtatctctcttagccaccacgatacactgtttaccaaaatttgattcacatccttacttggagagagagagagagagagagaaagagagagagtgtgtgtgtgtgtgcacgcgcacatgtgtgtataaagaaaggcactccttcacatagtagccactactgtgtatattctgcatgactaaatgtcactgatatagggacttggggctgcatttgaagatcttctgaaattgcagtttagaaaagaatatatcacctcacccaatttttagacatcacttcttcatcatgaattcttggtttaatttatgatataagatgcaagattctttccagcacataaacaaatcacttgaatgaatgcattttagccaagaagctccaagcattttagaagatgaaatctggctgaatttatttctctaactcccactctgagccaaccattctctacagatagaggatttatgaacttgttcctataaatggtttatcattttaaaatgaataaatactgggacactctcttttctcctttagtattctagacaacaagttcatggccttctgcttacaatatttcaaaccttttatgagtgttcatgtagccagagtggggaataaatcttggaccaggccacatctagcaacacaatgaagaaaatggtggtatgacttgtgtagctggcaaggagatcgctgagtctgcctttccttaccctctggctctccaggctcatctctacaaagagccaagctccatggcagaggtgctgccacctcaattctcagactcaggagtagctcatgcagcagagtcactgggtagacaggcatgaattttttgctagacttaagaattttctgaggaacttttgaaaccaaggtgattaacccactagccattatttccaagactgtcatccctcctggccttggatcatttcaggacctatctcagaactcacttttttatagactttagttttgaaaattcccaaatttaagctcaagtcctaagagcaggccagtgtcattatacaccatcttagaaccaacaccttcttgtctcatgtgggcagcaggtggggagggaggcaggggcagaaatcacatttggatgccttgggaataacatatttcatacacatgacttgaattgtcacatattttgctttattaattcattgctggatcaggcaatagcagatgactgcttatcaaacagatgacatgtgtttttaatgcacaattaaagtaggatttatcacggctgtcagaatccagggagtctgtgctttttgttattcaaagctgtagtttggatactctctggttttacagtgagatagtgattataaacacaaaacctcacaaaagtgttagaccagagagaggttttttgtttgtttgtttgttttcaacagtcttgctctgtcacccaggctggagtgcagtggtgtgatcttgactcactgcaacctccacctcccaggttcaagagattctgctgcctcagcctactgagtagctgggactacaggtgcataccaccatgactggctaatttttatatttttagtagagatggggtttcaccacgttggccaggctgttctcgaactcctgacctcagtgatcagccagcctcaacctcccaaagtgctgggatttcaggcataagccaccatgcccagcccagacatagtttttgtatggacaacatcaacaccattttcaactcactagagttttactgtactgcatagctctaccacttactagctgtgtgacctcggacaggttcagtttcgtcacctataaaatggaaatagtaacgaccacataggattgctgtgaggattgaacaaagcagtgtaaataaagtacccagagtggtctgagttcaagaagtggtggctctattcctttatctggaatagatgaggaagctgagtgatagacaaggaccagtaggaatcccacagtaacatgaaacaaattattattattattattattattatattatatatatatttttttacagcacttataatcctaccttaaaatcatcaacctgcttattgctatgctgtgaactcctttgagtaggggatttacttttacaatcatgggtattattacctcaaatttcacagatactaaaactgaatctctgtaaaactgaatctcagttacaaatctgtctaaggctatcaaaagctaataagaatcagagacaggattctaacttaggtctgcctgaaacaaaagaccatccttttcccaatgtcgccacactgcttcaatagagggggtttgcacaacacacaatcattagtggaaaggagagaaaactgggacctgaccattataaactaatcttcatgcaactcaaacctatacctaactttctaccacaataatgatgcagacacttgacatacttttggttttttatttaagctatgggctatcatacctgagtttttatgaagaaattcattgacattaaatggtctattatgactcaatttgtcaatggaaaataaaaattaaaacccccagatgcttagatttaatagtccaaagatgaccaaattatcttcatttgcttctaagacaaattattcagacatataatttcctcacaaattacttgcttgtctaactctccttgggttatgtctacctcatcaacttcactactttcttccataaatcttgcctgaacaaagattcaatttggataaacaaagaaaatgcaattcaattccacaaaatgtgattgtttaattttgaactgattttggagcattatactcaggactcttccaattttgcagtaaatgagttactgacatttacaaacatctagaataaaagaaaccattccttccatcactgtttgtcaattttattgttgaatctgctttgggacacttcaatcatgaaagtaatcatgtaaaactatattgaattctattagtaataataccttagaggaggttcatttatgataactgaaattttctctgactcagtctcatcagccatgtattttgccttaaggtattttaaaaatcaagaagtcaaagctttagaagtgtactcctaaggccttaactgaaccccattatattttgaaacataatttttatgaaatacaatattgatacgcaaatcagtcagaatttttgtgtaaacattgtttaaagtttctatatcagttgaatatcaatgccttatgagaaaatcaggaaggaatatatacatatatatacacacacgcatatatatatataaacacatacacatatatacagatacatagatacacacatacacttatattcatatatatttaacagatgtagacatctacatgtatctatttataagcactgacaagaacaagtatacatataaacagtagatccaaaaggactcctcaatcttaagacatccctcctctcctatcctgcagggcaaaatacaatgggcaaaagtcggaaaccaccatctctatctcagtgacttcttatggagccctgtggtagaatgaccaggaacttagagccaatggtaagaaccaagatagtacagagcttctgtactataccagggactttgaaatttcagaaaatgtatgctaaatttgtcctttatataattcatggactttggatttctacatttgagattgccatatgacattcagagatgctttcacagaaattgtaattcagcttagagacagcctacaaatatgaaacatatgcaatgccaggttcacagcttgtaaaagaacagaagaatagctatgtgaaaaattagtttatctcaggggtcaaaagtgataactcaagctcagcccaacagacattgcagaggtgggaatgaataccatttataatatgtactattcatacatccactgcatacagaaatagcttagaaaggttatgcatttgtgtgcagatctactgaatgatttgggtactgattttaagcacagcctgccttcacatttctccactgtataactatagcctttattggcttctcttttgcttaagacaagcttaacaaaaaacatttgacatttatcgtgatagaataaataacacataatggctattatgaatacaataagggtcagatgtttacttttttaacaattagggatgtattgctcaaaataagtaaaagcatttgtgcattacctgaatatcatcacatttatgtaaacagagatcataagcctgaaatatgtaagtaccactgatgccactcctgtcagcatcttccctctaggagatgatttcaaatgacattttttctttccaagtatgagagacattagctaaaaatctactaggtcaaaaaattctttttgttagactaagtagaaagctttgccattattgtcaaatatctacaaacctaattgaaaaaagatgttaaatttagtggagaaagaccagaaagccttaagcaacttgcataattagaccatcttttcccattgcctttacctttattattttgatcctaggaattcctttttgcatttcatacttgtgcataattaagatgaaatataatgcaaaggctgaactctcattctgtaagccctcagaaacatttgaggaatagctgttctatgactagtgtctataaaaattaaagattgatgtatagccactaaatgatctcttctcatttagactgaattatgtaaacctattataaattttataaatacaaagaaggcatacatttaccacatttatcttttctgccatcagcaaagataagctggttggaaatgtgagagaaggcaattctttatttttcttctacggtttatacaacagagtgcatatatgtattacacaacattcacacaatgcctaatgtttctaggcttatctcaagctagtcttgctgcaaacagtttgaacataagaatgagagttctttttgtagagagagaacatggcaagtggaagcagacaggttttatatcataaaatatttgaaacttggttcctccatttattttggtcaagttacataaatctctaagcttcaatttttttcatctctcaaataggaatactaatatatttttttcaaacttgtgcaaattaaccaatataatgcatataatgaccttggtctacagcataggctgaaaaaacacagccatgtgttgcttagtgatgaagatactttctgagaagtgtatcattaggtgatttcttccttgtgcaaacatcagagtgtacttacacaatcccagatggtatggtctactacacacctaggctatatattacagcctattgctcctaggctataaacctatacagcatgtgactgtgcagaatactgtaggcaactgtaacacaatagtatctgtgtatctcatatctaggctgggttcagtggttctgtgtgtaattccagcactttgggaggcctaggtgggaggaatgcttgagcccaggagttccagacaagcctgggtaacatagggggaccctgagtttaaaaagtttttcaagtgcctgtagtctcagctacttgggaagctgtggtgggaggatcacttgagcctgggaggttgaggctgcagtgagtcatgactgccactgcactccagcctcagtgacagagtgagaccctgttcaaaacaaacaaaccacaaaacaaaaataaaaaaaatttaaatatctaaatatagaaaaggtacaaatatgacactataatcttatggagccaccatcatataagcaatttgttgctgacagaaaccttgttatgcagcataccactgtatgatcttctccatgccactttggcctggtgcgattccatggacccctagggaatttgataaacattaatcgatcaaacaaaattttgtagaaaaaactcatgcaaatgaagatttttaaaagaatgttcttcttcatatgtttctattcaattaccggggaaagacagcatccaaacaacagagaatcagaacactgctgttcacatgtaatgatttgaattaattagagctgagttctgcagggctaaaaatggctccttaaaagcatagttaaataatcccctaaatacacaagaaacctattaagtataaaacttatctttaaaatataatatggtaaatcctcccagaggcataacttagtcccctaaaccagacacatcaggtgggcacatgccaattctttcatagcacgaggatatcatttattaaattaccactttaatagggccctagtggccctagaactaatgctccttataaaggtttaagttagaatgagggggaagatttgctcacctgatcctttatgcataattaccactaactgcacaaatctggcttgtatttattccattaagtacctccaatgatgtcattttgtctgcaccccaaatctgagatgtactttctgtctaggcatagaaaggttcctgtatgttacagttcagttcagaattttaattaaataaaatgagaaacaattgaaaaacaaggcatctacaatctttacataataagtaagcactggtatccttgctttacatgataaatgatgacaaaggacagggtagtatcattatccagtttggcaacaactatgaaaaaaaagaactttccgatttctgtctttaaaattttatttaaaaagtgaaatacggcaaaagatgattactcttgggtattacaaatcatctcccagctaggaagagagttctgtttggagagctggccagggcaaatcgatttgttctttccctgaatcactattagggtgcagtcactttttattcgacttaggtttcttctgtgcaaggatgaaataaaatgcttttgcatcctggagtttaaaacacttaaaacacagtattaggtaccatccacttctggtcagaaggtccacttggaaatcatgtttgaagacacatcagcattaatgctattttaaagcattcactgatcttttcattcttgacatttcagcagtattacaggaatcttccacttggctttgaatacaccatgtggttctggcttcccacctgcctcactgaccacaccttctcaacctctgttggtgcctccttccctttctcctcttcctttttcagacctataaataagtatatgccctaggattcagcccccttcttttatttatgccccttctttccttgctatcacatctacttccatgcctttaaatgctaaaagctctcatgtttatatctgcagccatgacctccccactgaactccagactcaggacatacagccgtctatctggcatctctgcttgaacatctaaaaggcattttaatcttaacatgtcccaaacagaactattgatttcccaacagccctcccccacaccatagcatcctcatctcatcagataatcacaccaaaaacatctggatcctctcttgcccttacattctgccctaagcccatatgcaagttctgtatgctcttccttagaatgtattgcaaatccattccttctcaccacttacactgttaccaccctggtcgatgccaccatcacctcttgcctgcaccattcgagacaacccctgaaacttatctatctactatgcatgcatgactgctgaagttaccttttaaaaattaaagaaaatcacagtacttcccagcttaaagttccccaggggcttccattatacttagaataatatccagatacctgaccatggtctacaaggccgtctgtaatccgaccccaacccatcatcttcaccttgtcttgtatctttctcctcttcattcactgctttcctcccactccttcaacgtgtcaagctcattctcaccttagaactttgactaaaccttgctactccttctgcctggaatattattcccttatgccttggcatgaccagcctcttctcaattattctaatcttacttaaatgttatctcttaaccttgatcatccttttccaagctgcttctcctttcccaagttcctatccattaacttattttcttctcaacacttagaactatctgaaatgtctatgtatttacctgtttaatgtctgtctcccttactagagtataaactccataagagcaggagtcttgtatattgtctatgtgtcttggcacatagttgatattcagtaagtattggctgaatattttgaatgcatttctaacctgcatacacatataatgatgtacagaaatcctataaaataagccaaacaagtaagatcctttatagtaatttaaataataaaatcatgttttttgtcatagagttcaaggactgggaagggtcttagaagttatagtgcaaccctcttttttacaatgttctgacgctcagaggaggggagccactagcagttcacaaagcaagagagaggtggagtcaggctgaccagatccccactgcagcttcaagtagagctggctgctccttatcgtatattatacctgggtggctgttagaactcactgattatacagtacaaagtaactccatttcagcaccaaagtgtatatccactctacatagcaagtaaaaataggactttgaatcataaatttcatctaccttaaatgaatacactagtgttcctaataaatggcaaacttttaaaaaaattttatttttaatttttgaaacggagtttcactcttgtcacccacactggagtatgcagtggtgtgatctcagttcattgcaactttcgcctcctgggttcaagcgattctcctgcctcagcctcccgagtagctgggattacaggtatccaccatcatgcccagctaatttttgtatttttagtagaggcagggtttcaccatgttggccaggttggtctcgaactccttacctcaggtgatccacccgcctcagcctcccaaagtgctgggattacaggcatgagccactgcatctggccttaaatggcaaactttgaattaaccacgatgcctgcattcaaacgtagaaggcctttttggggacaattaaatgatacatatctcttaaaaatatattcaggaaagttttaactgatgcttacagtttctcttcataaacatccctaaatatcacttccagagaatctgtatagctgtgtcttattatctgaatggctttaactaagggatataatgatgtacataatgcagcccccttgagtacctagggcattcctgaaaatcaagagaggcctgggccacaataaatttttgggattcttggtattcttttttttaaataaaaaaatactgaaatggtgttactaaaatgacaaaataactaaaacatttgtatttaacaaattaacatgttaaccccaaaaacagtattttataattataggctgtttaaaaaatgcttagtcttagtgcactagagcctctgtgatctactgcaggaacacatattatacaattgtactcctcatacttctgtgagtctctgtgacatgtgcatgcaaataatggtaacagtctaagtttgaggcttttgaaggggagacctggtcaagtggccctcaacactcatgacaggccttatgtatctctttgtttttgttttttacctccatccagctgcaagcaagcagtgtggggagaggatggtgggggatggggagatcttagcctccaaaagccagcaaaaactaagtatacaaaaggtgagggagggacagaaccttctcagtctcagaactttaaagccaacctaagcaaaaccaactgataactgatgggacctccttcatcttctctgagcactgcctctctgttcctcagggaaaaccaagtagctgtttgagattcacagtgactgtggcttagcccagaacaaggaccacctgctgtgaccacagccaaatcctgacatgcatcttccagatgtgaacggaaaccaaatcaaaatacccatctactagaataaatcacaagggcctcgggcgtgcagatgcatgctctgaaaggtctatctgttcctgagagggaaggcacaggagaaaggaaacaaaggttgtttccctaagagttagggagcaacttgacaagcaacagacgttttgtgtgtgtgtgtgtgtgtgtgtgtgtgtgtgtgtgtgtgtctgcacgtgtgtagatgggggaggtgaagagagttataactgtaggtccctttccatttcagaaaataacctctgtgttgggaccaagagacaactttgctttaattattcaaaaagaatccatctcaggtctgcctgtttcctccacacagccaacaagaaaaaaaaaaaaaaaaaaaaagatgcttgcaagttactgcaatggtggtcttattagtcttctttagtgacattatccatctaataggctttagttcttaattgtttttacaagaatgatgtttaatcaaagctaatgatatcagcgaacttgaatcaccacatgaactaatttagcaatatgaatgcttcatcacattctctctttatttctctcaatattaattagaaccactttccaaagaaagtggaagttccagggatgatctgaatatcccactttactacccacagtggacatattccaagagtctggccacagagagactggctttgattagagctcagtttttaagatattccaaatctgggatattaacttattcttgattttaacacatcataaccaaaaaacattataaaatgggcttatgttattaacagaaattcacagaaaaagaaatactactggctcatgaaagaaaagatgttcaacttcactcataagaaatgcatattaaagccacaggaaatataatctttttcacttcttagattagcaaaaacttgcaagttgatcaacatacatgcttttcaggctgtggggaaacttactctcatacatttcaggtgggaatatgatctgatataacctttaaagaggacaacttggcagtatttatcaacattatacatgcatataccatttgacccagaattctactactgtgatttatcttacagatatgtcttcccatgtacataataaatatattcgttatagcaatttcataataacacaatatttgaaatagctcaaaacttcaaacagactggaaacaactcaaatgtttctaaataaagaattggctaaatagagtagtacaacaacaagaaatcagtaggtgtagtgacaggcacctgttgtgccaacatgcaaagatctccaagatatattttcagtggaagcagcgaagtgcagagcagtgtgcatatgctatattttgttttaaaaacagaaaattacgaatataaatttatagttgcttctatttgcataaagaacatctggaagaattctaagaaaccaataaaagtggttttcattttgtgtacgaagtagaaactggctggtgggggatatggaggagagtgaatcttttcaccatatatcttctcatatgttttgagctttgaatcataaggctgtactagaaactacctgctttgaatctatctattaaaaaaaagtaaaaataaagcatgattgattaggatgtcataatttctgaattttccaaaaacatattgcatatatattactgaatatacttaaaatatcttttgcaactttctttgccaacaaagtctagtaaatataaaaagattaacattgaaagacattttattaatacatgtgcataatgaaatgtttatttatcaatatccactaatgcatgttgtgaatgaactttccttcacttcatacttgtaaaacaattaggaattaaagcttattggatggagactgctgaaaaaaggcaagcaccatcatcatctatagtaaaaacaaaaaatgagatgttcagtagctatcacgtcatcttggtaggataaataaagaatatatttatttatcgtaggttttgaatactgagaaattcgaactcgtattattctgtttcaaaaaaggatgttcaggcagatatgaaccgaagcaaatactcagataaaagtgtaaacaacgtttccttcaagctttgttgttgttgttacagttgtttgaggtcttctttgtgcaattaaaaatgaaagaaagaacccaaggaatgaagatcaagataagacaaaataagataaactagaacatatacattaaagtcaaagtaaaccctgtgaatagagaaatagtttgggatccatagggtgagcagcaagcagcactaaaatatgagtgctatttctcttttaaaacagagtacaaagcctataaaaggtacttttggatgggcacattatgttcataattcataattttaaaatgacccatgagaaccaggtactagaccatagggcctaatgagtattctagagtagaaaaaatgaacataaggaaagagagccattacgggtagatttccttgccctccacaaatcaaccacacttagggactattttctttcctcttagtggcacctttgacaaaaatagcagcccacaaaatttgcactaaaggcccacttcaaaaattagagcagtaaggttccagtgttgccatgtgccagaagtaaaagaaaaaagggccatacatgaacatggaaataaaatcaatgagggttacacaatggccaatttattaaactttttaatttttatctgctttgtgcaagaaaaccaaaaggaggaaataaaaagatttgagggcaattatgaagcaaaaaccttctaaaagtggttgcaaaaaacagatgactagatattatccatctaattttattgtccagtgaaagagcaacatccaaaggaaattctgcatgtacagagggttaaaaagggtaagattttaaaataccagttactattatattgtttttaattgttaaaggggaagtaaaagtaattgatcctttggggttgaacttactgcctcttaaaaacctctagtagcaacaactcttctttagaaaacatttcataatttcagtgagactttacatccattacttcatttgatgagtcgctatcatccatataatacagataatatatggagatcaaagctcagaggcattaagctacctgctcaagtttacataggtagaaagtagtggagcagagattcaaactcagttcatgacttcacaaattgtgtgctccacacatcctgaagaatatgaatatgtgcaagtaacggtaccctggcagtcttagattaaaatgagtcattcaattcctctcaagagtgactagctagggcctaaaggtattttgatgatttctgccaatgatctgctgagggagctctcaaaattaggttcaatgttagttatgaagacacatggatgcaatgccaccatccaggacctttgattccctgtacccaaaaggacaatataattttcagccatgagtggagcaatgaattgattttcctttgattcacattcctgagtaggctgctttagaaccatgggaaagcttccactctcaccttctggacattctacttcattatcaggctgatgttaacaataagagatgttcaaagaacaataaacatggctaagaagctggtgggattgattttacactccaggtaatagctctctgaggatactgtgcctttacaaagctgctgatcagtgcattctttctctttctttttcttttttttctttttctttatttctccttcctgccttccttccttccttttctccctctcgctctctttctcttcttatgacactcttcccacccctcacccccccaacccctcccccccagacttttaatggccaggggaggagggggaagagtggtgcataagctgcttcttcctcatcataaattaagggttggttgtagaaattcttttgaagactggaggctgcagcatgatgattcacttttcctgcccaaacttccctaattcactcaggtttagactcttccaaatcccagaggcaaaagataatgaataaattaagttttcagaaattactgtatttagaaaagttttaacatatttttggaaaagcattttataaattgcaaagcagagcgatttcatttacattttttatattatggtaaaatagacataacacaaattgttcattttaacaatttttaagtatacagttcaacaacattaagtacattcacagtgttgtgcacccatcacccctattatcttcagaacttttttttatcatcccaaactgaaactttgtactaattaaacaataacttcccattgtccccccacagttcctggtaacctctattctactttctgtctctatgaatttgcctattctaggcaactcacatagggcagtgacataatgtgtgtccttttgtatctggccttttcacttagcataatgtcttccaagtgtatccacatttcaagatgtatcaaactgcattaccttttattgctgaataatattcccttgtatgtatacattttgtttattcatctgttgatggacatttggctcgtgtccaccttttggctattgtgaataatgctgctctgaacagtgaggtacaagtatctgtttgagtccctgctttcaattctttggggtatatatgtaggcgtggaattgtggatcatatgttaattctatgtttaagtttttgaggaatccccaaactgttttccacagcagctacactattttatattccctctagtaatgcaaaagggttacagtttctccacattcctgctaatacttgctattttctgttttttaatagccatcctaatggatataaagtgctatcttactatggttttgatttgcatctccctaatgtctagtattgctgagtatcttttcttgtgcttatggcccatttgtgtatcttctttcgacaaaggtcttttccagtcctttgcccatctttgagttaggttgtttgtttttgcttttgctgttgagttgtaaaattctttatatattttggatattctttgtcagatatatgatctgcaaatattttctcccattccatgggttgccttttcattctgtcaataatgtactttgatgtacaaaaggttttaatttggagaagtccagtttatccttttttttcttctggtggctgtgcttttggtgtcatatccaagaaatcactgtactgattccactttgattaacctataatacaattaatttctaagcagaacccttgagttatgctacaagtcacttttgccccaaataaattccaaacaaatacaatgtgatggaggagggagaggaagtggggatgggtaatgggtacaaaaatatagatagaatgaataagatctaataagatctagtatttgatagcacaacagggtggctacagtcaacaataatttattgtgcatttaaaaataaggaaatatatttggattgtttgcaacacaaaaaaagataattgagatgctggataccccatttaccctaatgtaattattatacatgatatacctgtattaaaacatctcatataccccatgaatacatactatgtacccattaaaaccaaaaaatatatatacaatgtgagaggctaaagagcaagcatgccaggcaactgaatactgtttccaattgatcttaaggtccagacaacatggcacatggttttctctgttacctggtccctgcctacttttttagtttcatttcccccttgccatctaacttcaatgatctggaattctctgtctctaaaatactcttcattttccctatacctgccttactcatactcatccttctagtctcaacccagtcatcccctctttcgggatgtttcacatgatctgttcctatttccacctactattcatgcagtgaaagggttgatgtgctagtttgagctcctgcggcaccccatatgttgtttactacaagatttactatacagaattactgtttacttagctgtctccccctctatattatgaattccatgaggacattgagcatgattttagtttatttttattactatatcctcagtatctagaatacttcctgatgaacagtagatgctcagtaggtaactgccgaatgaatgaatgaatgaaccagactaatagccttgccaaaagttttctgtttctagaagtagttacaagaaatattttcatggagaggcataacatttagagatatagcctaagtctctctgcttttcttaataatttatcttcaatgaactttatttcataaatctttaatcaaagtagtgtcataagcactttataagtattaattcatttaaacttcacaataacttgataaggcattcttatctgcagtattcaggaaatgaaacagaagcacagagacgttaagtagcttgcccattgtcacatagctgctaactgggattgggcctacttaaagttgatcagtctgtatcatctcttggtatgatgagttccaactaaatgggaaacaatatatacttgaacatttcagtcttacaaggatggtcaagttcatggaatttataatttttctaaacttggctcacatcaccctcagatttatggtctagttttcctcctggaagccccaagtttcctaactggggctcacataccagtcatcccttccctctttctgtttcttctcagaacctgagtcacttcctcatttcttctgtaggctcagctgctggaagcactgggcatttcaagtgcaagtggaccatatttattttcaggattaaagacatttcctatttggtttttgatgtctctttggtttcaatttgatcaatgtactcaaacaactacttaaaatgaccataggacattttagctggtcgtagctccacataacattttataggaatatatgaattttttcttttaaatttattatcttttggtttccttcaataaaaccaatcttcagctacactattattattattgcagggaagcattttttgaaacacagctcctttataattaattcattcatttgttcatatatttattcagtaatttcagggtgcaacgcactgtgctagatgatggaaatacaattttatcctctaggagtcagtatctttcccacctaaacagatttctacaataagatagaagttaaacattcctctgattttgaatatttaaaaaccttgtaagaaaatgcattatttcaattggttcctctgtttccatatgcatgtttgccctctcaaaggtctagattatgttgcacagagatcagcaccattaatttggtttgaataattaaacaaaatgtcttattttggaaagtgcaaaaatatgtaacaagatgatttacaatttcacgtcaaaatgtgtaataggttgctatgattgtgattaatccctaaagagagaaaaaaattagaagtaaagtaacattttaaagtaaaatagatacattagaaattcatgattggatagattacaaaatgtctcttgcctctgaataataaatataatttattgattctctctgaatgcattagagaaataaagcatgtaaaacaatcatttaggctaagtacatacagcaaagaattgaaattatcctctgcagcaagtactaggctgatggataatagcatatacattcattttcatacctcttaccccttttaaatatatctctaaggaaagacagtggttatttgactttctccatgtgaaatttcccatgcagtgtagcacatctgtaaaagatgtgtgaaaagtacatttttctatcaggattttcattcatagttaattatttcatttagcacgagcaacatttccaatttaacttgttccagagactgtaatatttacagctaatttccagcaaaacatttagaaatggctcaaagtaaaaattcattactgggttttgccatgttttaaaacgtcaaatgcaaatgaaaatcaaggcaagactatactttacttttagatcatgtatttcagttcctttttttttttttaaataggtttggtgtaggtggtaagcttgtaatgtcattctttatttaaaacacaaggcagaaaggtctcaggaaggaagagacatatgttattatctgtcatgaccttatacttatgaatctggggacagatttggagaaaggtcttcaagtgaccagatgggctgccatgttatttaagttgcatatattataatagcttcattttgttcttaaccaatgtaactcgcatcttatcatttacattattgtcttgcttccattatggatggtatacattatgttttccccaaactgaactgactccttgatctgggttatgcatcctacttgcatacagacatattttcacatacgtactttcccatatgaatagatgaccagtagatcttataacacatttttctgagaatttacagtgctttaagttacatcaatttttaaagggactcaataaagtaataaaatttacacatttatattgaaatacagtcatttatactattatatgaaaaaccatagtgagtataagtgattttttattgtaattgctttctgacagtaggtataaaatgaagaaattcaaaatgatggaattacccttgaaatttgagccaacataagcagttttaaagtgttaagagtttaatgagaaacatcactgaggtggaaaaattatgcaaacgtaaattttaaatggagcttccaaaaaggaataattttaagatagtctagcaaatgtaaggggttgctattccttagatgagaagtttgataaaaatataaatagaataaagagtatatagagacatttgcaagtgtctcccatgtagcatttaataaaatatttattttatacctactaagaatttcgggtactgagagttccagagtgggagagaggaagcactatcagaaagagaatgactctctgtggatgtgacatgggctgacacttaaatgagaagaaggaaccagcccacttctggaggggagattctctaggcagagggaagaacaagcttatcagtctcaaaaacacaaaacagtttatttatctttcactttgggaggccgacgtgggcagatcaactgagctcaggagttggggaccagtctgggcaacttggtgaaacccccatctctatcaaaaatacaaaaaacaaacaaaaacaattggctagctatagtggcgtgcacctgtgctcccagctacttgggaggctgaggtgggtgaattgcttgagcatgggaagcagaggttgcagtgagctgagaccgcaccactgcactccagcctgggagacagagtaagaccccatctccaaaaaaaaaaaagtatatttacttttaaaaccaaatgctaaaagagtcaaacaaaagttcaattaaaaatcaatatatttataactaaagtacatattatcttctgaatataaatactacgtgtgcacaacaaatagtatagtatttctctagagaaaactgaggaaacatttcttaaatgtcttgaatataaaccacccatagctaggagtatctggataacctatattctgaaagcatttgcttagtttgccctgataaatgtgctctgtccttactttctcttggcttctctttctgctggtgtcttatgttctgttcccatccccagtaagctggggaaggtgagaaggccttactgtctcaattaaaaggaggtatagtcagcgtcaccactcctcatttcacagttctggacacgagcatagaatcctgatgagaaacagtcctgcttctttctgtagaaatgactctgcaggtgtcaagaagaaagggctctgagtcaggacaaacgagaacttggcactgatgctattttgccaggattcatgctctcatgctctctgaccatccctgcatggtccaagtaattcatttccatggacattaagctccaaatgtcattgtacactgtgccttcccattttctaaccacaggtgcttacagattaggctcttgcttaacctgccactggctgctgggccatcatctgccctacaaagcattatgacagctgtactcattcctttgatgaagaatacttagatgttctttctcatcagtcaaggtagctcacactcactttacaaatactatattactattggctcttcatcagatgatttctttgtggtagattccggtgcctatccttaagatgtttctgtactgctaaggagactgcaatcctgaaattcaacacaacaaccaagtctaccaaatctctggcaggactaccaaacagactcctaattgatttccctgattcttcttcatttcatcagagctcagtacacaaaacaaagtgaaaatatcagttcactttctcattcactcattaattcagcaaatatccacagtatgtattgaatattttccatgtgtcaagtatatgtctgacaagtgtcaaagctgactgtagcagttctcacagtgtagttggggagggtgagtaagttactgtagtggacgagtaatattcttgtctaattagcatccatttctcccttttcttctaatagtatctggatttatctgaggatacgtctttccccaagtcagccccatgccatttgagtggagctgattttccctgcagatttgaagaaggggttgcagagacctagttctagtcaatcagaacactggatcccctgggtgtagtgactggttcagagtcggggagtcattccctcagacatagcaggactcgacttgaggccctttgttggaaattttacaaaggaagaaaatctccttctgctagtcttggagctgggattgtgtaagggctccctggggagaagcctgcctgcctgggaatgagggtgagagggagggagagcctgagagggctggagagcaggagtgtgaggaggaggctaggggagaaagggagaaaggaaagagatttgtttgtgaattccaatacttgatcatttagatctagttgtgcccagagctgtaaggacgatgacagaagcactaacaaaccacaaaataagcatcgaggagaaatcccccaactctgcttggagcagctggggaaagccatagccacctggcacctgcccatccttcactattcttcaaatgtcatctcttcagagcaggctttctctagatcccttatttgttctaaatagattgtgagctcacagataccagagaacatggcttggtaattttatatctctagagctcatcactgtgcctgttagagggaatatacattatgccttcaataaaaattccttgagttcccctgtgtacctaggcctccagtgaaagcaggggtctgaacaggaccctaacactgccctgctttcaagggatttcccgtactaacatgtacaaggaaccagccttcagcaggaaatctaaactagcttgttccttttctcattttccctcctcctctcctgcttcctccagcccttttagtcctgttaacccctcatcagagtttaatacaaacatcaccatgccacttctctgaaagctttgccaatttaggcctagttttccttgttgtgtattcgcaaaatttcttgtaattttccttcatataaatcagggcacctctccaccaggggtgaatttgctcctttcctgagattatgtgacaacatctggagatatttttgattgtcacaactggggaagaggttgctgttggcacctagtggttagaggccggggacgctgctaaacacccagcaatgcccagaacagctcccacagcaaagaatgatccggcccaaaatgtcaatagggctgaagttaagcaccccttatataaataatcacagtttagagttaggcatctattttttaccccaccaaactatgaattccaaaagggcagggactaagtctgttttgcaccattgtacttccacacactcacaagtagtagctactcaacaatcatttttaaatgctatcattaaaggaatgttaaatctattctctgaaacacaatacaccattcaggtaatttttccttctttattgcaagtatgcatattagcatgcaaaatttaattctctgttttcatttatcatattctagaaacaaaagttctgaattgtatggctggattttggtgtaattgaggaggctctattccacaagaaaatatttgttttagtacattaggatattcttgggaagttgacaagacatattaaaatgaatgagcctggctggagcagtccctcacactttgcagcacatagtgctgacaagccttaacgacacaaatggcatgaagcctaacacatgtgatgaccagcatttcacagagttatcagagtggcactgtcatgttcctgaagcaaaaggtgatacaagctcctatacttcatctccgctccctaataacaataagcttggattccactgagccatgtcttcgatgactggtagttctaaagcctctaattataatcttgagtcgtaatatttgctttaaagctttaactcaagtgaacattcaaatgtaatttttccacagaagtcaatttctggaagggacacaatgtaaaaacacagggaaaagaacgtggttaattattaaaccaaatctgaaacaatgtactaaaataacacttaaaagcatgttacaaaccacactggacctactttcatccagaaatgtttgctttctccatgagggagtgaattctttaaatatacatagagccttcatttgaaagaatactaacccattcatctattacattcccatgttgaaattttgtgtgagaaaatatgtcaagattctagtttcatatagcttaattttaccttaaaaagacccacaagccagttttggttcttgttgtttttcctgaaagtctttgaatctcgggtttttactctattaagtataggccagggcttgggggcctttacacactttttttttaaataataaattttgcagctacaatatccaaggctctttctactaggtattgaagagaatataaaaaaattcagagctgggtgtggtggctcacacctgtaatcccagcactttgggaggctgagacaggcagatcactggaggccaggagtttgaggccagcctgggcaacatggtgaaaccctgtctctactaaaaatacaaaattatctgggcatggtggtgcatacctgtaatcccaggtacttaggaggctgaggcacgagactccttgaacctgggaggcagaggttgaaccaggatcaagccaccacactccagcccgggcaacagagcgagactctgtgtcaaggaaaaaaaaaaaaatcagaatccctgtcctcaaatcccaactctcagtctctctggatgtggactttttcctctggtctcttccctcaaggggcttaagttcttatggggcaaaaaacatggactttagagcttgatttgtataaaaatttttttgagtgaaagaatgaatcgcatttgccaggtgagaaaagtaagtcttggagaagttagttgaaaacagtttaaaatggagtctatcttcctgggtgtcttaaaggccatacattcaaaagttagctgtgctatcattatgagactgtctatgagggcatggacatgagggcagtgagcagagactcagagtggttcagttactctcttatgaatcaaagcaatagtctgcttctgcatcttatcacattttcagtgcaataaaagatgttttcaaataggtgaaagcctctattgaagaactgtctattcttaggattttactgagattacattgtagagaagaaatagccagaaagcatttctgcaaaactaaatctccacgtttgttggctatatttattgggataattttagtaataatagatgagaaaaataaaactttttttttttggagacagaatttcactcttatcccccaggctggagtgcagtggcatgatctccactcactgcaacctccgcctcccaggttcaaacgattctcctgcctcagccaaccaagagtagctgggattacaggtgcctgccaccatgcccggctaatttttgtatttatagtagagaaggggtttcaccatgttggccaggctggtcttgaactcctgacctcaagtgatctgcctgtcttggcctcccaaagtgctaggattacaggcatgagccatcgcgcctggctaaaactttctattactccaatgacagtaagcaaatcaggaaagctaatattttcttgggcatgggcttgattgaaaaaaaccgctgaagctggcgttatttcttattgatttttgtttcccacagagcatcttgtacattataggcacttgataaatatttgttcattggctctgcttactgctctgataaaagagatcttaaaggtgatattcaaatagaacatgaaaacctactaacaaaacaatactatctatacctaactgtttcattgagtataatagcactactaaagtcatatagagtgtacccattttcattgctgccattttcctccatttagcaagcattaagaagatgcgagatttctctctttctctctctctctttttaatacgatgcccatctactgtcatcatctgactttctgtgtaacaaagggaaaaagacaagtgatactatgcttattattatgggagactgatgacaaattacagcatagtggtcctaccatgtgagtcagttgatatagaaatttctatctaagcagaggattgtcacaaggtgagtattttaacgtgacagaactagagcagaacatgtaacactgaatatgtgccaaggactggctgcatattttatatgcattattttatttaagtatcgtataaccctatgaggtaggtatttcttcctacacaagctcataatggaaaataacatatgtgggactgtgaaggggaggtgagaatactgagaggatctcaggagcctgtctcctaccagggcttccaaggtggcattcagctccttggttattttaccatggttctcatctttgggcctctcccttgtaggtgtagaaacttgcattatcagcaagtcaagagtggccccatttctcagaagtaagaaatgcatcaccaaaccaaggggactggagtataatgagactggtggaagtatagtaagacatttgttgtcacaggtatagaacacttgctataaacagaactgcatgggagaaaaaataaaaccagaaggtcacaaggcaagtagggaatggaaacaaaataagctttatctaaagagaaggcaaagccattgtaattggagcccttggagctctcagcaacaacccctctctatctttacatcagggatgatctagttattgggcttggaacacttgaagaccactagctgaggtaccctctcttccctggatggtgccaatgtttccttctgccatcctcctttttcccatgcttccttccccaaaaaggaaggtttcttccctttttccagtgagaaccaaattccattctaatgaacactttccttatcgatttgtatagacacatttggtcaggtcacattcaggtcttgctttataaaattctttggtctcatgttgaggaaatggttcttaatctctttggggtcataaactcttttaagaatgtattgaaatacaaagacatataaattaaaatacatacaattttgagggatttcaagattcttagaaactcatactggaatccaagttttaaaaccactgcttaagaaaactgtgcataatcctgctcttatccattaatgtagtgataaggtgtatcagagtctatgagggacctataatccttatgaattgggattgattctattttataaagaagaaaattgaagctcagggtataagtgacttgcttaaggcccagtgagggcagaatacagaatatgtcagtctctgtagcagatataagaatatctgtaacttttttatttttttgagcagggtctctcactgttgccaaggctagagcgcagtgacacaatcttggctcactgaagccttgacctccagggctcaagtgatcctcccacttcagcctcccaagtagctggaactacatgtgtgtgccgctatgcccggctaatttttgtgtgtgtatgtgtatatatatatgtgtgtgtatatatatatatatgagtattttatatgtattatatataatatatataaaaatatattatatatatattatactataccatactacactatactatactatactatatatatatagtagagatggggttttgccatgttgcccaggctggtcttgaactcttgagctccagcaatcctcccacctcggcctcccaaagtgctgggattacaggcatgggctaatgcgcccagccaaatgtctgtaacttttaagatcactatttaaaaataaaactttcatcacaaattcaaaaaatccagaaagagaatgtggagagagagggaaatggcatttgtaacttttgagtacctgaagatggccacattttttttcttttagtcagtaaagacatggattaacttgccactatctgcattttacagaaaagtagaaatttcccgaggttaaataacttgcccagatttctttaactataagtgacagaactagaatttgaagtaggaaactaagaagttgtatttcataagctgtgctcttaccccctctgctatgtgacccctggccacagcctaagcaatttctggcttcactcatctctattggcaaggtcttaactgaagttgccaaaggcagtcaaataacatcctttaagcacacttgagagtgtgattgtgcaaaaacagtaaagcttcaagttcaaaagagtcagagtccaggataaccctcaggtggatgagaggcatatgattcatatcctttccttcagtttttcagagacataaaatggtttatgttcgacttcaagaatggtctatctttgcattttctttgtgtgttgtgttatacttcattaggcaacaaaggcttcttttcttctcctccaggtaataagtagtgatttatcacaatcacctgtcacatttaacttagcattcattccacgaaaagatttcccatacatttccaatgtgaaatttaaatgttaatgtccatagataaagaagtatagcagtatgtgttacattttttttcccactatgaaaaccattttcaggaatttagactgttaaataaccattccttttatgagactagctctaaaagatacatataaattttgaaatctatagtattacttggcaattttagtgctttactttttgcagccaatcatggaagacttgcttttatagctttctctgcagagtcatcttaattatagggaaatccctttacaaatggctttccatttacagtgcttcagctagaatctaaagttggttttattggaaatgataaaaaattactcttcctgagacacagagttaagaatcagaattggaaatgaactaagttcttttagctttagaaaaaaaatttaaattgatcatatattcttcccttctaaacagtttatcccaaagaggtttaacacagtaaaatctctttgactttcagacacttaagaaaatgtttcaaggcaaagaagtcatatagattatctaattcaatccacacatttaactgaatgtgagcttcacccaatttacagaactagtgatagagctgggactagaacccctgcctacggggtatcatttgtaccatttcagccacactctgcttccaatgttggactcttcttgtgctttctacataacccacatgggtgggagagatctctggacccaataacagaaatttattttagtctttctttatagcatctagacaacctggcatcatattatttgttcatttggctattgtttttctccttcaacaaatataaactccaggaggacaaataatctgtgacctctaatggtgtctggcacatagtaggagtcaataaataacttgttaaatggaatttcaaatttaaccttaaacattcttgtttaaaatacatagtttgggtcaggtgcagtggctcatgcctgtaattccagcactttgggaggctgaggtaggaagatggttgaggtcaggggttcaagacaaccctaggcaacatagcgagaccccatctttattaaaaaaaataaaaattagctgggcgtggcgatgcaggcttgtggtcctagctacttgcagggggtggctgaagcaagaggatcacttgagcccaggagttcaaggttacagcaaactgtgatcataccattgtactctagcctgggtgacagagtgagaccctgtctctaaaaaaaaaagaaaaaaagaaaaaagaaataaaatttatacgttacattttacttcctaaaatatccatgtttgctttgactggaattttaaataattaatatctgaatgtcttcagggaagaataattattcaacaagataaggaatcatcaaaagaaaacatcgtaaattccattatattaagggcttctactcaacaaaaagccaccataaagagattgtaaatatcagaaatcaagagaagaaaattgcaacacataaaagaaacaaaggattagtatccagaatacataaataacttctaaaaaccagtaaagaaaataaataccagttacccattaaaaatagtaaaagatataaacatatattttaaagaagagaaaacacaatcactaatggccagtaacgaccaataaaagtaagatcagctatttcacctctttagtaatcagggaaatgcaaactaaaaaccatggtaatatacccttagtctaatttaaagcaggaactcaaagagacatttgtacacccgtgttcataggagcattcttcacaacagcccgatggtggaagcaaccctactgtcgacagatggatgaatggataaacaaaatattctgtttacaaataatttacaatggaatattagccttaaaaaaggaagaaagtcttgtcacatgctataacataaactttgatgacattatgctaagtgaaataagcaaggcaaaaaggggcaaatactgtatggttccatttctatgaggcatccagagtagtcaaattcctagagactgaaagagaatggtggttaccaggggctgacaggagagggaacggggagttattgtttaataggtagagtttcagcttgagatgatgaaaaaaaggtctggaaatagattgtgttaacggttgtacaaccatatgaatgtacttaatgcctctgaactacgcacttaaatatggttaaaattgtaaagtttgttgtgaatgtttaccaacaaccacaatgagatatcattttatatccactagattgaaaacaaaaatctaacttctgacaatagcaagcatctgttaattgctatggaatgaattgtgtctcccatccaccctaaattcatatgttgaaccctaacctccccctaccttgaccatttcacaatatgactgcattggagatagggcctttaaggagctgattaaggttaaaatgaggtcttaagcatgaagccctgatccaacagagctggtgtctttataaaacagggggagacattagatctctgtgtgtgtgtgtgtgtgtgtgtgtgtgtgtgtgtgtgtctcactctctctctctctgtgccatgtgaggacatgaagagaaggtggccatctgcaaaccaggaaaagggccctcaccagaaaatcaaatcttgctgggaccttgatctcagactttccagcctccagaactgtgagaaaataaatttctgctgtctaagctgcccagtctatgacctattgttaggacagcctgagcaaactaagtaacagtggagcaacgggtgtcacatgctgctgatgggaggggacacagaacagtctggcctggtccagcacagctgcactggtgcaggcccataacccagccaggccgcttcatggtgtgcattccagggaacctagcgtgtgtgtaacataagacaagtagagggaagttaactggggcatcatttatattggcaaaatctggaaacaaccaaaatgtacactgatgggagagtagaaactgtataaaataaataaataaataaataataaaaaaagataaataagtttaaaaacacaggacaaccttatatttgggaagataaaggatgatgaaatctttgagggatatagaggggcttaacatggttaccaatattctgtattttaagctgggtgatgggcatgtgaatgtcttcttttgtcttcttttttaaaacatgtatgtccatctacatactacatactcttattttacacatctagtatacatagtaacaatttaaatgaataaaaatatgcaaacccaaaagcatatagcttaattttattaatcttggtccagaaatttttgttaataattttatatctctcctcttgttatttttgtatgtttttttttaaatttacagaagataaacagttaaagtaattaagctcgacttaaaaatttcaacttcttattttattcattcaaaatctgagcccgctgggagccaattttccataaagactgcagaatcctctactgatctcccaagtcctcctagtcttgctcagctccgttacacaattttccagcatatctgtctatcatatgataatgcaggagagagagaaatggaaggtcataaataaacagagtgtaaaacttcaagtttcagggcataactgggacagataactaagcaagcaaaattctgatataataaattacttgaactgcctgaaagagtcagctacataaatcacaattttactggaagtgctacaaaaatccatgctggctaccaaatgcactgtgaacactaaaaattcttttgtacgctgtcagccaagactccacatggtgtatgtaaagtctgagggccatttagatatatgccacaggcttctatacacaatgatcaagaacaactttccctctcagaatgagaacatagttgttcttatgaaagcagttatttttgttatggcttggggtgagagcgatggcaagttgttagaaagagtgagagtaaaaggttatgaatattgaaacccctaacaaataccatattttgcattttattccacaaattattttgagggttctgatgatgttacatataactgttttaggtgtactcacatttatcactttatttaatctgcaatatatacccttgataggtattacttctcccattttgtacattaaataaagagaaagaggttaaataacctgcccagggttacaatgtgagcaggtgagtgttaaaattcaaacctagttcttcttaatcaaaccccagtactttggccactgtactgtttcttactgccccacaaaatagttttttataatgacagacaaaatagttaacaagtcaagagctaatcagccaggctccttgattctttccctagtttaagcacttctcttacctttttggctatattcctactaattagtttttagtaagataaacaagaaataaaatacgaaatcaattttgtcaatttaggcccttctttaaaggtcagatcatcatgtctaaggtgagtgttgggatctcattctctctctctctcttttttttgtcttggtctcagctttacatcccatagctttacttgtaacacacacaaagtgcatatgatatagtgctggcctacagccagagttgtgaggtgacagtgcctgggtaaaaacccagggacaatactcaacagctctgtgcctttgggcattttacataagctccttgtgtttcagtttctttgtgaaatggggattagtttggctacgaggattaaacaatataatgtattaggttggtgcaaatctaattgcagtttaatagctaaagcatgtagtcaatcctggcatataacaagaggctaataaatggcattattattagtagcagatatacatatatacatatgtgtaaatattatatattttgtaatatatgcctaataaatgttaggtattcctattactattagtataccaccgttagtagggtactaatagtattactaatcacagagtatgctactactagcgaactgaagtgccatgtagggtgggaagaagtgagtactgaggcagaaaaggattagggagaccttctggaagaggctgagcttgagttatgtttcaaagggtaagcagaagttagctaaaggaagaagatgtgtgcattgggggagggcgttccaggaaagagggaatggcatttgtgaaagcacacagcatagaacagcacaatgtacaggctggatgggtgagggagaaaatcagggaccaattacagcaaagtgggaggagcagagatcaaatttaagtggattcattaaggattggatagcaagtggaaaatgactctttcaggtaggtgggttgtgaagagattaaatagttattccaggagttagaaagaaccacagaaaagaatgataaataatccagcataaaatgtccctttgaactatcattgcattcttagttttcaaatttttgaatcttctagttaaaagtctaaaatttcagagataaaagttgtaaaaaacatctgcttcaaatatcctcattgccatttttctattaaaaattaccacacatgaaaatgtgcaaaaactattctttcatgacacatatgagcaactggatgaatttagtacaagcacagttacactagtagaattaaaatagaagctgagacaagctctgaggaaacagaattaaacaacatcattctctatccatcctgaatgaccaacaaccccttgaacatatgctatgcctttccacatacccacacctctctctagaatgtccttcactcctttctttctggcctgatattttctacttggtcttcaaaattcagctgaagggtcacttctcctgaaagcctccaccaaccttccaaccagctttaggtgcttgttctcttggtcccaaagcatctcatgcatacttccatctcagctctttctacaccgtagtataattgttgctgttatgcttatttgaattactactaaactatgaagtttttgaagacagagatcatagttattcagaatagataccaggcctgactctatccctctaattccaagcacattacttagcacatattagttgctgaataaaaatatgcaatttgtcagttcaacatcagacaagcatagactgaaaaataaattggtcatccctagaataacaagatgtcttttaaacagattcctgatttctccatctcaaaactacaaatagattatatggcaaaatatcccagagatactcaagctagaagaaaagactcaaacgatgtctctcgaagttgattttgagagtgatgagaatgttctccttcttatgtccattaaaactcctttggtttccagatcagtctaccttcaaatcaacagttatgatttttcattcttgagaaagaagaacaactctcacatccacaaaataggccattatagcattactgggccattttctccacacacaagcataaaaaaactaagagagaattattcaaagaattaatgtttcaagcaaaagccattctgggttttgtcataatctttcaagggaattttctctctggttctcccaaagcatattttctgtacaaaggaaaatcacttgacttttaaagcaaaaacagacaaaatacatgtctggaagtagttcataaatcccactgggggaaaattccttatacaacaagaacagaacaacaacacagtgaatcagacaatgacaaaatccaacgcaagagtgccaataactttttttttccagaggatcccctaaatttctgcacaaatttctatgctagaggaggctgagtattaactatacatagtttagtcatatttttcctcattttagacaaacatggctttatctgacatgctgaggtagtaatcctttaggataatttgtcaatttatccattcacttaagtatgccaggctctgaggaaatggtagtaactgagacactgttgatgcctcacagaattcacagaaacagatgtctgcagtcaaatgtggtgagcacaaagatctgcacaggtgctaccactaaccaggggcaagggcagctaagccagccagtgggcgctttgacaaaaccatgtgggacatctgaggggagctttaagagatgagcctaaataagtcagattgggggaggaaggggtgggcctggatccctgaacacattcttatttagtttttaaatttttgaattttctaccctaaaagtctaaactttcagagataaaagttgtaaaatacacctgcttcacatatcctctttgccgtttttctataaaaattatcacacatgaaaatgagcaaaagctattctttcatgacacataggagcaactggatgaatttagtgcaagcacagttacactagtagaactaaaatgggagctgagacaagctctgaggaaatgttatttctttgagttaatacaagttaattcaaaagaaccctgagaattttgtaaagacctggaaggattcccaagggcattaattctgtgggtcacctctctctctcttaccttggccatgccttataaggatcgcagtgctaccatcacctagcattgttcagatcatgttcctactgaacatatgcgaagtagaaataagcatcaccttaaaagtgaaggacagagtaatagttttcataacagccatactgccaatagaaagggtatcctgaatggaaaaaataaagatcatagtgttgtagactgctttattcttcaacagaattgactgtgtgccctcagtgccaagttacaatgtgaattacaatgccaaacaagacacagagcttggacgaccttatcagtctcgtgggggagagaagccagtggacaggttcttacaatatagtgttaaatgccatcctaggggatgttacaggtgccaagagaaaacacaacaggaacaactaaaccagactttgcagggaggagggtggtgttgggaaagtgacatctaaatcaaggctggaaagaaaggtttacagaagaaaagggggatggagaggagagaactccagcaagagggaactccagctagaactccagcatgtgaaaggcagggaggcaccatgtgcctggtgcagtccatgggctagcagcagttcaggactgctagaaaggagtacagtggaaggggaaagagggtgcatgtgtgtgtgtgtgtggtagggcagagagagaaattgaagctagattgttaagtaagagccaggtcaccaatgagactatattaaagagtcggagccttatccccaggatgacggggagccatcatggtgtcttcagcacacaaatgacagaagcagattcctgctttaggaagaaccctatggatgccgggtggagaatgggttgaaagggatcagtcagggcccagaagggcagttaagaatctgatctaagtaatccaaagactaacatttgcaaattatgaacaatgattctaaaatccatttggaaggataaatgagtaagaataggcatacctccttcctaaccctctaccccatcccatctaagatattcaacttaagactaatgtaattaaaatacagtgataatagcacagaaataatgcagatgaatcaatggaacaaaaagtcaagaagcctaagtatatatgagaactcaggttattacaagggaggcaagtggaattgttttttaaaataaactaggctttgaccatatgtaataacaaaatatattctagacaaagatttaaatacgcaaaacaaagtaaaggcaattcataaaacaagacaagcagatgcaaaataaacacagataccaattattacccagcagattggcatggattaaagaagttcataatatccaggggcactgagattatggggaaataaggacccttctctactttggtaggagtgtttaaataggcatgtcctttctggaagacagtttaacaaaaggaaccaaaacttttaaaatgtgcgttgggtttcacccagaaaccctattcctagaaatgcatcctaaggaaataactagacagctacccaaacatgcatgtatcacagtggcaatagtaacattctgaataataaatatattagtgacaactaaaatgtcttgagacaatgaaatattatagaaccacttaatataaagatatcaaactattttaatgacatgaaatgatagtcacaaatatcagtacatgaataaacaaggttatagcatagtggggatagtacaattctgaaatacatatttgcctagaaaaaagggaaatttatatagaattattaatagtagttttctctggtgttagaattatgattggttttggtattattattattattttgaagcacagttttgctttgtcacccaggctcttagcttactgcagcctccacttccctggctcaagcgatcctcccacctcagcctcccagtagctgggattacaagtgtgcaccaccatgcccagctaatttttaaatgttttgtaaagataggttctcactatgttgcccaggctggtcttgaactcctgggctcaagcagtcctcctgcctcatccttccaaagtgctgggattacaggcatgagccactatgcctggcctggtttctgctttatccttacgtattttctgaaattgtcttgccatatgtattagtccattttcacactgctgataaagacataccagagactgggaagaaaaagatgtttaattggacttacggtcccatatggctggggaggccttagaatcatggtgggaggcgaaaggtacttcttacacggcagcggcaagagaaaatgaggaagatgtaaaagcagaaacccctgataaacccatcagatcttgtgagacttattctctaccaggagaacagtgtgggagaaactgcacccatgattcaaattatctcccaccaggtccctcccacaacacgtgataattatgggagtacaattcaagataagatttgggtggggacacagggccaaaccatatcaccaagagtacatattactctgatgatcagaaaaaacatatagtgttcatttttccttttgtgaagaactgccaagaataacattgatggtggagttaataacttgagagaaactacagaaagagcaattgcctgtatcacatttcaagtcattaacaagtgactgctccacagcctcttctctgtggattcaaaagaaaaactgatacagaaaaactttctaccaccaaacctcaaaagaagattgaaaatccttatcaggaaaaccagcagtattattgaataaattacaacatattttgcacttcaattgcacagataatgtagatactcatacaccactttcacactcaatccccatatcacatctctgcatttatcaaaccatgtcaaatattataatcagataacttagcataaagaaacatggctttatcttacgtaggactctgtctgacttgcaagaattctcatttactcatttaattctgtttttgcaattatgaaagaataaaaagctgtttcatctattttaattttgcatatcaagcacagcatacaatactatggtaaatgttttcataatagtctaaaatcagtagcaataaatgccaccttagttttgtaatgtataatttttcaatactcttgtttaaattagcatacagtctttaaaagaccatgtttagtggaagaacaggcatttttactggtagtaatagtatttctactaataaaaatgagttattattagaggaatttatttccccaatggctttatggtcaatcaaccacaaattcagattcacacccagttttagttttatcatggtatctttttcaacttctacaaataacaatttttaaatgaaaaatattgaaatactggaatgggctaattgaatttttctgccatctgcatagtatagagtttttaaattatggagcacatatagttcaatctccttatcttattgatgaggaaactaaagcccagagaaagtaagcagctcttctcatatctcaacagtcattaacagattggaaaacagaccttaggtcgcctgacctctattacagtgttttcttcactgcgctacagaaagtctgaggaccttatacatgcaacaatttacagaatgttctctcattcattgagctcccataataaccatgtggagtattactattattattctcattttacaaagggattaactttggcttggagaatttaagtgactttgtaacactttcagtcatgaagtccagtgctttagattccaaagccagagctttgccactcaaatcaatgctgggatgtgttttccggaattaactcccattaaaagcaatccattgctggaaaagttttggaagtataaaattaagtgtaaaattatataagaatcttataaaaagattcataaatttcaagataattattttccaagaaaaaaatcttttagagtatgcatcttctcaaagcatcagctttctatagataattaaaaattgaactcagagaataatgaaagcttaccactatttgacttagcaagaaattcaagaggactctgatccaggttaacctttgtatcaatatcaggaggctcatagtttaagtgaaaatcatcaatgtaagcgtctagggcttcggaggcagagaaatacagcttttctttatactgtatggagccatcagtattaaaggatatgctgttcagtattaaagttgctggaagataagattcagaagtgctaaactgatgtttcttaactgactctgccatggctttctcacaatgggccacaatgtccattcatctttcaagaaattctaaacacaaaaaaaggtacgttaagttttcagttaagtaggaatggataataatactcttggaatccttgctaatctttcatgtgtaattacttattaaaaatgaaattactctttatctccctttatgttttatgtatacttgactttcaagcaatgttcattgattgatagatgattagtttcattggcatgactgcaagtgtaaactgtgtttcagaaatatatttgggggaagggcgagagcggtggctcacggctgtaatcctagcgactggagaggccaaggcaggtggaacatttgaggtctggagttcgagaccagcctggccaacatggcaaaactccgtctctatgaaaaatacaaaaataagctggatgtggtggcgcgcacctgcagtcccagtgacttgggaggctgaagcaggagaattgcttaaacccggaacataagccttgctaggtgaccacataagagaggtactgctttccttcgttttcagttttacttgattaaacaagtgttctggaatcttgagatatttttatttgctacgttaaaagatggcagtcctccattatcacattctagttttcattcccttcacctgtccccaccccattgatgggataaggaaagtcacatataaattcaagatgaaagcaacagggggccctggcataatagtgatggcaaatagagaccaggtagcaagaagaggtgagtgctgaaaggagtagaattcaggcgagagggtgtcctctcatgtgatactctggctttggtacaggagttcagcagctgtagacctctctattctcaccttacatcaatcacttactctttgcaaaattataaaaggttgctacaattagtaccctcattttccagatgagaaaatggtggtacacacagattaagtaacttgtccaaagctgcagactagggaagcaacagccaggctgaactccagctgtggattctgagtctgaacttaaccattgtgctagactcccgccttatgagtgcagtaactgcccagatgacctgtaatcctctaaacgttcaccacaagttacatgcatcaatgtctgccaaaattgggtgccgaggttctgtggtttccaatatacttactcattggtatgtgtggggcgaaatgccattcatgtgacaataatatacacataagtaccaaagattaaatacttactttttcagccctttgaaatttaggtggacatgttgtattttcagaatgttacattatacgacatcataatacataaattttgcatctgtggaatatttttcagtttcctctaatatacacagaagcttttgagaatctgaagaaaactatgaatcaccttcccacaaaaatgcactttagcagacacagaggcaatgggttccaggattcctgaggcttgttcatggtcctcctgcatctgaattctagattaagaacttttgtctaaagaaattgacagaagtgaaaagaaaggaagagaaagaaggctaaccaggaaaagaaaaataagacccttattagggatggaacaaacaaatccaacatcacatattcttagagatatcatggtaaaaaatcttttgactttagaggccctgctcaaaaggtactttgtaaatcatgatcgtctttttcctcctccttctctggatttgtcagtatgaattaattactattacagatcagagatgatgggttttggaactaaagagacctgggttaaattcggtttatctttaccagctgtgtgccttaatcccctccctaacatatgattcctttattttaaattctgcttaataatctttagaccttgtagagtagctgcatctgtttgatttcctgctgctttgcactagcatagccatttcaggggtaagacattgaaatactttgaaaatagttgctaaaagctgcttccctccacccactcttcccccctccctccaccagtgccttcttgctaccgaggccctggcccacttcacctagaagccttcagacctgctcatgatccagcaacttaaggggcaccatctggctccacagatcccgctcctggcttgtggctcatgcccattctgcctggttggtgcctggccatatagattgttaaatgttttgaatatcatcccggaagggccgtggtatgcagtaagtgttagtgtttctcccttcctcatcctttagtgctttgcctttctctattctgcatatgtatcatgatttgaccaaatgatcacgagaatatggcttctcccttctctaagttccaacaaaataaggaatggatgggtatttgtagttcccagcttacggcagttgttcaataaatgtttgctgaactggacttcagccaaaatactccattcaccataaagcattccagtgtgactgatgcagttggtaaaaatgttctgaaagacggagtctgctgggtttattgacagctgctgagaagcaacaaaataggcaaatacagtaatgtattcgagtcaccaatttaatcagagaatggctgaatgcacagcgagcaagaagttgatgacagagtcggtgacattatcatgcatgttagtaatatttttgaggttcacttatggcaaatctttaacaccagactgtccagtatgcttccacagctcaaagtccaattttaactggagatttaaagacgttttctatatccacttagttgcatgaataacattgtaaaggaaagttgacaaatatttctaaaacaatctagaaaatcaatgtgtaagatacgccagtgatcctgataattgaacactatttataaacaagtttatttggtgactttcattttatcatgtacgtgggaaagtgcaaattcattctcttggtttttcaccgtataggctcacagggggttaagcaaagaagaaagtgaacattcttgtagtttaaaaagcaagaggaccatatgcaatagcttaaaaaaagaatctatatatttcttaactgtatatcaaataaaattgcagattgttcagatattttccctagcaatttcatgtttgaagttggtctggctcgattctcttgatagtatttttaaaaaagtattcatcctataaaatcctcagggtgcatgcatctaccaggaggcaacccacttcctgaagaatagacaatatttcaagtagagggactagagaaagccatcagctctgtatttgttatcaccttaggctaagtcaaactcagtcagataagctgagtccctcaagtctgggcagagaaaaaggtccagaaatttgtactaagttcagtttctccctctcattcaattcaattaaacacacaattattgactgacaatgtgcaaggaaccatgctgagcaccgtatagggatacaaagatgggctaggcattatttccctcacaaggagcttgtagcccagtaggaaagataaaagcagcacatgaatgtaacccaaggaaaggcatgctaaatgccatcgagcatccccaagagtggctgaaacacagaggagagggaaattacttctgtttgatggaaattggtaaagtttcattttagacagggtagttaaactaggacatgaaaaagacgtaggtttcggatacacggaaatgaggaaaatcgatatgtcaggaagaagaaacacagttgaagacattaaatagtaaaatcacacacatatggatgtaggaatatatcagatttccttgggctcctttccttctgtggaagagcaggctagaaattctatgttatgaaccaaagtggtgtgttttagggctagctattgtatctattttacagaaagggtaaaccgagccacagaaagtttttaaaggctctaggagaatgtgtctagcgagttatagagctcatattatttccactacaccacagtgtccactttgcctgtcgtgcccaacggcagctgaatgaagccagcaccgtctccactggccatttccttccaagtgcccaacggcgggtagctccacatccaagggagggcatcccactccacctgtgcagttctcagaaatctctacctcagtttaagccactgatagaagaatactcttaaaagtattcttaaaagatcttatgggcccaagtccatctatgccacctgtatctcaggctgcttgggggagacaagaagcaccatgacagatttatttcttaatcttgtgagctttttccaaagaacttggtaagcaaataaagtatgttttatgaaatagataccatcttaactattctcagtctgactcaagaaattataagcccttaaaaatcaagctgtgagtatgctatgttatggaatttgaattttagtagaatatagtcagtaagatgagttgcatagctttctggtagaaaagacctaatggaaatatgtcacacattatctcaatcactggacactgtgatcaagaataccttccttgagagataacttacacatgctggtcactatgattaactatcagcatttagaccattagctgatcttaatggtcacgaatgaggaatagaagaaaccagtgtttgaaatacatagagcataggactggccaaccctataatcttgagggttcaactcttccctcaaactactaccctactgcctcttgtttattcaacaaatctctattgtcaatgtagaaaggtaacacacagtagagtttaggagtctggctctgacaccacactgaccagcttcaaatctagcagcataaccttgggcaaactaattaacttctctctccctaaattgcttcatctccaaaatgagcatggtaaaaatatccaactcatagcactgctgtaaggactaaaagggttaatatgagtaaaatatttaagacaatatgtacatagtactactgtacacagttagtaattattattgcctgctatgacccagatgatgtgctagctcctcctagtagaacatttgtttcctatcatgatgcatatactttttggttttaggggattccagcctacctagtcaacaggtggtatagcaactctggaatattaagcaccaagaaaagaaacctagaatttcattccctgtatccatttatctccttaaatttacattccatagttgaagggattaccctaaagcaggatcaatatttggtttatttcacacactggaatcatctgtagagctcagaaaagcctgaggctggaggagaggcatcagcaaaatttaaactatttcccaaatcttaagctttgagagatactgtgttctgctctagggactgcttttctcccgatgtcatttagctttttccccagcattctcaatcctctttatttccaaatcagagaatactcatgattgttgttcttttaacgtggatatgagcacttgagcaaatgtagctgctgaaagactttaaaagattttattcactttaatacaccatggctaattggggaaaagagcaaacaagcacattaggattatatctgtaggcctataactgtttaccggcacactggcaacatgttaagtagaatgtgacaatactgggtaatgaggaaaaaaaattcatttgcttggggaaaatctctatggacctaactttgaggaggagggaggggagcatttactcatttttttctaaactaaatataatatcatccatcacttctaaatatttttttttaattaaggaaaaaaatactagaatgaagaagggaccaaacaggctgcccagatccatttcctaccataatgtacaccatattttgagagttttctcagtggaggttgtggcatctggaaatacttgtgagaaaaatttaaatactatgaagcaaagggggttctgaggagtatgttgaaatttaatggaagagaagtattctgccttttgggaaaggtgattcttcttaatgaaaaatcaaatgacttgaaacaaattcttatttcactacatctctaggcaaagtcctatagtagcagctatgggagtgaaatgggttggctgtgtccccacccaaatctcatctcaaaccgtaacccctataatccccacatgtcgagggagggacctcttaggaggtgattggatcatgggggtggtttcccccatgctattctcatgatagtgagtgagttctcatgagatctgatggttttacacatggcagtttcccctgggcttttctctctcacctgctgccatgtaagacatgcctgcttctccttctgccatgattgtaagtttcctgaggcctccccagccacacggaactgtgagtcaattaaacctctttcctttacaaattaccttgggtatttctttatagtagtgtgaaaatggactaatacagggagaaaacaagaaaacgtaggagatagtgctttgccttcatggagattctgatgctgtgggagagaagaaaaatgtgtttgaaagttagcagttggcactgggcaggtcatattagtctgctaatgactagagccaacaaatagaggtagacgctctgcacagcgggtgctagaaagcatttccctgctgatctgagtggccatgtccccatcactccaggtgcttttcctgctctgtgaccaaagctgatttcaataacaagaagtctggtctggccttttagaattcaataaaaagtttccactccagacactcttggacttccattagggcctgtgtatgccttgcatatggtggagagccagatgagggttatgaaacagactacagcttttcatccctagcttgtttgatctgtaaagtaagaatgccagttgctttacttgaaagactccagaggtagaaaagactatcttaaaagagtacaagagtaaagagtttaaattggttgttctgggataaattctatttgcttacaactagattttgtcagaaaagtcatggttgttccaggtgtgatggctttgttgctcttggtaagagttgaatccttggatttcttgatattgatttctagatctcaggctctccgtttctacatacaattttcactgaatttctaaacttaaaataaaaaaaaacctctttcctacaagtgttaatatttaatcagtctaattaccccatcataactttccaaatatctctttttaggtaaaataccaaattgttaaaaccagggcctttataaacattaggtgcccctgtaagctgaacagctcacatttttgcagaatattcaggcattttgaacttgccaacttatcccctggaagtatcacctagaatgagaactatttggtaaacagaatcagtgaacaatctcacacctctgtattagccattcctccacttcctaatctcatgtagtagaatagaagctttagcacagtattgccttatcttcagtttcttacatgcttaaatttggcagtttagcatttatgtcactgtgggaggatatcgaacccaagaaactgttgacgcacactagactaggaagaaactatttgctataagcatttggcagatgcactgtaaaccacacccaagataatcgactgcctgaaacatcaacacaattcagtggatacctccaatagactgctgcttatgcttaacacatagcaatgaaatttaaaacaaaatttagggggcatatctatactcaaaaacaagatttatacctctgtggaccaaactttgaactgaaatatacacaattgagtagagaccagaggtgtccagtcctactgggtcaggactggacagaggctgtgatgacctgatgttcacagcctcagagaacagagactaaaagcctttcacatgcaaaagtcaatgaattcaggatcactgcaggaaccagtggctgaggcagggcatccttgctacagaggctgaaaacgctgtggtcaccactcagcactgtgaccactgattgattggggtagagggaaagaacaaagctatcaggcaccaaacataggtgatagattgaaactttttcaacataggaatagaatccctagcagtgataagggagacaactacaaaaaatttggacaagaagaagtgatcttaaagaaaaaaaaatcacaaaatgactaaaaaaccaaattaaaccacactaaaactattcaagatgaacttgcaaagataaggtaaaataaagtatctaagtgaatacaacctgtgccaaaaacatgataaggaaaacaaatataggtcaagtcctacagaagagggttgtagagaggatttttggaaaggtaaaaaaggaaggaaaattttgtgaaaatgaaacaccatacgcaaaatcatggaagttgaatgtggaatgttgcttggtccctggttaagtatcagagcactaagaaaagaggagttaggagtagttggagagagaaatgtgctttataaattgacatggggccaaactatgctggtatgtaaataccaggaagagaagttgaacttgatttctaaataatggcagcaggacaaaggtgtgataagcaaggtggtagcatttactggaaggaggagaggagggctgtggggtcctcagatgtttggggaggtgatgagagttgttaagatatgacatgaggatgtctgcgccattatgtacaataaagatggaaagagatgttttaaaggtagaattcataaggaacagattgggttagccactggggataaacaagagggaaaatttaaatattgtaagtctgggaagctggtgccactaaagcaatggtgaaaattagaaaagacattcccctaggaataaagaaaaaaatctaatttagtcatgctgttttttacattcttattttattttcattacctctttaaagtattgtacgcaggaacatgaagaagacatgagatgtttaaacactcatcatcaagatttcacaaatgtatatcttttgttaaaattgtatcagatatttttaaagtaacaaaatgatccagatactactctggatcaacttctccaactcatatccctccacgttcccccaagaggcaaccactatccccaaatgggggttgttatcctcctgctgtgcacttttatgcttttcccacatttggatgttcttatacactattactttgtgtgctttaacaattcatataaaatcatgctgcaaatctttctgttttgttttaaagacttttttatggtggctttaggttctctgcaaaattgagaaaagggtaccgagatttcccatatgcctcctgccctgccacatgtgcagcctcccccactatcaacatcccacaccagtgtggtacatttgttacagctgtatctacattgatgcctcattatcacccaaagtccacagtttacagtagggttcactcttaactacttttcattctatgagtttggacaaatgtataatgacacgtatccaccatacactaatatttttttgcagtttttttgtactttttttttttttttttttttgagacagagtctcgctctgtcacccaggctggagtgcagtggcacgatcttggctcactgcaagctccgcctcccgggttcacgccattctcctgcctcagcctcctgagtagctgggactacaggtatccgccactgcgcccagctaattatttgtattcttttagtagagacggggtttcaccgtggtcttgatctcctgaccttgtgatctgcccgtcttggcctcccaaagtgctgggattacaggtgtgagccaccgcacctggccttctgtacttttatgctttgaacacatatatatgttaatacaaagagagctagtgtattgatatatcatttgagggaaattagatatactgaagatcaggtgaaggactggaactgtaagtattgatttgacacctataaatatatagggaataattgaactctgagtataaattttttctccaggcatccaatagactctgaggtttttgagagcaatgagcctgtctcattatctttgaaagccacatggtgccagtcatggtgtgatactcaacaaatgattgtcaaatgaataaatgaacaactttttctctctctgtagaatatgcaacacagcttggaaactggcagccacaggcaaaatttgaactataagtgaattttgttagccaacagtgtatttttttcaatagaataaatcttttaagattgggagatttcccattttaaaaaaaaacagatcctgggctttattgcaaaatctaaatatctgacaacacctggcttgtacttcagcctggcaataatcaaggtgagtagctgcagccctccttaaacagactaagtttccagtgtgacattaccacttcccagtgcctctctgacaccaagaccaattgtctcttaccacggattattgcttgcactgttgtttttcttatggtacggcatatttcactgtatcctagcttctaagaaagagggaaaaaattaaaatggactgaaaggtcccagtgcttcatgcaaaactggaaataacatatttctttgcaaaagtaaaggctgtatccttaggtgtttaatatgcaaacagtgtatctaggtcatgggggatggcacttatttattaattaaataaatattaaatgcctggctcttgaaggtatttcagtttgcaacccgacctcctcttctcagatacttttaagaaatgcagtatttacatgaactttaaagaaaatgaattttctctttggctttttagtatttagtctcacttggtttttatcccaatagaaaattctaataacctggaaaccttgctaatctcaattttctctactagattgacctagtagaaccagccatgattcttgtgtaatttactatcagcaaatatttccaaaaattgaaatcagtttgattttgatgtaaacaagaaaaaaaaatgggagcaattcattttaactctaactctaggattgccagttatagggaattaatcaaaaggttagatttgcctcaccaaattttcacctttaaatgatgtaagacagctctctaaatgacaatttatcaatcaaggatactcatcagcaagggtcctgaaaggaagatgatgatgagaagtagctgtcagcctctactgaaggaggaccctccccaccaccctggtcccgccccattcgccgccacaccactgcccaggtgaggttgaaccacttctgactttgggatgggaaggcagtggctttagcacccaatcctcataactggacagaatatagagtgtcaaaaaaggtggcagggactggctggctttatgtctcaagtagggtgtccttctgtcctaaactgagcctctattcaagctttactccaatcatcatcttagataaaatagatctttcaggtctgttacattaacagaagtttatttttatagaaaacatggtcttctgttagaaagtaatgttattagacttaaaagtaggggacatctgaacccttgctggagaagcagattctaaaagccacaccatcccttatcccatgtttgtatgaattcagacacttaatttccagccctgacgggtttcctttccactgcattttaaagctattcccgcatatctagcatgaacctaatcgccatgaaaatgtatgactcttcctagatggataagagaaaaacaacagacaaagcacgatggccgtaatgtctccaaggcgacaggagggattctattttaggggattttaaagtttgctcttaaatgtctgaaaaagtcatgtttcaagaatttaacttaaatttaggttcttacagaaacataaaaggtattttaaactttattagtcagtagtttacagttttctcacaccctaagaaggtaagtcctgataaacccttaagggggaattctctacatttaaagtgtacttattagtgaaagtaatggtatgaaattatttcaaaagttaataaacataaataaacatatatataagaatatttatacaactgatttgttaatgcaaaaaaacctctgaaaaataaagacaaaagaaatcaataagaatgatacaaatgatacacaagatttttgctactattaattagcaaattactttgagaacttaatgcaacctaagctaaccgtaggtttgggatgaggactctcttcgcagctagaaaagatccttgtaaatgtgaaggaatgcctagtaagtaaagtacggtagtaattaaaattgtagtcttgtattcctgtaatccattccttttgggagcatccttttgggggcatgactgcatgtggatatgataagcaaccaacttaaaatccttcatctagctggggcaggagaatggcgtgaacccgggaggtggagcttgtagtgagccaagatcgtgccactgcactccaggctgggtgacagagcgagactccatctcaaaaaaaaaaaagaaaaaaaaatccttcatctaaaaagcagctcctggccaggcatggtgcctcatgcctgtaatcccagcattctgggaggccaaggcaggaggactgtttcagcccaggagtttgagacctgggcaacacagggagatcctgtctctaaaaataaaaataaaataagataaaataaaataaaatagccaggtgtggtggcatgcacctgtgttcccaactacctgggaggctgaggggggaagattgcttcagcctgggaagttgaggcttcagtgagccatgatcatgccattgcactccagtctgagcaacacagtgagatcttgtctccaaaaaaaaaacaaaataaaacaaaaacaaacgaacaacaacaacataaaaggataaaaataaaaagcggctcctgaactccttgccttgcttaccctgctctagcaatactgtgccccgtgatgatccttacatgccaagttcattcctgctgcatggcttttgtacttgctcttctctctgtgtagaatactctaccctagatagtcatgtggctttcatgtcttggctcaagtatcacctaatcagaggctgttcctgactactccatttcaaatagcgctttccccctcactctgtaacctcacaccctctgttaactttctgcataacattgagtgtgcatttatttgaatatttgtttattgttttactctgccattagaagtgaagctccatggatgcagagacaaggcctattttatttgctgctgtgtaaaccctcaccacccagagttttatctcacacgtaggtgctcaataaatatttgtgaatgaataaatgaagttgtcattgtgcatttctttttgcaaacaactttgctctatttatttcataacaaaatacttaaaagttacatttccacatgcattaatacagtgtcacataatccttgaggatgtgaatgttaaggtgtttccatttcataagctcctaaaaaagaacacatgtaccagtctctgtattgattctaatttaatataaactctatatgtacacaatctaatagaacaattcttttacatttaaaattgctgttcattctgacagtatgttttgtatgttctctaaacatggacattttaaagatatagttcttgaaggacccagttttgtagcatatactcactgatgactcaataactattaactcttggtgacttgttgccatgcaattctcttgtaaattctctctagtggaaaagaaaaaggagttctaccttgcttttagaccacagaaatggtcttatatagtataaactcccaaaacgcatagagttaacacacaggttcaacacacaaaataaacaaagggttgtttttctattaaaatgattctatttgctgtaccaagatagcatcaaaataaatcaatgttcatgcttctttagagagaaaaactaaagtatctactgttttctatgattctcatgttgatgcctaaatgcataaaatgtgacggcctcagcccaactattctcttgtgaactgttagctgtctttgaagtaaggaatcaatattgtgttcacgttagaatttgtgactatcttcaaaccttagtttggctattaaaatggtctataaaattcataccctaaaataatagctaaatattaaatatcaaaatcaatatcataatatatctcctattataataatgcacctacgtattcaaatgaatgactgtagcttagtattggaatatttatcagattgttcttatgtcatgggtaaaccttcaatgctgtttgaggcactgaggaaaaatgattaaattaatgaattatcctctaattgatatttaaatcaagaacttatccatcagctaataacaaagtatcaattagttattattaatcaaggtctgttaaacaagatttgtattgtataattacaacatcttcaacatttatatttcatgaaaccataagactacataataattgtacaaaattttacaaagcaatttcacatacacatttctcataaaccagtttcagcccattgtttcatatggcagcacataacacatttctgctgcatgaagtgatgtttgaaaagaagcctacgttattagtttgtcaatttgcttttattcagatatttatatttatattattgattccctgctaggtgctaggtattaaggatactgagaggaataagatatgggctatgcccattagagtagtggctatttttgcagagcatccaataaatttgtgtgtatatgtttatatgtgtgtatatatttatgtatacatgtatacatgtgtattacatgtatacaaatatatattatacaaatatatcatcttatctttctaggatataaatagttatactctgaacacatataaatattgaagttggaatgaatgttatcattttaggaaaataaaagcataatatacagataaataatggctttcctggaaacgacagaaacatgcttaagtttccagttgtgatgcacctagaaattgagaaatacttgaaaaaatggctcctatacagtaatctgaaagcagaactgtccttcagattaggaggcaacttccatcgccaatttgagaaatttcaggaagagcttcctatgctgaatatcaactggccgaagagtgtacagttcttccgttggagatttaagtcatctaaaatttccagtgaaaaaggccaagtctttggagcactgaaacaatcaaaatccctaggagttaatttctcaaaagaggaattacttccatcaaacaacaaaaagttggctctgaaagtaaggttgtacgaaaatgaaagctttgttagattttggcaaaaaaaaaaaaaaggtggaggggagatgggaaaaaaaataaaccatacttactactattttcaatttgacttgggggaagtcctgtctagagaatttagcataatctttttcaaaacctcagagggcttccatatgaatattaaacaccatgtaacacatatcttacccttggtgttgtctaaaatttcactggagttgtaggaaagatcagataattcatacattttcgttttctcaagcaaatatttttctgagtttttgtctagttttacatttagcattactgtagtatcatctcaagcctgtacaatggccagtattctatttctatagttatcaacccattcttctttccatctctatccttaagacattttaagtcaaatgattaattcatccagaagtctttggcacttaatgtaatcatttcaagatttcactgtgtaccatttgggatagtaaaattttggccagaaatgatttatatagaacaaaggtcttttccttctcatacgtaacactgtagccattcccaccctgggttcagtgagagaatggagccctattattctaaagtatccatactcctgcgcatgtagaatgatattaattgtgtaccaaccttggaagaattaagaaaacaatcaatcaaagcattttcagggttctgcggttcagatgagtaacccaggttgagaaagaccgagatttactccattcaaaatgcccctctagagaggttttccctctaactgtggctaatatctattaatcctgactgcccccttgttattttctcagttcattgcctgctgtagtcaaaaattctgcttctttcctctccttcctctgaagtctctctctccacttccccattctacactcctggccctcaaaagtctatacaagttaaacacagtatggtggaaatcatgcataacctgtttaacttcacatctttttatagtatcatattcccttgagggcaaaaaagggaactttaatatatttctgctagcagctgatgagtcaagattcttgtgcctattataaaacttctccaaagggaagcatagaagcacacctttctttagatgattgggtgaattatttcatgatgcattttccatattttgtggtatacaagcccgtcccttcctaggatttggtaagaactactttaaaaaatttctattgcttacctaaatgttgaaaaagatctcatgaaaataacctcttcctaccagaatacttgatattctaccctgtttctcttcataaaaacaaagcaatggtaagcctgaaccactcaatctaatctcttgcattaaggagctagttttccactgtcgattactgctctacccttcctgatctcattgagatgaggttagacattttgtcatgttcactgatcttttctgcctttgattccataaacaggaaccatctatgagtcaagctgtacaatcttggattaaagcccaggctatcaatgctttttcaaagggtgtgccataatactgctgtcagaatcagtttggataagaatgcttgtttgacagatcaaattctaattctaaatggtatagcatcccctttctcattaacctttatcacagcaacttgataatgttctgagatcaattggaattatgcccacaagctctaccaaattgaaagatgactatcattctttatgtcattgttttattatgaagttgtattaattattgtcataaagagcttagcatagatacactaatgataaaatgcttatattttgtgaatattctctaatatataaataaaaaactgaacctcttcccaaaagtttacttattcatctatatggggggaaggtacattgtgtagagaatttaacttgccaggcttcaggcttctcaggaagaagctgtattcaaaagtagagtgtatgaaggtcatctacctctttcaccatctggggggccaatcagtaatagctgccttttaaatgttatgagttcaaatcatctctttttgcttcatggcacagagcttaatggtttgacagaattgacttgaaatgatttgacagattcaaaatgcagacagctctgcactttggaggtatgtgtggggtgggtgaaggagtccaattcaactacagacatgtctgtagtttatttctgtgcagaagtgagtggggagactctgtctaggaaagaacttgttaggctcctaaatttttgtaacaaagtgaaaactttgcctcctacacatatgaactctaaagcgtgtgtgtctaactttgtaaacaataccagagaatactggcacaggaggcaattctcaaaattcactgcaacgttttccgtttgcacctgccaagtgtgcacttgaaacaacttgcgtttgaaagccactgtctaaggatctaagaatggctggtgcatctatgctccaatctgtgttgagataaatgaatgctttccaaaaatctggtttctacagtgttagcgctacttgaagaaaggtcctatcaccaaataaattgggaaaatactggtttaaacaaaattaattggatttattttctatcaaacttctaagggtctttaatatgctaatatggttttgaatctacaaaagggagattacattttttttttttgcatttccaagacaatttaactcgaacccatttctgatggagtaactattcacatctagcagggttagttttatgaagaacaaaggttgggaaacactgagctagagctccaaaaatcaatatgctcagactctactacctgcatttcctgaagaaattacttccctgcattatgacatcatattgtgcccttggcttttgtagtgagtcaacagagaaagagttttaaaaataactttatatttttgccacaccataattatagtctctaacatacattagataaacattcatagtatatattccttctagaatttgttgccaggtatgattatgtcttcaggttcattaatgggcaatgagatttataaacacagtaagagcttcccctgcctaaccctcaaatgctagagaactaaaatgtgccttaatacaacaagaaacatattctgggttgctgaaaaattttcttcctaaataatattttgtgtcttttatattataattgggtatcttgatatttagcttccttatcattaagctgggttaataaatttcaccttaataattgtggtgaagaatgtaaggtatgaaaatttaattgacataggtacataatatacccagttcagtatctcaattatgataagcatgaaataaatggtagctattgttattagtaatgttaatattacttttaatcgttttgtttttctctttttaatgttaatggtacaggagagtaaaagataaaaagtaaaagttttcttcctccattctttctctccctcattccccttcctcaataggaatttttttttctttttactgcttcagtttccaaacttctgaaaataccagaataaatgttgcaatttcttggcttactaggttttcttttccttttttctttttagacagggtcttgctgtgccacctaggctagagtgcagtggggcgatcactgctcaccagtgtagtctcgatctccctgggtgaagagaacctcccacctcagtctcccaggtaactggcatgcaccaccacatctggctaattttgtaattttgtgtagagacaaggtcttgccatgttgcctgagctggtcttgaactcctgttctcaagcaatactcccatggcagcctcctaaaatgctgaggttacaggcgtgagctaacacaaccaaccaaaataaactttttattacaatatggcatacacaaagaatagtacacaattcaaaaatgaacaactaggtgagttttcagaaagtgaacatacctatataatcacaacttagaataagaaatagcagagctctggtatccccataagtgtgtgtgtcctccctgaagttaaccaccatcctaacttctaccctcatagatagatttggaatggttttgagatctgtcataaatgatatcatacacatttttcctgcttagcttctttgactcaacattatgtttgtgagaatcatgcattttattgcatggcagagtggtgcatagtatgccaataattaccacatgtatttatgcattctactgttaagggatatttgggttgtttccagttttgtgctattacaaacagtgctgctaggaccattcttgtacaagtcttttgagtcacgtagcatgcatttttttgggtataaaactaggagtgggactgctgggccatctgatatgcatacgttctgttgcagatactaccgaacagttttctaaaagtagtagtatcaaattatacttctatgagcagtatatgaaagttccaattgctttaaatctgggccaacttttcatactgtcagtccttttaattgtagttttccttaccatgtcaacttcacatggtattttacaacatattctatgtaagttaacacagttaacagccctatacttccctgcacttgtctttcccccacaaacataaagctagtcaggtatgtaactatctttatactgtaaaaacttatattaataacatttacgttcccttcctagttataatttttatgctttctctgtacagatagaatataaaattttaaatatgaataacaattataaaatgatgattatgtaaatatttttcactggagaatcaaatactatgatggaatccctaaagcaggagatgcattctatgttcctaaatctgtgctactcaatggagaatcttccaagtataaaggtcaagttcatctgccaaaaattttttaaaaacatgacacattttacattgcttcatatttggatttttacctcttgtccagcttttgtcccccttaggatttctatttgcctttcttgttcttgttgacaaaagaaaaattatatctttactttatcattaatttaatacattattaaaattctatcatattataattaatttgtcattattaagaaatccatattcttcatcaggccttctgccttgactctgatgactggttctcatttggattgactgtactctactatataactgctattctgggatatcattctgctgcactcttaaattagatccacagcttctcgactttcacactttcctctttcctagattacttctatatacatttttgcttaagtataatctccagtcattttttttctaagagcatgtgttggatttaaattttctgaatcattgcatacctaaaaatgtatttattttatgctcacccttgatagacatttttaggtttgaagcatttcttctcaaacattgaaaccttttttttttttgatttggtattgataaaaatctgacacgaagttgattctaattcctttataggaaacctatttttatttctcttgagaagttcttaggatcttctcattttccacgatgtcctggaagaggatttgtttatgtctttgtttagtaattttgcttagagctcaaagggccctttcaatctgaaaacatgtttgaatttggagaatttacaccaatcatttccattataatttctttccccttttctcgtctgctctccaaatgctttttaggttgatgttgtacctattcaattgatcttctatgtatctacatttttcaagtatttgccttaactttgtcaactgtttcttttagtgaatattaattttagcagtcatagttttatattctgtgaattctgtatatttctcttttgctcccttgtcattatagctggtcatgctttgtggatgtgataccttcttgaatgcaatattcacttgaatgcttctgaggctactcattagaatttttaaaaatctctcttttgttcctgaatcacctcttctttcttcaggtcagttgttagtccaaaagatgtcaatgatccctagttatcagtttacatttattaataaagaactaggttgcctaatacaagtagctggtgtgagttatagcactatgttttcttaaccactttttccccaggataacagggcatgatcactggcagacttcacccaaggcctcgggtgggagacaggcagcagggtgagcaggcagtacacttgcctattcctcaactccacaccaaaatggggagggctttcttggggggtcatcactacagatccatgaatttcttaagagactggctttctaattttagattagggaacaatagggaaggtgatgaaggtgaaggaggtgtttaactttctcagctgttccatccttcaaaaaatcatcttgttctctgcctccttcctctgcctgatttccaaaaaccacacaagtttgaagcctgtctgtggttccatggccaggaagggtggctcctccctctacttttcttgtatttgctctggattgtaatgtctgcttggtttatccactttccatcttccacaaatttctgaaaatctcttgtttcttgatatccttttctcctatttttagaactgccctttttacttatgctgatatttgggatgtagctgaggcaaaagtttgtggtcagtgtgccttgagtcactaatcctgatatagattttaacatttggaaggcatacatttaaaataaacaagtagcatctatacaaaatatcacaaggaattaatcactcttggaaactatctttactctgatactttctgagtcttcatagcctgtaaaccaaatttatcaacaaaccatttagaaaaacaaaggcaataaacgaaattcatttttgatctgtatgaggtcacctagctttatagattagaaaagactcaattcaatcagaaactctgtggggtcctagatattccccagattgaattcaattgggaattttgtcatgcagaattaacaatagtttgtccttcagcctccagctgcctggtgctgtttctggtcccctgccagtattttcctccagacagccttgagcaggctttgggaggaggaggggaaggaggaaggtatggaacacccctctagttaaataggaaattgggaaatcagcagatgttagaggatactaaagatcctcagaaaaggccgagtgcaggaatagctcacacctgtaatctcagcaccttgggaggccaagatgagaggatagcctgagcccaggagttgaagatcagcctgggcaaacatagggacatagggagacctcatcactatcaaaaagaaaaaaaaataataataataccagcatggtggggtcctagctacttgggggttgggggagtggcagggaggctgccgagacaggaggattgctcgggcctgggaggatgaggctgcagtaagccaagattgcaccactgcactccagctgggcaacagagagaccctgtctcaaaagaaacaaataagcaaaaaataaaaagatcttcagaatattcctggagctttctttccccatgtgatgtgaaaaatcaagaactctgatgaaaagaaaaggcattatctgaaacactccaagcccaaaacaaatgtgtgggattggttaagcccggagatctttaaaaattgacatcatttggccaggcatggtggctcacacctgtaatcccagcactttgggaggccaaggtgggcagatcacttggggtcaggagtttgagaccagccgggccaaaatacaacaaattagccaggtgtggtgatgggtgcctgtaatcccagctactcgggaggctgaggcaagagaatcacttgaacccaggaggcggaggctgcagtgagctgagatcgtgccactgcactgcagcctgggtgacagagtgagactctgtctcaataaataaataaataaataaataaatattaacattatccattcgacagatacttattgggcattttctttgtaccaaatactttgtacttgccagtgacataatggtaagtaaagcatggatactaattttcaaggaattcatagtctgatggttgtatacagataaacaaagaattatcatcaaatgtagaaagcataatgaaagccatctatacaggtttatgaatacacagagcaggagtacctattcagtggtgtgctggtaaatgtttaacaagtggctttgtcggggcatgccttgatttatagcatccatcaatgtctctggtgtaaatactcccactatggccaatttcagtctaccaacttgatgtcattgaatgtggagttgctaagagatgtgtggcacaccattatagagtagctctcccacatagatagagtagacttcaagagcacagaacataaaatgtagtaatgattagaaaatgatgaattgttagtattcattacctccgtttttaatatcatttaattgcaaatttatataattttaaatgattgtgtttacaagctagttcaaaaaattctttaacatttaacaattggctccatagaagatgactttaaccaatgaagtctactcttcattgtgggctagggcaacagactttctgcaccatacaaatgagggtgaactcctttgcatgagtagctatgtccattagcattgaaagaagacaagtaacagaagagaagagggagcaatgagaagagctgagatgctcagaacattgcaccgcatacaaccaaagcagaaaactttataaccctgcctttcaactattttctccatataataaccttccgcataaggggagaagaaagggagagatcagttagcccttaggtccctaaatagtaaggacaaaaaatcacatgaaaattacaatattcatttccatccccatggaacattccttccagtctatgctgatgtggactgccaaggagggcagacttgaagacttaacaaaatgatccactggaaatcctacgttagcagtggcgctcataacttcatacaggactgcaggctcagatttgcaggggtgttcacacagttctgtggaatgagagcaactcaggagtggactcagcaaatggttgagtcaactgtcatttttaaactatgtcttcaaaactctcaccaaaatgtatacacacaaatgcgttataacctgtatcaggcctcttttgattgcaaataacagaaagacctggctctaatgggcttaggtgttaaagacatttaatggctaacttaactgaagaagtctaagggagagctcagagctcccttaaggtagttcttgagcaggggctgaagtgatgacagtcagatatggtgtctctttcttttggatccactgccattttcagacaggctctgccctcaaagtcacaggaaggctatagcagtttcatagcccttatatctgctcagcttctcccttctagcagctgagtaaaattcctgggcttgtctctggctgaaacatatctagtagcatctctatgaagctgccagtacgttaggtccatggctcccaaactcagctaacacagtaaagtcacctggggaatgtgttaaaatgccaaagaacaggccacacttccaggcaattaaatcacaatctctggggttggatccaggcaacattattttcttaaggttacaaggtaattccaatggagagaaaaatttagaaacccctgaattgggtgctcataaaaataggagattttagactcatcttctgatttactaagaaagtcaagtttgattaatttccttaatgtccacctcaaagtctttcttcctatgctttcctgtctctgtgacaagagtgtccctcttgctcactctagctggctgccatctgtctcgtggtctcacactcacactgtcttgcctggttctagagttcatccctcttctagtttgcatcttgaaattttacctccctactggttctatccttttaaaaaatgctcagatttctcccatcctataatagccttccttatcccccatgaccccgccctccacccccacaggctgctgcccatctacagcctaactttcaccttcagacttcttaaaagagtggtctgcccttgttgcctttaatgcagagaatccttataatctggtttggacatcaataccctgtgaaaactgttctctcaaaggtcagcaatgacccacttacaaaacagaagggctgcttctcgcctctccttctctcatctttgctttggtttttagatattacggtatccaaacgctatttctcccactgtttttctctctgccacctctattagcttaagaaagccttggggaaaatgtgtgggacgtgtatcctaaacacatttctcagacaatatgtatcagaagacttgaaagtgaagatacatgaaggcaacaatttaaagcacaaaataaattctttaaagacaattcagtatcatgtattagactgaaaactgggaaacaaactaaagatatattatccacataaggaaatactacagagacagtaacagtttcctatgacaagtgtgtgctaatgtgcacaaatgggcagaatattaggaagaagatgtaagacaaaacatgtattatacatataatttcaacttattaaaaagcataataatttgtaaatcaatttgttttcctccattggtttccattattatgatgacaacatatctttagtgatatttagttttaccttttctcctaattcatctgttttgaaaatgaatagaaatttccttagtacaaatgtaacttattgtattcttcatatattcagctatttaataatgtagttggaattattagtaagaagctctttctcactttctaataccccgagctttgcctgaatttaggtggtcatcattgactgagacatccaagaccactgcttttattgctttttgtaatggcaaggtcaaagtttccttggtttgaagggtgcagtaacatcctttaaggagctacatgtaataaatatctgggtgcattttttttttggatatatgcgatactgaaacaaataattattttaaaaatctgcaaataagattttcttctgtatatttaataaagcagcagttactaattttaaatttaacataattctcatgtatatgggcaaaaaagtggtaagaaactaaaagagagaaaaagatgagtttcaaacactgacggcttgcctatccctagaaactatgtattttgcctcctctcaaatagtgggaagttatcaaattatatattttccgccagaataaagtgaatttactaatataagaatttcaaataaatcaactgtagtagaaaattaaatcattttgttatagctaacatgagtataaaacagttttcacaagtaatttttaatttacagattaagaaactgaaatttagtgggggaaattcagtttttttgtttgtttgtttttgccacacaagtaaaaataggaaagctaggaaaggttgacatatcttctaatttctaagtctattctatttcccctaccataaggaatgctgagagattagtgtggtgttgtcttgattaatttctctttattattctagataggcaggtctatggtttctatccgtttctagaagagaaaaaaaatggcaaaaatgaaacactggggttcctcctgtcctccacttgtgatcttaggaatgattcttaacttctctgaacctcttctttttcatctgtatggtggggataatgacgataatattgcaagatttaaatgagttagtacatgtaaaatgtttagaatagtacctggcagaaagtaagtgctcaataaatgttagctatccttatttccattcttcctcctaaacatttcccaaaagtatataagttaatcgattagaatgcctatcctacattggccctccttttcccagtaatgaaccagatatttcttcctaacctgctacaatcatataagaagggtgtagactccttcttgtttatatggggtcatacaaggcatagccaaaatttcctctggaggatgggtacctcctggaacgaggtaaagtatttctagcatccaattcccatttggaagacaggggagaaataaatgcgccattatgataattctaactagttatataaacgaaaagcttcagtccagtggagagtaaagcggtccaagccactgttcaatgtaaactccctcaaagcatgggctagaagcacagcaagaaatccatcacaatctggaccacgagcagcacttgcgcgagaacaagacctgcctgggacccagctgcagcattctcctgttcaagtggggtctctctatttgcaagagaaatatgccccatgccctagcaatagatgaaactccaataaaacaagacagacttactttgtgaaatatctattaagtgcatattattttaaaaagttgataggctagaaagataaatacgttaaatgcactagctttgatggcatgaaatgaaggggtggaggcaaagcagaaaggacatggttgcaggtgagatttggaaaggggtggaaagttaacgaggtggaggatacagttaagttgttccagatggcaggatctgacagagaaggccagcgagggttagcagaatggatgaggatggggagacaggagaaatgaggtccagcacagagagagagagcattctcaacccagatgatgatcagttctgaatcatatcacagagtggatgaggaatcattagagaagactgctgaaggaaccacaaggctagacacagacagatgggaaagagcaaagtgaccagaacagaaaatccaaggccaccagcaaaggagccatcaggtttggaacactgatactgaactctgtgatggattcagaattccttggattaaaagattctgcagatgagaaaagatgggaaatatttttcctcttccattaagacaaaacatttaaatgtgtttctttaattaagattacacttaggaaatgagtttctaaatagaagaacttttaaacacaggatgagtgtcagagtttaaagggatttagacgtcacctgagtaatccattaaaagtttatcagacaaactgtgagattgttcttgtcagagagaattgagaataagattactggttgtctgagatggttgagtttcagttctctctggaaacaagtcctagacgaatgtctgaccttccctttcaagcataatgattccatgattggggtaagtgtaaggaacaatgactgaaaaaatgagagtgagtgtgatcacaacccagccttttaatcttgctcagtgccagtggagagagcaatacccatacatgcccagacagcagaaaaggagaaaagatactgaggttgggaggagaaatcaggaagaagagagggagagagaaagaaagtagaatgcacagcagggagcagttccctgccagccacagatgtctcacttagacaccccattgggatgaaggtcaacggggctgcttatagtttgttagtgggaaagggacagggagagttaattctattttaggccatatgtgtatttgggaagagagagaaagtgaagataagtagaaaataaaatgacacgtaggccagctatgatgaaaaatgttgaagtctatactaaagtgaaggcaaaggtttccgacatgagctttgagccagtagagaaaagacagagagagagggtgggtggcagcaaaacaatgaaaggtgcccagagccgtgctccctgtggaatgtcagtaaatattaattggctgatgttggcattggtaggcagagtgaagcttgtgaaagaaaaatgccattgccagtggagcacgaaagttcagatctcggagctcaaaatggcagcacctgagcaagcagcagagtcacatcccatatcaccagagaaagtgattctctgcatatgaggccaaactgtctcaaggaaaagtaatcacacaatcatgacaagagaaaaagaacaaagtctgtgggagccatgaaaatatctccccttctctgagaacatactcccttcccctgaggtatggtagcccctagctgagaaaccagggctgtcccaggtaaacagctgtgaaggtaggtgccaagaagcctagatttacccactccagaaaacccttttgtcagatgtctctggaaacctcacaaaatgttattttgggatttggctctaaggttgggtaattggtagactctcattctggaggaagaaaagaacggcattgcttctttagatttcaatattagatgggaaacggaatgcttttgacggtgcttggtgttttcatgaaccaaagttcctctcataatggcaggcatgggccttttgggtaaaggttattttcttgctcttgttctacattggtaggtacctgataaggcaaaatgattgaaacagtggcttgaaacattaataagaaaatgactcaattcccaagtcagagaagtgctaagtttacctgaaatatattctactataatactgtggatcagtgtctatgtggagtgatccaaggacttgtctagaaatacatgttttatacatcttttaaaattacatctgacctaaagaaaaaatatttattgttcaataatatattcattttaaaaatgctttttacacctataaattgtcccagcccagaattctaagtgcaaaaatgtcagtgtctggcacatagtaggtacttaatcgatatttgttaagtatgtattagatatatgaagaatgtaagaatcaagtaaaaatatcaagaatgtgggtgtttgtagaaaattgtttcccttttattccatcattttctccttaagaaaattaagaagaaattgcaattgccatattgctttttcttgtgggtgatatcaaccacaaatagcaaggtagttttggagtcatgaagcaaacttccccctgctaagatctgggtaaggttttagccacaagaggcctaataaagctcttgaagcatttcctaagagctcacagaagatttaaatgccctactactttcaactagacaaatccaattcattttaacaaacagttttgaagtgcctactaagtgtaatgccttgtgctaaatgtctggaagagtgagtgttaggtggagccctcaatgggtataaagaaatatgtatgtttgggagttgagggtgagggtgtgggagttgtgtgagtagggagaatgggacaagaaagaaacttcaagtgtatatccacccctgtccccaaatacactcctgaccctaaaagaaaggtcattttaatattgtaattacatatgtttcctggttttatcattacagcttaagaaaacagcaccacaagtatgggtggggtgctagaactcaatgaatccactttggaacaagaagcatgggtggaacttgaacgttgttggacaagactgaagcagatggcaaggcaaggtaccgtgttactcaggtgcattcttgtaagtatttggacagccagttaaacacaaagaagaacccaattatggcaaattgattctgcaaagagattttattttaatcatcaactgacagtcttaagttaaataccaaatagagcagacataaagattttggaaaaaagtgtgaggtagcaactccaaagcagttatcaatactttcctcaattatctagatttttagcgactatcttagtaaacacttaaatctcctttcaatgcaggagatcaatgcttccataaaattcagaaaactgagaaagttaaaaatatttgtaagaactataaattgcttgggttcactctcttccttgtatgtagtacttataaaagaactgatacagatgaatagaaaatactgattgtttcatgtttatgatgtaagaagaccatcaacttctcaacatcaagataagtaaatgccaaaatcaggtcagaaaagaacttttcagaataagggcctgcctttaaaagtctcagccaaaaccgtaacagaaaggatagtctcttagtcatgatttataaacagaaattgtacgtctgtaccaattgtagaggataaagtcaaaacagaatttacagcctcctgctaatagcctaatttaaaatgtataatcttccctacatttcccccaaagtaccttttaaaggactcactctgctatccaaacaacttgcaaatgcattcggtaagttggtctacagtatttattctctttcctgttattgactcaagatctatttctcatgatttgctttgtgctcattcttctgccagataaaatattaattgcatttttagctgcactgctggtgatcaaagaattctgatatgtcaagctaaactgacagaaatagcatccattaacatatttataggttcagagcttctagaacataattatatccattaattactcaacagtactctatattacaggctgaaaaagaaaggcatttgcaactaaatacttttactcagaatgaagtttttttttaaataataaattttctctaaggaaggttctatctaaaggaaataaggcaagagagctcacatatctatatggacacaaggcaggatttttaaggcatccatttactaactttgcaatagaatgctcacaaagtaaacgagatggcacatccagaatggtttcaaataaaataataccttaaatattacagagaaatttaattactattttagagttctaagagtgacaatctgaagctggtaattcttgatgataagattccgagcaatgatttttactttcaaataaacttctagtattacataggaccaaagcatttggaattacatacttttctgaacatgcaattctaacacataaagaaattaaagctgtccagggaaaaagctcttaagatgttggaaagtcatagaacaaacaattattctgtggatccaccagctgtgcgagtcctgaatctgccagctgcatttagtatatgtatcatagaaaggacagtaacacacacttgactccttttggccagttaatcagcatgcaaaatgacggtttcccacaataacttcagcaccggacccaaacacattctcttttcagcaaagaatgaagtcattaaaaaaaaaatcacacaagctgctttcataatttcagcacgaacacaaccgagatgtaaggacagaaagcaaagccgagtctacctgtacatatgtatctatacatatttcactgagttctttgttgcctgacaataaattgcaaaggcagtcatatttgaaagtaaaaaccattaaactgtgtttataggatactgcaacagactcgctgagggaataacaaggaaagcacgatacctttagtaagtcgcctcagaatttgacaacggcatttaaaagagacagctatcattcttgctcactgctttctgtggcaaagtgtactcaaggctctctgctctggtggctgcagcagcagcagcatatgaattccttgcgcacataccaggagaaaggtagtcccagtggggagtgacaaagcttaattcctcttggctgatgcagaggtccgctacatgtcatctggcaaatctgtgtcattcactactactaccacccctgcctgccacagcctcctcccccttcacaatcacaatggcttagaaagtaatgccgtttcgatagcaacaaagcaccaaattgtacaaagcagggacgacactgtgtgaggagccattccataaatctaacgctaagcactgaacagtgcattctgtttaaggcaaaaggcgatgtatccagtcagttcagccaccatcagcccctttccttctcagcatcaagtcagtgtcctttatatgtctcatttaatgggaaatgcaagtgaaatgcttacactcttactttaggaagaaatgcatgggtcatgtactatgttctttaaacaacaaccaaaaaaaaaaaaaaaaaaaaggaaagaaaaagagggagggccgtttatatttgggattgaggaaagaatcacagttctgcctatagcggggaagcagctctaggacagagacctctttggtacttcctgaacctatgagagttaaggcagtgtctgtttatagagggaatacaagaaagggttagggctaggcagacaatcaggcagatggagtcccagcccctttaatcacccttccaaaaaaggacttggctggaaagcaacacagtcaagactgtttctaaagataccagaaataaaggcaaacaaggccaagtatttctatttttaatatactttattatactatttcccaaacaaccatcccccaaaccattcttctcattatgcaaataaaacggtcttgcgacatagcagatatttgtgagtatctgctccaatggagtgaagagcaaattaacaaacccttcacaatccattcacaaagtgataagaaggcggagcacacctcctcatctgccagcagcagcctgctcgccatatagtcaatacgaactaacatttggtagggaattttaatcaaaatccagaattctcccacaggagttaacataaacattcaggacaaaaaattagacagttggccaggaagtttaagaaaaaaaaaatcaattagtcaaaatgaaaagatatatcactgtctaaactacttgattaatatttctaggactttatgaattattcatacagttttattctctactcttcaggctgtgaaaaaactttcaagctggtttttaaaataacttccaacattccaaatttagtggtaaaactttcttttcttcattcataaattcaatatgaactcaaacaatttcaatccactgctattgaaatgcatatgctttgtattttgagtccaatagaaaaataatttgtgtgtgaaaaacatctgaatatcataagcatctactttaaaggtttttgaaaagaacagaattcttttaccaaggatggtctagctaaagcaaccactaatcaatagaaaatactatattaaatggactgcagtgcaaaatcaaatttttataattgttctgattagcataaatctttctttgaatttcaacccatattatgttcatctctattaggttatccctagaaatagtttagcctccttgatatttttttgctttaaatagaaatataccttagtactagagaactgagttactagctaaagtgagataaatacttacagttagctctttccaagattcttctccaaatctaacatatttcctaaaatccaggcactcagaatacgcagctgtcaattactattagtagaatcttgcctgtggaacaccaccaccccagcccagtctattcaaatacaactcaaaaccatacaggaatctcttgccttctgctattttgcagactcaaatccaatttgctttttccttatgactaaaatgatcaaatattttccccttttcctaatatgcttattttttttgttttgttttaaaagctctatcctctggtcccaagaaaggtcttcagaactactaaaatgtcctatttctttggcaggggaaataacccatcatggagctctttgaaaggtttctgagagcccaaactaggggattgttttttctctctttgaatactgtggctgccaatccatatctatcctattagtctgcccaggtgcagccccaggaatcttacagaaatggagcctcctggagtaattcttttccagaaaatgaacgaattcaccaggtattcccatcttcttccatttctggcctcgctaatgcttggagatttcctggggagccactcccaggtcaaccttcttgccctaaaccctttgtcctccctttgcctaatgcaagcttagcctcccatcctgaactctagcactggtaaaatgccttccaacaatgcaagccttctatctcaaaatgtatcgatctgtaggatgaaggtctcaaatggccaaggcaaccggtggaatgtggaccacaggctcctaacatgagctactacaaggcagagtgacctacatttcttggctaccagatcaatgtaagcatgtgtctttgggacctgtcatgaacatgttaattatggtggctcagctgtctagacagttcaaactttacaacatgctctgtgagggtcaccaagtaggggttatggaaaaagaaggcaggtaaaattgtacaaaatacagatttgattaagccccaatgtgatctgaagaagagtgagtgagctagttcaagaggtttacccctcttaaaaacacaaacacctcaatacatgaaaacatgggtttgctggattcagggcagactagtcccttaagatgataattcttatttcagggtttctttaaaacattagttttgctaaggtgtaatacaagtgtaccacgtttacatagaatttaatgaattagaaggcactttcacacataatgtatcatggagcgactctgttataggtttttgatgcagaaaaggaaaactggtttcagagaaggtgtttttcatcaaagtcattcagctagtaagtggtaaagaacaggaaagaaccatagcttctcacccctggctaatcattctttctcctcttgtttttcactgcttccttgccaccaatacaaaatgtgatctagtttacagggggacaaattcaattaacaaagtacctttaagtgcagttatcttttgacagagggaaaaactagtgcctatcaccttctcccctctgaagcacagctcatggttctaggaccaccctgaccagaaggaaccagaaacaggtgacagttaaggcaagtaccgtctggtgaaagaccattacgtatcaagtgtttacaggaatcccttctcactgcatggttagcccatcctgactggcctgtgtcatgctggttttgaaatatttggaatatcacctccattgacaatatggtactaattttatcataagaagggggtgggttgtggtgtatggacaaacaaaaccttaagattggctcaaagattccaatatagtctcaaaaccaaagcattccacagcttcatcagcaggtggcacacatagccccataatcttattctaattttctcatttccttgattctccgccattgtattcattcttttatataacatctccatcccaaaaataaatagcgctgtttggaggttcttctgattcttaacaagaaagaatcatcataaaccaaaaatgttctgccatatgcctaaacctggaaattcattttgcaaaaaaccaaaacaatgaggttaatcccacaaatactcaactattttatatcattagaatcaatttgattaaagtgctaaaataatttgcactttcttcaacttcataaatctttctgttacaaaatatacctgatagatcccatttatttgcttattcatttaactattacatttcttttcctttgcatgctgttgcttaaaaatgcttaacatgcttagctcactatttaaacagcatggaacatcctgacttggctagtattgaatatactgatccccacaccccctaccctgcaacacatacacagttattaaatgttgtgtatttcccaaatcttccgggtattttaaaactcagtgttctcggaggtcttaaaatgcgactctcacccactttttcatctccttacagacaacgtcactgactcattcttagcttattataatcggccatttttacttcccttttcaaagatgccaaaagcaaccatgagctcaaacatgttataattcttgtgaccactgtctgctacttagttcaactagtgtgtcaacatgagaccaaacattagggtcagacaagggagatgtacactgaacagaactcgccagtaatgagctgtcatgaaggactattaaaaaagcaagacccaatttgctgacacaggttctaagggtgtgaaaagttggtgtaattgcccaagacagaatttatcaggcattttttaaagcaaatattttatgagaaaacatttttatagaagtaatgatgccctttaggaagtgtcattaggacatactcttgcaaatctggggtgattaaaaagcacttagtagctcagggcctctggtgtgttgtgatataaaagggtgggtataatgcacacttcatgtgtcatttgcttatctaggcagggctctgatgcccgtaacagtgccaaggaaagaaggttgcctccactgaacatgaagagaccaggaaagctcctgtgaaggtaacaaccttagaaattcatcagctaaaagcatctggtggaaaatgttaaagatagaatatgtagaaattgagaaatgcttgtacaagaggaaaaatctaccagaaatcatcctcctaagagcctaggtatgtccaactgtttatggaggtattatgtaggagagaatggtgtaatggccaaaaacacagcttggaatcaaattgcctgactttgactcttggcttttgccactaaatggctgcgtgaccttgggcaagtttcttaacctttctgttcttcatttgcaaaacggtaaaaatcatttctaggcttgtttgaatggtaaactgagtttatctgtgtaacgtgcctagaacagagagcagtaacagcttttattagccactttgtatttggtaggaaatacaattgtacaatttgacacttgcttacagaacccagactcttccttaaattagctccatgtgattagtatggattggtttggtcagagaaatcataagcaggtggaattgggattaacaagtaaaacgcacccttttccacaacattttctgtcattacaatggcacgaagtaatttcccttctttgactcctgcaacctcttcctgttctcatgcctcttctttctctacccttaaatgtcggaattcccccaagctctgtcacagcatgttggtcaccttcttcagcattttatcctctcctagggctccagcaatgacttctttgctttgactctcaaatctcaactgtcagcccaaatttgctccctcatttaaaactcccttcccctggcgggggacggtggctcatacctgtaatgccagcactttgggaggccgaggtgggcagatcacttgaggtcaggagttcaagaccagtctggccaacatggtgaaaccctgtgtctactaaaaacacaaaaattagccaggcgtggtggtgcacacctgtaatcccagctactcaggaggctgaggcaggagaatcacttgaacccaagaggcggaggttgcagtgagcagagatcccaccagtgcactctagcctggatgacagagcaagactctgtcgaaatgaaatgaaatgaaatggaacaaaacgaaacgaaacgaaacaaaactaccttctctcatccttgagtccaacatctgtgggcagccttcatgaccatctccaactagatttgaactgtatcaagctccatttccttcccagtaggacacacgttcctcttccatgagctcactacatcatcaccctctttcttaagctcacctttaaaatacctcttaatatactcccacctgactgccagcatcctagtccagaccttcacagttactgtgcacaggagttttctcctacagacctttactgattaccttgttctaggcactgaggttctgggccccacacatgggttcttcctcctaactcatcccagaatcattgaccaacacttgcttttatttgtatgaatgtctgagtagttctttgggggcagggggaagtattacttttcaaattttgtagggctagtcaaattttgttctttttttttaagggctaaattaataagtactttaatataaataatctcatggatttaggatatcatacagctgagttatgtcagatactttgaccaacaatttgcagataaaagcacattatttgaataataaagaaaagtggaaacccaatagggagaggttctatatttatccaaattaaaaagattaattttcaatacatagactaaagctgtcttaaaagaatgttcattttccacactcccaggatatagcggtggtgggcttatgcgctactaggaaggaaagaaacacagctacttcaaaaatccaaccccaaccataaggagcagtgatgtgcgcacagcagctaggttagatcaagggaagaaattagatttctaaaacaggttggatgaagtagtttattgacagtactccctccatacccagcttatcaccctttcttgttttattttattcctatgtcactaatcaccatctaacacgctacctatttggattatttttctgtttattgtctgctgctccctgcccatggctttttttaaaactgagggcaggattttttggtctattttgttcattgtttagaacagtacctagcacatagcgccaatgttcaataaacttttgtcgaataaataaatgtgaaaggatttcccttctagtggatttcttttatatgcaatactgtttgtaaaactcttatggaaaagaggacgctcataaattactttaaaaaaacaacaatagctctgccactttaagagaaaattcttccaaataacatgattcttgaatgttaactgtttgcagaggagaaaaaggaaaaggcatgtgttttgtgcccacctttccagagcacacctcagattcattcctggtgcttctgacaagatcataaggaccctgttgttcaccaaatatgaagaaacatacagcccagctagttgttcactgaagtcagaggcagcaagagcaacaaagaaaaaggcaaagtaaagatgctaaaattaaaaatttgtcttggtctgtgtatgaaggaaataccaaatacacattcatcctgatagtagattctggtctaacatgcataattatagcctgtcaaggacataatgtatctctaaagtaattcatgcgtctgtttttggaagctctagtaatacattgctaaaaactctgtaattccatcttcaatagggctttgtactacaacaacctccaaactaacctgcttgctgttccagctgctattttgatgactttctttttgtggcataggaaggagctaagttttccatattaagaatgcatatattaaaaacaaactaactacaagaccttcttgctgttccagctgctattttgatgactttctttttgtggcataggaaggagttaagttttccatattaagaatgcatatattaaaaacaaactacaaagccaggccagtggctcacacctgtaatctcagcactttgggaggctgaggcaggaggatcacttgagcccaggagtttgaaaccaacatgggcaatatagtgagaccttgtctctaccaaaatattttaaaactcagcaggctcatgtgatggcacacacctgtggtcccagctactcaggaggcagaggtgggaggattgcttgagcccaggaggttgagctgtagtgaaccatgattgtgccactgcactccagcctgggtgagacagcaagaccctatctcaacaaaacaaaacaaaacaaacagacaaaaacaaaaacaaaaaccactacaataaagcctcctcaattctaagacacgttactccttcaaataaaactgtactgacaatattttaaggtatcctatcgagtatatattaacataattatcttttctgatacaatgaagtggaaatactctgtcaccccttcaagcaatgtgtactatgagtcaccaaaacacatgcaattaggtgacaaatactaacacctagaatattttaatcaaatatcactaactgtaataatggtggaaagtaaggaaaaggaaaattaaacatgggcaataggatggtagagttgaaagatgtctaaggagtcagaagcctcaggttaaaattctaatgtagttacatattggctgtttcatcttgggtaaaagtgactgagcacaccccctatgccagccaccatgatgggccctggatgtaaaaaggtgaaaaaaaaaatacaattcctttgctggaaaagtatattcacagggaaagttctaactcacaatactaaacatgtagttctaaattttaacttaaaagctacagaacccatttataccaaaggtcagttaatccacatgaattgctcatgcttaaacagcatcaagggctccttcctcttcagggaataacaccttaattttctcttgcggacccactctcggtccatgtggtgtgcatggagctggcactcccctacgtctacccctccaggtatgggtatcaaggctgactaagtggaacatacaatcccttagtcacggggactggtccagaaataggcagtcacacaagccatgctaatgagatgtaatcccagaacttttgttagaactgctgcaaagaagatagtctgcattccactgggaatggcaggctatgtacttggagttgctatcttatcaccacatgggaaaagctgactttgaatcataccaagacagaggaaaatagagtcgagggatggagagtgacatattcctggagatgccattggaacatccggattcatccatttctaaatccctaatacaccggacttagttacttcggtcagtatggtctccattttgctaatttagttggagttggatttctgtcacttgggatcaaagagtcttgtctaatactcttttttaagctttagattcttgatctgcaaaataaggcagttgtgtctctaaaattccttacagttctaccattctgttacagtactgaatttaccaatttcactgggctgctgtgatgatcaaattagataataaataagaaagcactttgtcaattttcaagtgctttacaaagagtacgactggctatgaaaataatattcaaatatatgtgtatttgtgtgtacactgaaaaattaggaggctccagagtccattccatttgtaatatagttatataagaagcatagactcagaaaacaacaaagaaaaaggtctcactcttgtgcttctctcttaggaaattcacattttaccaaatctcaaaggtttctgctcataatatcttgtcttcctaagttcattaccaaaacccagaagggtccttttctttcacttaaaaaaacagtgcctattattttccactttatttccataaaaatgacattaaagtgctccttggggatgttttgcaaacactttcaatcaccaatcactgactctgaaaaaaaaaaaaaaggaaaggcattttattttccttcaaaggaggaaacaaccctctaataatgtctaaaggggaaaagggctctataaaaatgggcgccgtgaaaaaccatggaaaagataaaagaagtcagggttgaaggacattcttcactgggtctcttcctctcatcaggcaccttcttaacatccaggtgcacaagccccctgcagtctagcaagtacaccttccctttcaggtctgcacagctgcacagtcaggcaagcagctactagagggcagcaaaggatcagaaatgggagtgcagggctcaggcaggctggctgggaactgaccagacgaccaaattgaggccagatacttgaagacaacctcggtccagtttcccatcaaaagacaggaaggatcatgggatccctctaagttcttagatgagtataacaaagcttgtgttgacagtaatccaaaaatttagcacagtatctggtgacagtaacagaggccgagttgtcaagaaacgaggggcacatgggaaagccaagggggagccgaagtccaggaaaagcaggcggaaggtcaggggaacctgggttctggtcagaattctgggaaccaatcaagtcaatcattgtcattgtcatcatgatcatcatcaacatggctagcactcacttacttctctgtgtgctagccatggcttaagtctatatatacatttcaaaaggcatatgcaggagaaacatttttacctagctttactgaggtgtatttggcataaaataaaaattgtatatattcaaggtatacaacatgatgatttaatatatatatacactgttaaatgaccacaatcaattaacatattcatcaccactcagcattgatgtgggtgtgacgggggtcatgagggtacttaagatctactctcttaccaaatttcaagtaaacaatacagtattattaactatagtcaccatgctgtacattagatctccagaacttattctttttgtaattgaaagttcgtaccctttgatcaacatctccccatttcccccactcccagacctctggcagccaccattttactcttttatgaattggacattttaatgtattgtaattttaaaattatttatttttatttatttatttatttatttttgagacagggcctcgctttcttgcccaggctagagtgcagggatgtgatcatggcttgctgtagcttcagcctccagggctcagacaattctcctgcctcagcctcctgagtagctgggaccacaggcaaatgccatcacacatggctaatttcttctattttctgtagagaagggctgtccctacattgcccaggctggtcttgaactcctgggctcaagcaatcctcctgccttggtctcctgaagtgctaggattacaggcgtgaaccaccacatccagccaaatttgacttttttagattccacatataagtgagatcatataatattggtctttctgtgtctggcttatttcacttaacataatatcctccaggctcatctatattgtagtaaatggcaggatttccttcttttcattgctcaataatattacacacacacacacacacacacacaccacatacaccatattttctttatttactcatttcttgatggacacttaggttgtttccacatattggctactgtgcaattaacacggagggtacaggtgtcttttcaagatgccgatttcatttcttttggatatatacccgcaagtgggattactggattgtttagtactatttttaattttttagaccaagcacgatggctcatgtctataaccccaagaatctgggacgtcaagtcaggagaaccagctgagctcaggagtttatgaccagcctaagcaacatagcgagaccttgtctctaataaaaattaaaaaaaaattttttcaaaaaattttttttaatttttattagagacaagttctcgctatgttgcttagaaaaattaaccaggcattgtggtgtgtgcctgtagtcccaggtatccgggaggctaaggcaggaggattgcttgagctcaggagtttgaagctgcagtgagctatgatcctgccactgcagtccagcctgggcaatagagcaagacccagtgtcaaaaacaaaacaacaaaacaaaaaaacctccatactgttttccataatggttgcactaatttacatttccaacaacagtgtaaataggttcccttttctccatgctagccagctatgctatttgctcaacccaagaaatacaagaattagtcaagggtaattttcattttatgagatttttgtttcatgctttaacttcagaactaacctccaccactcaactccagtgcaaccactactaaattcaatgacttctaaaccaaaccttatttgtcacttctcatagtcaaggtttttctttaaggaatgtgccttcagtcatttgtatctgtggtcctggtggaaggcaaaagcacaaactattagaaacattgggtttgttcaagtgctgtgatttgtgcttaggctgaataagaaaaactatcaaatgaatacactagaggtttcttccataaagcaaagggaaaagtctaaatatttcattaaaaatacaacagggaggaatttactttcaagtttttacaaggaattaaaaaatacatatacttttccaaagttagatccatcaacttttacctttcttgttatatagatctctgaatggttcttaatggttgcctacgttatcaagcctggaattcgacaatgctcccaccatgcccttgtccactcattcttccgaaagtttggttctaagtcccagtggtgaatgaaagtgtcctctttacaagcatcttttattctaaagctacctttcttttgcctttatatctaatactttatttttagaaatgacattaaaattagtccctaggaagagagtccttccatagattctctctcttaacttgtttgcgtagggaaatgcaggcgcttaattgatcaaaagggactcacagaaggatgaactattttgcagaagcatgctaatggaaatgcaccaaccgctaagacccactgctcacaggaagcatcataaaactggtgagctgatggaagtgcaaagctgtaaagtaacagccaaatttatctttttttaaaaaataaaaggtatcttccaagtagaaaattagagaaccatttgatataattcactgcatttgacagctttggagtagatttataccctgcttttttcctcccaccttcagttttccattatcaatctctcagcagggtttggatttcagcattggcaccaatagacagaactggaaacaagtgcattctgcaaatcactgcatgctcccatgtcataatctcaattctcattcctcagatacagattctaggttgcagctgcagattaaagtcaattctctaaaattacaactgtaatttctcacttatttcaggagttccaattgtgtaaccctgtaggaagtttcactcatatgaggaagttcaaatgaaacagaaatttgagtggagaattaagctgtcccttccttttttggcactgcgtctacatggcatcttacaactctttgattgctgtgatgacaggcagggccaaactagtcaggagacaaaagacaaggccatctatcaccattatttggaaatttcatctagcaaaggatttatgatctgttcattttggaggagatttaaaaaaaaacaaagattgaataaagtatgtctggtgatacatgaaaatgagatgatgagatggattttacagaagacctggggctgactgcatttggtcagaagtgccacattgtcatggcagagaggaggggatttgtctaggaccactgagcaccacagctgagagttctttgaaaaacaaccagtacccagagtatcccagaggcagtcaggacagcacagtgataagagtgtgggctctgggaccagactgcctgggtttgaatctaggaaatgagctacgacaagttactaaatattcctgtgcctcagtttctctagctactcataggattattacagaattatttcgtaagtcatgacttgtgctgaggagtcctgacctagaacagtacctaacatataacaaatgctggaaaccactgtaacctaacttcatagggtgttgagaatgttacaggagttatgaataaagtgtttaggatagtgcttgatacataaaaagtgctagggtgttagtcattattactatgaatgttgttataatagtaaccaataattagtagtaccagagttccttaacatagtatgtcccaagagagccaggtcatgagcttatgaatgacagggtgatgtctaaactcaggttatcaaactggcagctccagggccacacgtgacctgtaagtacgctcgttttgcctgagctatgtttagaaatgttttaaattatttgcacacttcagaaatgtctatagtttatttaaagttatgggtttgtggattctctttaaaaatcaagagctcatttcacattgggcctgcattcccgcatgcaactctcagttggggctggacaatggtggcctctttggatatttggggcatacattctccaggtcaccccagtccccactagggttccttcattcactgttatctgcctggcccttgtaggcacctgagtttgctgtccttctcccttgaatctattttaggccttccggggtgatatgctctcagacagaatttttttaaacacattctgggcccatctgagaatatgattttactggagctctccccggtaaaatgtacacaaatttatatgctcacatgacaactgcaagtggaccacggactccctaaagcccattcatgaaaaaatttcctgttttatgggtctattcatggacaagaaaattccattaatcctcattcttcattagatcactattgtatcaaggcgaatcccatgattttaaaaatagaaattatacagatacataaaatgaaggactatgctcaggaagagtaaatcctttgaactgatgataaatttagtggttgatttgattgcactcaaatttggcatctttataacaaaacaccacaccaacttgctatctaatttcacctcctaaacacttctcaattctgctacctcttctccagatttcttagcactctcagggccactgccagcccagacggtactattatgagcatcagaaacagcatctcttcctcaagacattttactgccatctgctggggaaaatgtgtcatactaactacatagattcatcacatctaagatgagaatgccacatactagacaggggtccttgaggagtgcacacctgcagaacagtttccagcatgatttgagttgtgagcatccctgacatgggctaagcatttctacttgaggccattatccagaggaggcagcagagagtggccattatgagctttgtagttttgagtttttaaaaaacttttttattttgaattacttttagacttaatgaaaagctgcaaaaaaatgtggaaacagagagtttccacatatcctttacctcttccccaaggagatttcatcctataataataaaaacaagggtttgaatcatgattctgataggatcttggcagatgggcacagtgccagctcacagtaaatgctcagtacgtattattatatgttgttatcatctgctagcatcactttccttaactataaatgaagataataaaaatatctagtgtgaggattatgttacattattagtaaagtatttagcatagtgcgtgataaacagtaatactattattgatattgctggtgatattaacttattatttctgaggtctaatattcttccccaacccacagtcacctagtacactgacatcctggttttctaagtataaaattataagtcattactattcctgagatgcttccatatcccagggaatagatgctggtaaccagttcccggattaccacagtagacatcccaaagatcaggaaatacccagagcctaagggcagagctagttgcaggctgagggtatggctaagtgagatctccttttgtgtcttatctgaggtccaacatctctctgaagcactaaagtcttactgataactgttgttgttataatttcataaaacaaaggcaaatctttttaaaataaggaagaaagctttttattcccacttccaaatcatctgtctctaaccaagtcataaagaccatcaggctgccagtgcagtacgatgtgttagatgttcaacaggagttcctagaacaggctctacctcctctgggtggagaagtggggctgaccatgtgtgaggaggagccttgctcatagggggaagacacttttctcaaagcactcctcaactgctgacccagcatgcaatctaacctgttttttttttttttatggcatctgtttacacaaattctgaccaggtggcaaattcttcccctctcctgtcagccacagtatgctggacagagaacacctgttccagaagtggactgattagcccaaggttgggatacacagcacgagctatgggccacacgagaggaggagatcctgtgacttgtcggtggttggctccactcctcctcttggccctagtccatgtctaccactaatgggattgatccatgggcataaatctgaaagcccttgctaggcaggtaggaggttatcttatccaaaactgctacagtgttgttgctagctgaaagcaaatgtttcaagcactggggagggaactagaggtacaaaattgaggttgataatcttcgtttttaaggagcttcttggggagggcattggtgaaggtgatagaatggaataaaaatatcacttaatgaatatcttttctgcaatgtcatttacatatgcagggtatctttaaacaagtaacaataattcagtggaatatcagctttattgatactatcagtaggatgtgtggatgcaaaagggagaaaacaaattagtgagaagaatggataaatgaggcagtaggaaaggttcacagaggaggtgggactggaggtggattgtgaaggataactaagagtctgtccatggtggagcaggcaaatattccaggagaagaaagaactggtagcatggggcaaatgggaatgaagcttgaaagaaaacggaaaaactaaatgaagaggggaagagagaatcaaatcacaatataggcataaaatggaataagctaatgattagcaaaattactattatctcaaaaccccattttttttttaaaggacaactcataacacttaccagctgtgccactctttagggtactttcacatctcaagaatggtcctttgacccagtagacatacagaaacacaagtcaacctattcatttctctcaatctacagaaaactctagctctgcaagctccttgtcatttgaagaatttgattcctgatgagtaagttgctagcctaaagaaaaataccaatctaaacattattaaggacagtgtaacaaagaagacattctacaaattctttattcctgatagtcataaagaggctacaaagagaatgagttagagaaaggtggaacatactcagcatgaaaaagaaattttaaaaagaattatggttaggccaggcgtggtggctctcgtctgtaatcccagcactttgggaggccgaggcgggcggatcacaaggtcaggagatcgagaccattctggccaacacagaccccgtctctactaaaaaaaacaaaaaacaaaaaacaaacaaacaaacaattagctgggcatggtggcgggcacctgtagtcccagctacttgggaggctgaggcaggagaatggcgtgaacccgggaggcagagcttgcagtaagctgagatcgcaccactgcactccagcctgggtgacagagcaagactctgtctcaaaaaaaaaaaaaaaaaaaaaaaaaaaagaattactgttatagattttgtgatccaagagggatgttaggcagcctgcacctaatagaatttggtagatgcaaaaaaagttgcttgttgaataaatgactgaatgttctacttcagtggtttataaactgtgcttcccagaggtggttctgggttctgtaaagcacaaagtaacttctgtacaacagtgaagtttcaaactactctgaagacaagtgtgatcccagtgcctgacatatagcaggtgctttataaacatttggtagtgaatgaatgaaggaacaagcaaatgtattaatggatagaggaatggaatagtttgaactttaacaaccatgaacaaaaggactaaaatctaaagggaaaaaagaccaattttccttctctcctgacctatctcaaactccatccttgctgtaacttatttccttttgcatcaagggaaatataaaaatgacaatgacctttccctcacatcagagagaggtggaaagaataaatatgttaatatgtgcaaagcttccagacttccttagagagagccactacaggtattaatttaattattatgagcttcttgcagaaacacagctgttacacctttaaacaaaccatttttgataatatttcagttatcttcaaacagaaggcagaatgggctagataaccatagggaaatggccgacaacacaaatgcacctggccctcagctccagactcacttggggctcaatttggggcagtcacacatttgagactactttttaagatacttttggttttgtggtgaagggctgagaagcgtgctaactggctgcactgagctgagtcaggcacagggatgaaactgatgcctctttctctgtccatagacagctccaaatctgaactaaattccaggagagaaggtgtaaggaagtgaaaagcaacagattcgaaagtatttttagtgggttactctctttgtaggaagttctggccttattcaaactatgtttctcatgtctatatattagacaaatggctctaatcagcaaatgcaaatcaagaccccctcaacaaagcgaagtgcaacaagaataaaagcttattgatcctcttgttatcgatctggaccatatatctagatttctctgtattctacaactagaaaaaatcttcagtatgcagtattaaatacagaaaagaattacggttacagtatttgtgatcctatatttgtagaaagcaatatgctttctacaatatttacaacaatcagagattaggagcttgaaaaagaatggagcacattgctaaatgagacttgtgccaccagatatggaggttcatgagatttgtctcaaaattcttctcttcaatcaatatgtatctagacttgaacatgcactgaaaagaattaacatgtcaaaaatgtaaccaggagtgaacaaagtaactaagatcacaattaattgtacttaatttagaaagaaagtgttttttacctgtcaactatggggaaacatcactttttagtatcaggacgccttgtgtttttaaaaaatatttgttgaagagtaaaagctgtacctgtgccttattttcatttgcacacaggatgtaaacacttgaaagttccaccatgaacccacattctacacacgcaaggcagaacttcacaaatgcttcccaggacagctctttttcaactatttcctatttgtcagtttggccaccaacccgcaagtctcctaggctagaaatctcggcagagttattttctcttttcttgccttcctccttccctgtttcttgtttgttcggtgaagataataatagtctggccccccacctcctttgttggctctagggtggtcctcccaccccatcccctccagaggttaatatgaatctacctatcgtatctagctgctctggaagcccagtaggtggaagcaccactcaagtcctctaccaatgttaccataacaaacttggttatttctttctttgactttttaaagcacagtttctggagtaagaaaaactgttcctactgtatgattgtgggcaaactcatattttcataagtggggaaaacagcagcctctacccttgcagcgttgttgggaggcttaagtgaagttctcagtcatgcagcaggctcagtaaatgccagctgttgctaccattactatcatctcctgtctattctcttctcacatcatccagccctcatccacacccacttcacactaggttaccacatgtgtcccacaagcagatactcatgactaaacaccatctttcccttggagtactggatactggatacacaaacacaaggaacagcctttactcttaaggagggtaagtctagtgtcccagacagacatatatagataattaaaagcaaaaatgcagtaagttagtacctggtggggcttctgtggttcaataactaacatttcttctttcttatcaaaggtcagaaacaacagagagtgatatggcttggctgtgtccccacctgaatctcatcttgaattgtagctcccataattcccatgtgttgtgggagggacctagtgggagataattgaattatgggtgcggtttccctcatactgttctcatggtagtgaataagtctcatgagatctgatggttttataaggggtttccccttttactcttccatttgctcttgactgccaccatgtaagacatgactttgctcctcattcgccttccaccatgattgtgaagtctcctcagctgtgtggaactgtgagttcattaagcctctttcagtcttgggaatgtctttattatcagtgtgagaagagactaatacagagaggtatataatggaatcaggcagatggcaagcaaaatatctcctttgttactaataaagctgatattgaagaaagtggcttagtatgagagttcaaagggctgaatggcacatccttactcacagggacttaagctgctaatgtcactagcagtgctgaacaaccacatccacctgcatgaggcccgccctgtagaatgaagggcgggaaggagtcaaggagtaccagctcccaaagagaagagagagggaggaactgagcatcacaaaggaacacattagatacctgagtccacctcctgggaggggcaagtcagggactagcatcatgcagcaaggcagggagagcttctcttcttctgcccaatcattagagattcagagtattgtagtagcagcagaagtgagtatacaacccagattgtggtgggggctgggggaaaccagagaaggaactcctgggggagtctcaaaggataaacaaacgttaggaaaataaagttagagaaaaggggaaagatgttccaggcagagggaaaagcatcagtgaaggaatggatctgaggcatggtgtgatgtatgctggagcaacaggtgctttgacatttctggggttttactaaaagttcagcctgggagtggcaaagcatgaggctggggaggtaggcaggaaagggatgggctgcggagcacatagagtggcatgttagagagtgggctttatcacaggtgatgggaaccagtgccagtggcagcttttttttttttttttaaattaagatttggggtttcaccacattgcccaggctggagtgcagtggctagtcacaggcatcatcacagctcactgcagcctcaaactccttggcttaagtgatcctcccgcctcaggctcctgagtagctaggatgacaggtgcatgccactgtgcctaactcagtgaaagcttttacccagagactgtgttttagacacactgctctggtggctgctaaggataggctgggggggagaatatcaagttagcttggaggatattctagtactgctagcaagagatgacaggggcctgaaccaggatgctggtatcagggagcaacaagacaggagggatttgagaaatattttggaggtatgactgacagaacttaggaaatgctttattgctgtctgaggctttctggctccatgatgtcctctttccaacccattctgaatcccccacgggctgcctaaggtcctgctatgggtcagccactatgctatgtgcttgacctacatgttcatcctcagactaacctcatgagacaggctaacctcattaataactcctgtctggcagaggaggaaacaggtttggaaaagggaaatctaagaagacctagtgaatagaagattgggttggaattcatatctaggtagtctgactccaaaacccgtgcaactaataaacacaaaccctcccttttctacacacatccattatggtcctactcctctactactttcccctatcacttgaattccaaagtgttcttctgggactcctctgcctcaccttaccccttcctcctcttcatagctgcctcttagccattgcttactctgatgcttttcctttgagtagctccaagctgcacgagtactttagctcaactactttagtagaattactttaataacacaaaaatacatttattttgtcaataggaaatatatgtacaaggtacaagacataaataatgtaactggaaatacagtaaaaaaaagtaaatcctctccaagatcctttctccagaggcaactactgttatcagtttatgaaatacatctggaaagatgtacaagaaacataccagaataaataactgcaagctctttaggctgcccatagaaaggcttctccaacttctaccttcaccacttttttcctcctctggattcctcctattatccacagtgcagtgccccagaattcagcacacaattaacctcaagttgtttcataaatataagccatgtctccttaacagcaatggctcttacatactaatctgagcattagacacacagtaagtgttcaataaatacctgctgatcaattaagcttccttgagttaaccctacacttgcttaaatggcgtatttcatgcaaacctttagctgaacccattcaaacagcctttacaatgattacttttgcagtagctatatacttaattggtcctcactctctttttagaactctaactgtacaagcagttgaaagagtgattttttaatggatgctgatgttatagtgaatacagtcattcagaagtctaacacattcaagtatcacagagctggtcatgcaacacaaattccaatgccactcagaattctggtcataaacgatgagaaaaagggagtaaaaatccctcctgtattacccgaagaacagtattatttctgccattttaatctgtttacactaggctatatactctgttgggctaatctttaaatattggccttattatattcatgatattccattaaaaggcaagcaccagatgcatttaatttactcttcaggggtatgattctcagataatctgtcagagaaggaccaaatgcttctttcactgtgatgcaatgatatttctatctaatagtgctctagaattatatttcctccccaaatttgggatctcttatgctaaattctctgcttttgttctcttgacagttttcagtcagtttaaatacctagagttctgctttcaaggtaatagttttttgatttttatttttaatgacagcaaaagttctatgaaagagttcatgtatatggcttgctctgtgtattttacaagcccaaagaaaattacatttcagagaaggtacatatccaattactaggaaatgagttacaacaaagtggccacagaagcagtgtaataaagacaacctcaattaaaaagtctccctaacaaagcaaaaaagagacacaatgcaatgcacattaatagcttactcaacacctaaacacagagtgggtgacaaaaaaggaaacgtctctctggtacaagttaatgaatcattctacttaacaagaggaggtctagaaaggggtaagggtcttttctgcaatcaatagaaaggagcagttagaattcaagagagaaaacaatacagtaatcttgggaaatattattttagacaatacttgttaattttaaatagttttaaagaaacaccatgagataaaagaagttaaagcaagcatatgtattgtgccatatacaccgtactgatgacagactgagctcctaccttcacgggacctttggaagatggacatgtaagtcactgcagtgttgggacttccaggatagagtctgcaacattgcttgaagcacagagaggagatctaatagccgggagaaaaggagtagagcagatgagggttctaggcatcagcaaagatatggtgccttgacagggactggcccacctggagtgtgaatgtgatctactaaggcttaagtttgcttgcagtgtatgtgtgtatgtctgtgtgtgcatgcacgcacatgtgcacatgcagcagggagagtggaattaaggtgaaagagtagtggatttctaagaccttgccaaagaatctgaacttcatcccaaaagtcatgaacttcagaaagattttaagccagagaagaggcatgataatatctatattaaaaagacaatcaggtagcaagtgtggaggatgcatgggagagggcaaagggagaggagggaagatccgctaggaggtggaggcaatcattcctgctgtaggtgatgaggaactgaaaaggagcagggctcatgatgggtggaaagaaagtagagatccaaggaatatgaatgacagaggatcaacagggcaactgacactgatgggtgtcaggagaggaagaaagaagagtccaggatgatgcccaaacttgatgctttggtgactggtgaagggtggaacactcattcacagaacaagagataagcaaggagaagcagccaaaacaacaccacagatatgtaaaattaagagtatcaactttaaacaagagccatgggttgggtgacattatgcctactagacattaagatatattacaaatccatagtaatgaaaaccatgtgtgtggggtggggagagggaaatgaggagttagtattgatgattgcacaccactgtgactgtaacagatgtcactaaattatacacttaaaaatggttcaaatggtaaaaataagaaaaagggaaggaaaaaaacacaagtgacaaaggtatgagaaggtacccatgtgtcaataaaaaagaatagatagacctaaagcagatcccagaataaaaagaatatagtagatgacaataaaaggatatatttatatcaaagatatagatggtgaaattgactaactactccaaaatatcaatttacatacatcacacaaacatcaaaataaactttagtttgataagcataacatgtaaaccaaaagaacataaaatatctagaaaaacatttaggtgaacatatcatcttttgatgaggaaacattttcaaagtattaaagcaatagaagaaattattaaaaaacagatttttataattaaaaaagctaatgttaaaaattcaaatgtaatcagaattgtaaagaattttatataaataagaaaaatgttaatattattctataaagaacacatgtggatcagtaaaaagatcactaacaagcaaatggaaaaaatggacaaaagatgtgaagaaacagtgggggtaaagaatcaacacaaataacaaataaacacatgaaaaactctttagtatcacaagtaatcacagaattgtgaaacagaacactgagatgtggttttcatctattaagtgttcccaagcactctgcagaatgtgtacccctacaggtggcaggaaagaggttaacagagtatcactttcccagagagcttaagaaccttaaaaaatgtttcttttctctcacccattaattacattggaatgatttatcctaaagaaacacagccaagatttttctatatcatttttcttcttgcttaaaaataaaagcacttgttgatcccttcctcccattattcctctagataattcctccatttcattcaagtctcagcctgtctctgaaccttgattgcactgccatctctcttgtacactgccatagcatcctgaagtcctcttcatgcatcttattatgcttgttctgacaatagtttgtctttctcttgtctagatgtcttatctaggcagtaagctccatgaaggtcttctgctctattacaatatacccatcaattaacagagcccttactacaaagtacttgttgaatgaagggatgcattaatgattagtaagaagtagggctgaaatcatttttacttttcttttttccctaagattccatgacaattttatgggacttttctattaagaataacagcaatggaagccattcaaaacagcatcctttcatacagttcacccactgaactaaaagtcaatactctaaactgtgaaatagttactatgtaggtaaaactaataaaactatccatttaatgctacaaagagaataaaatacctaggaatacatctaacaagggatatgaggagcctcttcaaaaagaactacaaaccactgcccaaggaaataagagaggacacaaacaaatggaaaaatgttccattctcatggacaggaagaatcaatatcgtgaaaatggccatactgcccaaagcaattcatagattcaatgctattcccatcaaactaccactgacattcttcacagaattagaaaaaactattttaaatttcatatgaaatcaaagaagaccctgtatagccaagacaatcctaagcaaaaagaacaaagctggaggcatcatgctacctgatttcaaactatactacaaggctacagtaaccaaaacagcatggtactggtaccaaaacagacatatagaccaatggaacagaacagatacttcagaaataacaccacacatctacaatcatctgatcttctacaaatctgataaaaacaagcaaaagggaaaggatctcctattcagtaaatggtgttaggaaaactggctagccatatgcggaaaactgaaactggaccccttcctcacaccttatataaaaattaactcaaggtggataaaagacttaaatgtaaaaccaaaaccatgaaaaccctagaagaaaacctaggcaataccaatcacgacacaggcataggcaaagacttcatgacaaaaacaccaaaagcaactgcaacaaaagccaaaattggcaagtgggatctaattaaaccaaagagcttctgcacagcaaaagaaactagcatcagagtgaacaagcaacctacagaatgggagaaaattcttgcaatctacccatctgacaaaggtctaatatctagaatttacaaggaacttaaacgtatttacaagaaaaagacaaccccatcaaaaagtgggcaaaggatatgaacagacacttgtcaaaagaagacatttacatggccaagaaacataaaaatgctcaacatcactgatcatcagagaaaggcaaatcaaaactgcaataagataccaagtcaggaaacaatagatgctggtgaggctgtggagaaatagaaaggcttttacactgttggtgggaatgtaaattagttcaaccattgtggaagacagtatggcgattcctcaaggatctagaatcagaaataccatttgacccagcaataccattactgggtatatacccaaaggaatataaatcattctaccataaagacacatgcacacgtatgcttattgcagcactatttacaataccaaagacatggaaccaacccacatgctgatcaatgatagactggataaagaaaatgtagtatatatacaccacgcaatactatgcagccataaaaaggaaggagatcatgccttttgcagggacagggatgaagccggaagccatcatcctcagcaaactaacacaataacagaaaaccaaacaccacatgctctcactcaaaagtaggagttgaatgttgagaacacatggacacagagaggggaagaacatacaccaggacctattggtgggtggtggctgaggggagggaacttggaggatgggtcaataggtgcagcaaaccaccatggcacacagatacctatgtaacaaacctgcacgttctgcccatgtatccctttttttttttaagaagaaataaaggaataaaaagaaaataattactaccacttaagtttgaacaaacaaaaatctatttaagatttttaaaaaatgttctttagtagggaaaaaataaaaacaaactcagccacctttcaacttgcaaactggctccccatgcataaagctgtccatgttatgttcacccttctactctgtaaccttctactctgtccccaaagtccacatgctcttagagacttccaaaattagaagcttcaagtcttctaagctgtagctgtttctctgagagcttcccataattggcccttagatagtgagatctaaggaattatttattattactgctgatttacacacttattttgacaggttaaaacataccatgtaagtaagcaacatgaataaaacgttgcttacattcagtctctaatgtacgatttaaaattacaaacacaatccttcttctctgagtagcagtgacagaccttgtgatttaactgtctgcgccaatcactgactaaaaaaaaaaaaaaaaaaaaaaaagatgtggaaaacctgtgctgggctatttagagacgcttaatgtccttggtctctcctagcacttcaagtaacacttctttttaaaagaggtaagattttttgcaagtgggggaaaagatggtagcaaccccctccctccacatccttcctgcatattcctcttttacaaagttggatgttggtgaaagtcttcataattcaaccattcctagaattattttcaatgccctgtaatgctgcgtactgaaaacccatcttttgctagaacaaggtcccatcagttttaaaatgttacatgttactgttttcctgaataataaaaaagaaattactagtgtcattaaacgtacatttgaaatgagacactatctggatgttaaaaaatataagaaaggcaggactattctaattatgcatagtactgaatgttagtcaaaggtccatcttgcgtgggagaggttattaacaattgtttaaaagaaatagaagaaatatgcatttccataatagtgtctattctaataatgctgttaatagtctaaaaggacatcttttcagaattccctgttaatatcttttgaatattctcagtgaactggtccataaaatctcagtgctctccaacataactggaatgtctcctgggacacatggatttcacagcatatgcacacagtagggagaatggaatgaggttgctcataatgcttttttacatcaataattgataaacagaattagacacagctccccaaggaatcaggtgtagcaaattacaggtaataaaaacttaaagaaaaaaaaatcctaacccctgtctaaaattttatttgtttaaactcgagctacctaatgaagagtgtctttaaggctgttaattcaaggtgatggtaaagtttaccatactagaattatattttgttagttcacttttaagttctgttaggatattttcatttgtatcttattttcttagttcgggcctaggtagaaaattaaaacagtatgtcaggtagaaaaagagaatatagatgaatatgtttatgcaaccagactaattttgtggtcatctatgatgaaaatacatgaaattaggttatatttatgtttaaattatatgtatatacttaaaaattatatgcatatactttttttattatactttaagttctggggtacatgtgcagaatgtgcagttttgttacataggtatacatgtgccatggtggtttgctgcacccatcaacccatcacttacattttaaaatccacaaactgaagtttatatttactttttctttgaatgccctcaagtaaatttagttgtggttgactccctctactggcaaaaaatgatattttttgaaaaaaaaatttttgtcaagaagttgacacgaaagaaacataatttgtaagctatcagatatattctctctgataaatattaccatgtgacatgatttttacaaccagaggaaattaatataaaagaaaagacagtagaccatcatgaattagaaaaaaaatgaaaaataagataaaagctcccacagcatttactatacagcaaataaaaagaaatactcaaaataaggcattttgaaacaaatttcagtgcttatccaagtagtcgttcagcttattcaaggacacataactttttaaatgaatgaaaaacaacatcttaggatgtggtctgagatctgtgagaagaaaaatgtttttgctcagtgtgtttttatcagtaacttcaaagaaaacttcaaaagcactcttatgaaaagggaacactcatgtactgttgggttaacagactcagaattcaaaaatgatctcaacagagtggcatatggattgactaaagagaatcccttatccatgggttccaaaccaaaaactcaaagttgtttttcatccttttcgtggcaaaacctgatctgagctggcaagaggttgtgaagtctgtatttgtcctacttagtgtgaatattttttctgtttcactgcattcatgttaacagtttgatgacagggagttgttcctagggttgggcgggggtagcctatgtatgtaacatacagtgaacactggggaaagggtactgtgttacctttcaaaggctgatagtacaagacaacacatgtgccttaaggatttctgataagagattgtgaacatataaaaacatgaaactaaaaaaagtaaatgtcagtactcacctaagtctaacaatttagcagcacaagtgcaggagcaaaagactcagatgaacagaatatttaataaaaggggatccgtttataggaagtttataggaagctgctattttttgaacacctactatttacccagacctttgctatttaggtattttgtagaatatcccttaactgggatttgtctgatatttttctcatgattagactggaattatatgttattaggaaggaaactaaggaaacgccattctcatcacatcacatcaaggatgcatactataaacctgacctttcactgcggtgatcacctggctgaggcaatggttgccaggttgctctgcagtgaagttcctctttttttctgctttcatactatattcattggaaaggagctactatgagtaacccacacataagaagtgaggatttatgttctacctctccagagtgtttttaaaagtagaagagggctgaattacatcttgaaagaagagaaatggctcaataaaataaacaaaatgcactctgccctttgggagattatgaactacttttggtaactcttaaaataataaatagtctctttaaaaaagtaagtggagcttcattgtctaaaccattctcaactgagaagtactctatggttatcctttttatgggaaacaagcaggtcagccattgtgcttctttcacatcttgaaaatgtcttattcttgaggtaagttaatatttatttgctaaaatatttgaatctggtatttaccaactcgattgatttgcttcaaatctttgtattaactttctcacatccattaacaaaatgcaggaaaccaatgcactttccttgagaatttactgttgctataacccctgagttaatgaccttaaatacaaagaagaaattcaactcccccgcccatcatgcactttgcaagacctttatgattacaaagaatcttaacataaataatgcaagatcgataacacagtaagccaaattgcatttaaaatattcatgcaattctttaaaaaaatacaaccacatattgctattcaggctaaggcctcttagggggaagagatacaatatatgaatgagtttgaatatctctgaaatgctcttatagaggaatcttccacaggcttctgcctttctggatcacttcacatagtatatgatagtagtacaaagcatagtgtttctaaaaatactagataatatggtatgtttggctcggatatggtagatttgtcttcaggcaatctgttgtgacttcatagagagtatcttttccttcattcttcatatatggtgatgtaatttaccagagcaatatagaaatagcttttggtattgatttagagctcagatgcataacctgatttagagcttgcttgctcagattcttgctattagaaaagtcttttcaaaatgtttggttaaaaaatctacttaataacaaaataatgagactatgggattttaataaagggtatccctaaaagcatccatttaaaaaggaaaaacaaacttcttaaaaatgaattcgtaattgatgcatgtcagttgtcattagtaaatacatgtctctgggaaatataattttgtaaatttataccaaaaattaaatacttttttaaaatttatgagcataattaaatcatcaagaaagttttctgaacatgatcaattttatctcaccatagatcacaaaaggttttgacatcaagaaagttaaattttgcctaagccatgacatatatcaataaagcaaaatttactgtgctcttagatattaaaaagcctaaaatatgacaggtataacatatatttatactcagctttgggattttttcttggtagaataattgagtgcacaaagatccaatccttggtaaatttatgtgtcttataaaggaaataactgtaaatccaagagcatgagtgcacaaataatggataaactaaaaatctacctaccaacaatattctttagggactcaaaattggcctgtctgggtctgccacaattagatctccatgagaaagtaggattaataatactgctaagaacactcaaacaattacttgccaagctgcgtgaacactatgggtcatagatcctaaatgagtaaatcaaatctagatcatttagttggtacgaaaagaatctcaaatgatttaggactttcatcattaaaaagtatatattcatgcaaaactaccacatgtgaaaaataaactgaatttagctatccaagaactatagtttactttttatgtagtgacaagttgtagaaaagtgacatttttaagaaacatgggtgctatcaaatcttaaaatataatacaatcatatacgtttcttaacattcaatgaaatgcattgtttccaagaagtttgaattctgatcacaatttatacttccagattttaagttaagcttggtatttaccaactggaaaatattttatattagtaaatcattatacaaaagtatggtacttttggtcaaaggtaatggatataatttatgcataaaaactaatattctcaagactcataagaattgggaaaatggaaaaacccttattttcagcatgaaacaagttaggatgtatatataggaatgttaaatgacttgtggagccaggtagtatgttcacatggctcaggttttctgcttcctctgaaatatctttcaattttgagcttcattttcagggaattgaagatgttagtgcatctttgtatagattttagtgaatctcacacacacacacatctatattaaatttcataatttttggcataaacattaaatgaagtcaaacataagcaaacggagaatatgcagatgaaatgcagtgagcaataatagtgtttgtggctggaactttatagaattgaggtcaaattataggctcatcctttgccactacgtgacctggggtgaatcactttcttcctaaatcacagcttctttatctgtaaaatatttgtcttataaactgttaggattaaatgagacaataacatttggaaagggcttggcccaaggctcagcacttattttgaattcctagtacttatcactatgtagaataatgagttttgcttgcgtgtcttcacttctaggcggtgaactcattgagggcaggggctacatctttttcatctctatattcctaggactatatcagccaatgattaagtctagaacaaatggtgtctaaagcatgatgagtgaacatgacatactcaaaaaattgaaactttcattaccacttctcttatccttgttataaacttttgagccagaaaaggtagaaaacagaccagcagactatttttcttccactaaaataacctaatatccttccatcaaaaatgtcatttattaatttttgtctttatgacagtcaaccttctactttctcaaagtagaagactggggagacagtaaacttgtttactcagagccaaagcagaaggtacttaagaaatagagcatctcttatgattcaaatgtctagccagtgattttcttcctcaacatttgtttattgatcacctattatgtgccaggtagtgtgtaaggtattaagaatagtgataagtacaacaatctctactcaaggaatttaaaatttaagaatgactgcactcagctagactaagctctgcctgagagtccccagggtgcttgtcaaaaatgcagcttcttggggtccccctcagaacagtagaagcagaatctgcagcagtagagaccaaaagtcaagatatttatctcttgaaccccccattcttggtgccgctgctcatgctgtgcagcttatctgaaatatcctccactgtccatcacccaccagacgcatcctttgttactcgactccagtgctacctcttcaaggaaactaccaaccattccttctctctcatagagttaattccttctttctcagactgtttactttatacctgtttttgttgatcagaaacttatcatgttgttatacatctgcttcccttactggcctagcagctctgtcaacagaaactaggtccttttcacctcagtatctaatacctagcacatagcctgtatgcagtggatggtcagcaaacatttactaaattataaatggaaacattttaaaagctccttgatagacaaagttgggaatttctttagagataggcaagggtaaaaaaattcatttaaattcaccctattgctcactctgtgacctaacacagtcaaattccccacactgaaggattgttttaacaagacatatcaattcattattattttaaaatttcttaccagatgtcttactttgtaatttctaagtccacaacttggtattctaaaccgatgtgaaacgttatctctgttttactttttaaatccacccatgatttcagtttggtctgatttaaacctactgaggactttttttagaaaatgaaactacaattcacgacttaaggagttggtatatttaggatatatttgaagtaaaaattttctatttacattttttatttcattgaaaatgatgatttaacttttgaaacactctaagcacaaaagactataagagttaatggaaatgcagaaaagatcagtgaaaaatataaactggcataatgatcaatgtcgttgccagatatgtcttttaagtctttcactttctattctgctactataaaagtttgtgccagaatctatttaaaataaatacattgcataatctcaatttgtttgtaattatactaaatagcctctttaaggagaccagcacaaaatgtttactccctttatagtttttggatatcaaaacataactattaaataatcatggcattttcatgcacaatttacaatgaacattaccttcttcagtatgctacaagaaaattatgtgtcattgtcttatttgatgagtacttattatgatgacctcttcaaaagcattattcattctgtacatttggtgaattctgttcaaatattccaggtagtcaagccagaaaatggggagtcagccttgattcatcctatctatccaatccatccatccaatccacccccctaccaactcacccatctatccattcaatccacccatccatccatccatccatccatccatccatccatccaatccaatccaatccaatccaatccaatccatttatacatccatccaacccatcagtcaaatcaaggttctataaattgtactccataacactctcttacaactcccttctccttcctatgcccacttccactgctctagtgtaggctttcatgtctgctttgtctcttccttcttcatcgacggccagggatccttctaacttctcagctgaaaaatcttcaactattttctactgccaagggcataaacatttaaactcttcagcaaggtgtacagggtctttcatgacctgcctcccaggttaactttatatttggccctgcccccttggacagtacttgctatactacttgtgctttctggagcctgtctcatggtcctgctctccccagacagtgctcatgctgccctgtccctacaaccctgtgaggagaagttcctcacttattggatgaacaaattcctattttagccaccagatctgaacttaaggataattctgccacagcaatgaattgtagcttgatgtgtgtgtgtgtgtgtgtgagagagagagagagagagagagagagagagagagagagagagagaactgtctcccctctagattaaacactgtgggcaggagcatttcttttcatctttgttgcccctgtaccaaaaggagagcctggcataaggaagatggccagtaaataccagctgaataaatcagtggttgtccacttcacctacacctaagactggtcttgctcagacctgttccagaaacaataaaaacattaaaatatgtagtaattgggaatataggcagagttataagcagcttaattaaaatacagtgggagctttgataaagacattttagatttagaagtttaagaagggaagaaatggtgactatttgaaaccatttaagagggttttccctcagaggaacattcatcaggccagctagtctctaggtacccctttgaccgaaagaagcatcgctcacccagcatgaatatttcactcacctatctatgattcttctcattgatgatgctttggagatttatttatacccatttctgctaaggaagatttgctgttggtgatatatttaggataacaggtattctcttatgaaaaatgaagtatccttcattttctgaggtcaattccccttaaaaaaattataataccccctcctaactttcctctgtaaggaagatcaaacgtgataaagtgtaactactttgagaagcattaaaaaaagatttattatttttattcccaacatatgtgaacacatttaatttgcattttttccttagtcaagtttaactgatttgagcaagtagaatttttaattagcaggaaagagattcaattgttttgatgattggtttcctcacctgaccatttattagaggctcctggggacagacaaatgtccaggccccactgcagcccagggaaatcaagacctccaggagagaagccctggggatttctgtgttaaaatttccccaagggtccatgataattagctaggttgaaaactgttactttaggtttctttttttttttaattttaataaattttgaaaaaaaaatttttaaattttattattattatactttaagttttagggtacatgtgcacacatgcaggtttcttatcctttaaggatttccttaaagtggaggcatgggttaagaatacagacatttgggccccaatagactgaattaagatctagatggttaacatccccctcccactcaccatgactctgtagtgacaggcacaaccaggtgtgtcaccacaggtgggaggcacttaggagtggcagaaaagggaagaaaatcgaggtggcaggtgggaggcttaaattccatgttttgaaacactttaattttttgacaccctcatcaactccatggtccccaactcttaagacaggaaactcaggcttgttctgagtactctagttcagctatttaagtggtctccactcttcatccttctcataaccaaacacagcccaggcaagaaatcaataaaattgctgagaacctgattactatttatataactctgcttttataacagaatatgttctgagtgccaaaaaccctaggcaggagtgatctttagaaacaaaacttattcttagatggaaaactctctcttctgttaccctagaaagaaaagtccaataagttatagaacatacatatttataacagcctgttcttatcacagaagaacaacaacttatggcagaaaattatttttcttgaattttgtagacagagggcagtatgtacatgccaactgtataagtaaaagcctatatgccaattttaaagaaaatgcttgctttatgacatctttgtgtaatggcccttttaaatctcaaaatattgtttagtcatttataatgggcttgaatttttgctcactgtaaaaaaaaaaaaagtcaccacatggcccaggaaggtgtttatttctttggcttagaaaatgtacgcatctgatgtcaccatagctttgcaaagggtgtatacacagatgcaatgacaagcatcgtgccagaaaactcagtggttaaaaatgataactaatcttgtcatgctctgtcattatgtaaatccaagaaatgtattgccaaagtgatttctattagtgccgttgaaaagagaattaaaaatgtaatcttcagcatatcattgtaagattgactctctctgtctgcttaggccttaaaatggtgatgcatattgaacagtcattgtgttggtcttttctttaactataaatgagattgcacttcaattcaatgtacccaattgataaacaaaattaaattagtgatgtttaaaaaaattgatttaaatcttactggtgttctagaggaagtctctcatttctgtgttttggttaatgcagctattcttggactacaagataacaaaatcagtagttctcctctgtaggaaacaatggggagatggcacatcttgtttcctgggtgtgccaggaaagatgtgttcctggacataggaacaatgatcaaatcagtgctgtgcagggtcatcacaacacagtttccatggagatctatctccggcattatactttggagattgcccttcaatttccttcaaatcccctaactagtctccaactgtagactcttcccactacatccacacaatggctggtcactcctccccggctgcaatgatgtcattcattaatgctcaggaattcctgccaccactaatgtcctgctgactctaagtcaccactggatacataagttgagggagcttctgctgcagtgattgccaaggtttgctccacttgttgagcctaaaaacctcctctaactccctcattttacaggcagaaaaagagagagccagtctggttaatattcagggtaatgtttctaacaatttcaaaaataataataactggaaataaaattaaaattattctaagctagttttataaaagaaagaaatccaagctgtagttctcagaacataggtatttccatgatcaattaagtttgagaagcagttggataaccaaaggtaagcagatttccttcttgcagaaatgttctctacatgttctttgtaggctgggtgcggtggctcatgcctgtaatcccagcactttgggaggctgaggtgggtggatcatctgaggtcaggagtttgagaccagcctaaccaacatagtgaaaccccatctctactaaaaatacaaaaaattagccaggcatggtggcaggcacctgtaatcccagctactctggaggctgaggcaggagaatcgcttgaagatgggaggtggaggttccactgagtcaagattatgccattgcactccagcctgggcaaaaagagtgaaactccatctcaaaaaataaaataaaataaatataaataaatattctttgtaaacttataggaagagttgtggtacatataaatgtttcctacatatttttgttcttttctcatagagcacctttgagatctagacacctgcagaacaaaagtgactatatcacctattgcccaactaagaaattttttagaataaaaggaagtatcttaatacttattactgggaaacaggcagaagctgggactgtcctggatggggtgtatggttaccatatagaggcaaaaaacaatacgaaacaaaacattttgaaagctaaagataatagaagagcagtcatagttctgtttctcaacttgaaggctacaatatacaagagtgaggggtactattctattttgctctagaagataataataataacgggaaaaaattcccatggaggaagaattttgcacaatgtgaaaagaactttttagcaagtacatttgtctgaaaagggaatgggttccattgaggagatgagagatcttccatccctcctcagggatagatgttaaccagtgagtgatggtttataagctaggagtaaatgacttctaagagccaactaatttttaatgattgtatcacttgactaataggaacttattgtaaatccctgagatagtatcacatttcaatccaaataaacaagattgtttcaggggaggactcaaaagtaccttataactcatctttttccaatttaccatttgatgaaaaactgtataaaaaattcactaccaaacaaatgaaacatcattaaatttgagtaactgagcttcatacaagtgaaaaaatactgaacacttttggccatgaggccttggtctctaaggaggccattagatttatgtaaaaattaatgctctgaaaatgcacaggggcagtgatgcaagaattaaacaactggaatgttcgggcttatgtacaatttatagacggacaaaggttaaagagtggaggaaaccttggggtcattctaattaagttggtacattttctcaacggacacaggcctacagatataaagtattctgcccaatatcacacaatgagtttggagcaggtattaatctgaataggacatgtagagaaagttaaaattattttgcctattctcacatactaaaatagcatctataaacaaattaagattaatttcagacattataaatgctgacttatctaattttatcaaaataggtagatacaggcataccttggagatattgcggatttggctctagatccctacttattgcaaattttggaataaatcaagtctcaagaattttggggtttcccagtgcatatagaagttatgcttacactacactgtagtctattaagtgtgcaataacattatatctaaaaagcaatgtacataccctaattaaaaaatatttcattgctaaacaaaaaatgctaaccatcatctgagccttcagcaagttataatctttttgctgatatagggtcttgccttgatgttaataattagggtggtgactgctgaaggttgggatggttgtggcaatttcttaaaataagacagtaataaagttggctgcgtcaattgattcttcctttcaggaaaggtttctctgtagcatgcaatgatagtattttacccacagtagaacttctttcaaaattgtagtcaatcctctcaaaccttgccactgcccataaagtttaagtaacattatatatctttcattgtcatttcaacaatgttcacagcattttcactaggagtagattccatctcaagaaaccactttctttgttcatccataagaagcaactcattatctgttcaagttttatcatgagattgcagcaattaggtcatatctttaggcttcccttctgattctaattctcttgttatttccaccatatctgcaattatctcctctactgaactcttgaacccctcaaagtcatttatgagggtaaaaatcaacttcttccaaattcctgttaatgttgatattttgaccacctcatatgaatcacaaatgttctgactgccatctagaatggtgattcctttccaaaaggttttcaatttactttgcccagatccatcagaggaatcactattgatggcagctataaccttacaaaatatatttcttaaataataagatctgaaagtcaaaattactccctgatccatgggctacagaatggatgttgtgttagcaggcatgaaaacaacattcatctccttgtatatttccaatcagagctcttgcatcacggtacattgtcaatgaacagtaatattttgaaaggaatctttttttctgagcagatctcgacaatgatcttaaaatattcagagtagatttagcatttagtaggaagagtagatttagcataattctttcttttttttaattgagacagagtctcactctgtcagtgctggagtgcagtggcagtatctcagctcactgcaacctccacctcccaggttcaagcaattctcatgcctcagcctcctgagtatctgggattacaggcacgtgccaccacacctggctaatttttgtatttttagtagagaaagcgttttatcatgttggccaggctggtcttgaactcctgaactcaggtgatccttccacctcagccttccaaagtgctggaatttagcataattcttaaggaccctatgattttttggaatggtaagtaagcattggcttcaacttaaaatcacaagtgcattagcccttaacaagagaatcaacccaatctgtaaaactctgaagccagtcattgacttctctctagctaggaaagtcccaaatgtcttcttcttctgatataaggctgcttaatctacaatgaaaatatgttgtttatactggcccctttcatcaattatatgagctagatcttctagttaacttgcagcttccacatcagcacttgctgcttcaccttgtacttttatgttatggagacagctcctttccttaaatctcatgaaccaacctcttctagcttcaaactttccttctgcagctttcttacctctctcagctttcacagaatggaagagggttagggcattgctctggattaggctttgatttaagggaatgttgcggctggtttgttctctccaaaccattaaaactttctccgtattgcagtaaggttgttttgccttcttataattagtgtgttcattggtgtagcacttttaatttctttcaaggagttttcctttgcattcacaacttggttaactatttggcgaaagagacctagctttcagcctatcttggcttacaacatgccttcctcaataagcttaatcattttcagtttttgatttaaagtgagagacatgtaaaccctgcattcagttgaacacttagaggtcattgcaggattattaattgacctaatttcaatattgttgtgtctcagggaataggaaggtcccaggagagggagacagacagggaaacaattggccagtggcataatcagaacacacacaacattgattaggtttgctgtcttctatgggtgcaggtcatggtgccccaaaacaattaaaatagtaagatcaaagatcactaaccacagatcaccataacagatataataataaagtgtaaaatattgtgagaattgccaaaatgtgacagagagacacgaagtgaacacatgctgttggaaaaatggtgttgatagattagctcaaccatcaattaataaaaaacacattttctgtgaagcacatagggaggccaataaaatgagggatgcctgtatgtagcttctggaataaatctctaatcctggaaaagacaatcaaaatacagataatacataattaattaatctttttagctttagtgtcctttgttaatgaatttcctattttacagatgagaaggtaaatgatatgaagataatacactaaaatggtaaaactagaattctatccccagtcacgttacttgaaagtacagtagtatttctattatgcttgcctgtctcctataactttattttgctaaagttatttttgatatttcataatattgaagccctttcatcaaatcaataaagcaaaacaaaacagaaaactctacatcagtggatccatttgtcctcaggcctttattcaccctatactgatccatcagagcaactggctgaatgcccagcctttgggcagcattcaccaaatattttttggaaaaaaaaaaaagaacaaatgaaagaaaaaaatcagttgcatttatacacatgggaatcttccacctagggtttttcatcttcttttctttctttctttctttctttctctctctctctctcttccttccttccttccttccttccttccttccttccttccttcctttctttctttctttctttcttttttttttttttttttttttttttgagacagagtctcactctgttgcccaggctggagtgcagtggtgcgatagcagctcattgcaacctccacctcctgggttcaagcaattctcctgcctcagcctcccgagtagctgggactacaggcgtgcgccaccatgcccaactaatctttgtatttttagtagagatggggtttcactatgttggccaggttggtctcaaactcctgacctcaggtgatccacccaccttggcctcccagagtgctaggatcacaggcatgagccaccacgcctggcctcattttctttttggcttgagaatgcaaacaaggagttctgcacccacacatggcttcaccatggagctttctgagacactgtaaagcaacaccatagcaaggtatctacatgtaaaacagtatgagatgcttcatgccaagaaaaagcaggacaaatacagaattaaaaattgtctgagggagcttccatacaaagaattcaagcataactaccagatttggggatcattttgtgaacacacgcctgatgaacagagcatggtgtttcaatgaaacaggtatttctttgattaggtcagtggtagagggaaagatgagttaggaaataatacccgaataaaacacagaaatggtgtttgtagaaatgacaggttaggaaagcatcatgcccttgtgccataacatcttgacatgactccagtccaaaataatagtttaagagttgaattagtacccaattacatttaggagactctgggaattcacgcttgagtaatgagagaagatagtttgtatgtaggtctgctaagttggaaatagctttttggaaagcctgttctggtatcccagagtgagaagttcctggcatatctgaacagggctggcagtcatttctttacacatatcagcatgcttttcagcaaactacctctgagatactttcatgagacaggagcagatggggtgccactgacaccaaaaggggcagaccactagtgtgacttcttggttaaagccagggcagaagggttcagcggtgctgagctgcactgagcatcatgctgcatgttttggctaactgaggcacaggaaatttcactgtatcacggttccttatttcatcaaatacatcatagaagcatacaacatttcagtgaaaagtcagtcagcttcagctgtgtttaccctaaaaactgacctcctcttgcttcagtgagggggctttgcttatgtgatgtccaaaatagactccagagacagtgctaacaatagttcatcttatggccttcatctgatgaccatgcagtattctgtaccatacgacccctcctttagaaattactccatgtttctgtgtccttttgtcttgggcacataaataaagcaactcccactcacagttgaccacatcaccatttgctgctcagtgaaaaaacccagggagttcagagaacctttgtctgcagaagtggaagggacaatctgcctgagggctaacccgatgtcagacatgctagctcgatgagcaggcttgtctatatctgactgcaggtgacttctctcagcctgcccacgggatctttctccacttggacacccaaatgaaaagcccatccattgaagattctttttaaaacaagagagccttttaaaaatacattaaaaaatagaagtaggccaggcacgatggctcatgcctgtaatcccagcgcttttggaggccaaggcaggtgggttacttaagctcaggagttcaagactagcctgggcaacataatgaaaccccagctttacaacaaattaaaaacaaaaacaaaaacagctggacatggtggtgcattcctgcagtcctagctactaagggggctgaggtaagaggatcacttgggcccagggaggtcaaggttgcagtgagtcatgatcacgccactgcactccagtctgggcaacagagtaagagcctgtctcaaaaaaacacaaaaatcgaaaacaaacaaaaataaaagtaatacatgaacattatataatgtaatgataaacactaacaaaattttaagaatacatcatctagagctaatgttgatattaactttacagttttttgttgttttatatataaatttacatattttagaccatatgtatacatatacataaaataagtaggtatatatactgcttttacaaaatgagatttttttctcacttggtatattatgaatatcttttaaaatcattaaatcacgtgtgtgtgtatgtacatgtgaaaattcacagaatcaaatattagagctagaaatgatgtaagcgatcatctgttccagcgtttctcaaacttttgactacacttaaactaaaaaataaattttacattgcactccagtacacacatttatattaatcatacacactcaaacacacacagtttcatataacaatacttactcttaccatgtaagaaatactttaatttccattttactttgatttctttaatgttggtaaagctcttctgcaaattcataactcactactgagttgtgatcccagtttttgaaaaacaaattcaataaaccccttcttttaaaaggaaaacatgctcagagacattaagtgatttcccaagatcacaaagtgaataaatagcattgtcaaaaccagaaacagatctacttgttttcagcccatgccatctctatctcctagcctcactgaatcactaattattggtagagaggtgtgcacatgtgtcagtgtgtgtttgtggtggtaatggcaccccaaaatatatagcatccccaaatataaagaaaaatgctcaacattttccatgagaaaaataaattaatgtaatagctgttttatgatccatgagttaattttctcacaccacactgctttacaatattgtaaggcagcaggtccagcaatttcttcaaatgaataaagatcaaactattaaagacacaagtcactagtttgaataactttgtattacaaaactgtagaatatgtaaaattatcactctatgagttggataaatatattgaatttatgaccttcaattgctttccttatctataaaatggaaatgactgccctagacgcctgaaagaatatagggcataactccaacaacaacaacaaaacaaaacaaacacaacaacaacaacaaaaaacaaacaactttaattcttgtttcgcccattccagtattttcagattgtgatctgggggcatgaacaatacctttttaaaaggttaagcacctatttataattgatctgacctctatcaaccaatgaagcagcctgtcatgcagttgtaatattttatgtccacagaggccccaaagtatattgcaatcatatacggaaactacactctgttgagcagggtatttttagcacagttctcaaagcatcgctgagctggaagaatttgaggcagtaaagttagccactatcttcattctgcccattaagtaagatcggctggatcctaaaatgaagtgacacccattatcagaggcaaagcaaatttcctcaagagaccaatgtgcccttcaggatattagctgctggccttcgcatttagaattagttaaacaaatgcagtatgtagttcagttaactgaccaaatcatttatattgtagtagtacaaaatacaaaatctctccttctaaatacgataaaaataaacatttctctaacacacagctcaaatttctcaaacaacatatactccatctggagtttaaagtcacgattagaagattctatgtgtatcacatgtgtgtgcacatgtgtgtatggttttaaaaagaaagcatatatttactcataatggtatggtagaactaagtactgcttcaaatttttcagtttcctgtaataggataacagctctgtacccataccatgtaacttcacaatgcctcgcagtggaataggtgggggcaaatatccctgccttgttgactttggccagtggattctggcataagtgacagaaagacagttctgaggtgaggtcttaaaaggcatcacatgcttctgctcagtcctcttgctcttgggccagcagccagtggaggaatatgaactgggtagctgctggttgcagaaagagagacccatggagcagagtgaaacccaacctgcatctgaagcaaagctgccccagtcatcccacagacccagagatgagaaaaacaaatggaggctgttgtaagtgctgagattttggggttgtctgttatgctgcattaatggaacaaacctaactgacacaaaagggaaaaatgcagaattagaatatttttattttactttttttcaatgccactgaaaattcttcattctttaaacacatagccttttgaaagaaggtagaaaaagactagaaatgccatggaaattaaggatggtagacctatgaggatctattaacataagatacactgtaggagctaaaatagatgaaatgggcatagaaatatgcatataagttcagaggagctgctgctattccagccttctgttggaaaaattctacattgagaaaggttttaatttgcccaagagcatgggcaagaaataatttcaatatttttacagtgctatccttgatgatgttcatcttgacctaagtccttgaattcaaaaatgttaattaaagtttgtaagtgttgatagaattttataaaaaagaccagatgctagaaagacaaaaaccccacaacagacacattgccaaagataaaagatccaccttgagggctttcatgttacaaaaatgaaatggagaaagataattcagattttaatgtagctcatattctacaatctatacaaatttccttatgttactttttaggattaggtttggctataagtgacagattatccaaattaatggtggcttaaacacagtaggatttcttgtctcttataaaatatgagtccagatctcaaaatttagaggcaataaatgcagggctgcaacggctcatcacaatgccacaggcccaggatctttcaatgttgttgctccacaattctcagcacacagtcacccctgctgccaaactctaagatggcctcctgacatccagccatcacacccgtattcagggggcagaatagaggaaacaataaagaagaacacgccctttctctggaagggcacttcccagacatctcatgtgatattttagtttatgcctttattggccagaacttaggttcacaggtacttttaaaccattatactcagaaaagaaactgagaattattttatcaaagaaggaatgaatggatacagggcaccagtagcctctgccacaattcttactatgttgagagtgtaacctataggcaagcagtaagcctataggttatagtctcacagcctgctctaagtcattgtggtacaccaagacaagaactttacagaaacagaaaaatagcatttcattttgagatctaaacaaaacactaacaacactaacccacagaatcgcagcatacataaaactaaggtgatgtctataaatccctcactccccttcctcccttcctttctttattggtattggttaaaatagaaagtctagtaatcactaaaatgatcccaaacatccaatcactcaaataaaaaaggagctgtgggttaactaggttaaggatacattcttcagacaaaatacgttaattttttttttttttttaaagagatgggttctcactatgtttcccaggctagacttaaactcctagactcaagtgatcttcccaccttggcctccagggtagctgggactatagatgtgcaccactgagcctaactaaaacatgctagtcttgactgctagcattaaaggcctaaatttgatggaaaaggcacatattatctgttactttctggtatttaattttaggtttttggctagtattaagaaaaaccatactgacattaatatatgcagttttattccaaataaaatatgtgacttatttgtaatgaaaatataaaggcaaatagtgagcataataaatacatatgtgccaggcaccatgttatgcacttaacattacatatttcacttaactcctttttcaaaagtaaatctagaaggaaggactattatatcttccaatttacagaatagagacttgaatgggtaagtaatttgttcatggtcgcatgctactcaatgatggaaggtaaaaccaggatacatatttttttttgagacggagtcttgctctgttgcccaggctggagtgcagtggtgcgatctcggcttacttcaagctctgcctcctgggttcatgccattctcctgcctcagcctccccagtagctgggacctcaggtgcccgccaccacgcccagctaattttttgtattttttagtagagacggggtttccccgtgttagccagcatggtctcgatctcctgacctcgtaatccacccacctcggcctcccaaagtgctgggattacaagagtgagccaccgcacccagccccagaatacatacttaagcctctctgactataagactcaagcttaatcactgctttactatagcatatatcttaaggaaaattgtatgcatcatagcgataactagaaaattacatatttgtctttatttttataattcttccttgtcttatcttctatttaagtgaatattcagaaaactctgtctccaatgcttcgcaaaaccagcatacagcagactgactcatatataatagccacttgatagctgtaaaatgactgaactatgaaattattacacctattagtagttctattttaatctactttccaataaatttatgccatactaatggtttttattttaccgtaaaatttaaaaagcacaaacatttcctagcgtcataaacagctccaccactctgaatttctactataaaatagtatctatcactaatggctagtagtggttttagaatcctgcaaattgtttcataaatagctataattgcaaatgtcttaatatttgaattgtgtgtatgtagcttacttaaaaattctaggagcaggaacaatggttgaaaaatgcatcatttattgcttaagtttatatttacaatttctgttactaaagatccatagcaatctcctgagtttacaagaattataattatctgtccaaaaaagctcaaatttcaaaaatatatgtgaaatatacatccttttcttaaaggtaagttacccacagaagatataaattgttaacctaaaatatacttgctcttaagtacaagcccaaagcctaaatggatactagtccaaaaataagataccaagagggtcatctacaaaaaaaaaaaaaaaaaaaactcatacatggtatttcccatgcccagtgtgctggggagaaggtgacggaccacagtactgaactgttatgcaggaaaagtacttaattcaaatttgaaaaaaaaatgtatattacctttctctctctctttttatgtgcctttggctgccctgtcactttaatgcctgaaactttaatggcattctatcaatagaatattctgtattcttgggaagaaaagacactaagcaagtgtggaaagcataattattaaccttaaaataaaagctgtttttatcattgttggttaaataacaaagggagactataagcctactcttctggctttggagtcatacagcccatgaagttttctagacacacacatttattcttagagagatctcattagatattttctctgcctgtggatttcattattttaaggaggattactggattgctaaagaagaaagaaataggtttcacggattcaaacaaaacagaatgaaataaaaaagaaaagaagtctttgttataagtaccattaaaagagattaaagatgaaaaccacttttggactatcattaagctggtattataacacattgggctgagaagagatattaaattgtgtcataaaatgatttttgacatttgactttttacatgtcttacatttagttttagggactgtgggatgaaggtgctataaccacataagatcactgtgcaatgttttggataagagcatttactgttaagtaagatgttatccagttgtccaatgagacctgtttataaccttttatacaatatctgccttatttaatcattgaaactataaataaacatggtgggaaaatgactacttgttacctgaaaatctatctgactgcacaaacattactagagcactacttggtgtcaaatactatggtagacaagaaaagaattaggtcataataaagaaattttaaaactatgggagatgtgcaacaatgtgaaggtgcttaatgccactgaactgtatactaaaagtggttaaaatggtaaattttatgttatgtatatttaatcacaattttaagaaatcttgagagaattcttcatggcagagtaaattaagtggactatggcaggctaacaatagaggcagggcctatttgtattgacacataaaatatgttgaggatatggcttttaaattttcaaatgtatttgtagtagattttagatttataagaaacttgtgttaattcaaaaaattgagaaatgcaatgttgatgaaattcattcttctaagttggtacccaaagccttgtatccaaatgcctctatatcaaatacaattgacccttgaataacacgggtttgaactgtgtgggtccacttatatgtagatttttttttcactaaaagttacacctgctcctcttgcctccccttccaccttctctacctcttctgtctctgcaacttctgaaacagcaagaccaatccctcttgttccttctcctactcagcctactcaacataaagatgataagcataaagacctttctaggctaggtatggtggctcacacctgtaatcccagtactttgagggggctgaagccagagtatcacttaaggacaggagttcaagaccagcctgagcaacatagtgagaccctgtttctaaaaaacagttacaaaattggctaagcatgttggtgcacacctgtagtcccagttacttgggaggcggaggtgggaggatcatttgagcctggaaagttgaggctgcagtgagctgtgattgtgttacttcactccagactgggcgacaccgtctcaaaacaaacaaacaaacaaaaaaaaaacaaaagaatgaagacctttttgatgacactcttccacttaatgaaaaggaaatacattttctcttgcttataattttcttaacactttttctctagcttactttattacaagaatatagtatataatacatataaaatatgtatcaactgactattgatgttatcagtaaggcttctggtcaacagtaggctattagcagttaagtttttagggaatcaaaagttatatgcagattttctgactatgcaagaggtcagtgcccctaatccccactttgttcaatgattatttgcaatgtaaaacactaaagtaacatgaaaaggatacttaaataacagaagatttgacaattcagaaaagtcattaaggattgtgctaggcccaaattttatcataataaagagtaattttgttatcaacaggaaaataatcgcagctttaagatgactttctatgttttttaaaaagggatgggttcttgctgtgttgcccaggttggactcaaactcctgggctcaagtgatcctcccaccttagcctcctgagaagcatccttgtagccaccatgccagaatctaattatttatatgctgaataaataagtatttactgtgggaaaataacaacgtggagagagggggttctgctgcttatacttgtttttatacattgttggttgtggtaaagactgctaattggtgaactaacatcccttttctttttttctaatatggaacactgatttttcagagtgatggcaatatactcaagccaataaactatacattttctacatgactaagtcatggctaataagatatgagtggatgtttctggatgggacttctgaggaaagtgccttaaagcagagggctgatgtagctgggatgtaactctttcctttgcccttcttcctccatggaacttggatgagatggctacagctcaggcagccatcttggggcctgaggtaacaaccacatgttaaggatgtccaagcaggaaaaatggaaggctcctgggtcccactggtgactgtagcatcactacacgtgggccaccaacctgtaaaattctcatcacagatgaaaaataatcaactaaatttttaaagccactatttttaggtctttatatctagcagctgtgtacaatatctaacccatccatcagtaaaataggaataaaatggatatgacatcccactgaagtaagacagccttcttcaaattttaaccaaaacatcctgtaggattttaacctcactgcataacacatgacagttttatttcaagggaaatcaaaggagagaggagctcctttcatgacatttcagaggtaagtgtgctaaagctgtggcactatcaccacagggcattattctaaacatggatgcttattgcttttttcaggagagaggtggttttctacgtacgctgcaactaggagaggcaaaaaggaaatgtggggcccacacagcaaaagcagcaggaatcaaagttgcttgctttgtaaatcctgagatcggaatgctacgtatgttaggctctcagaggtctagtttaataaaattcctattttaattacagcagcatccttaaagtgctatcattaaggttgtgtcagcaattacttttttacaaccttattttccagagaataataaaaatgtgtttggcactgatacctagggctgaaagctggcactcagctctccaactatgcgcttttccttgcttctgacaaattggaagagaacctgtactgtgcttccttgaaactgtgaaaattctaaatgatcagacctccaaattgctttgcctttgattgtctgaaattcaggtctatgaactgtcaggggcgatcactgctgtcatgtttcaggatgagaaatgtggtttctacagtaacaacagctcagattgattagggcttaaaaattaaaatcacccctctgaactgtactttaaagaaggaaacaagagtcaaaatacagaggtattcattttcttagtatacagatctatgatggaatgatttgtgaggaacaagatattttaagatattttaaaataaacaagatattttaaaaagggaaagaattagatcagtgtgggaagataacttcagaaacagataacttccctccatagatggacaggaataaacatttgttttgtgaatggtaggaagagtgttataaaaatgcagcaaaaaaggcagcattaggaaattcattcttaaaaagaaacatcgctagactaattgaggcttaaagaagagtggaatctcttataaaagtgattttatattaaaggctgcatattatgtcaagcctcaattatggtaataatattaagtctacgtaatataataactcaaatttattgagcatgaagtgtggacaggtcttttgataatatttttacatgtatgaactcatttaacatgaatgacaatcctgtgaggtgggtacttctatgatgtccttgcacagtttctccagtagaaactgggacaaagaaatgctcaaatgcttgtcctcacagcagtgatgggaagcaaaaagtggagtccctgttgttcttctcaataggatttataggagcgtgattgttctggattgtgtgcaaatctatggaatagtaagttttattataacagacttccatggttctatgaaaggatgagtgggttttaagatactcatagagaaagtaaaaatatgcttataatgtcgaagtaaataataagaattttctgaggcataggaaaaagactgcaagataaagagtaattctggagtaaagaaaagttataggaacaaagtcactaaaagagactgtgaagtcaataataaacacgctcactagcccagtgacagcggtggcaggggaatccaagagcataacaatctcacagtctggacataaatttctgactcacttcttactgcctggagtcattctaagacggctttatgacaaaagggaaaatctgattaaacttggtaggaagataaaaaagtttaagtggcagcaggaggggaaaaaaagaaatggaggtgacaagagaggagaaaacctgagaacaaaggtgacaggaaggggagagtaaggtgtcaggggaaagagaccatcaagaagtagtctgagaaaataggccaaataagcagggcaatcgatcataagtggcgggacttccagatgcaaaagctgccattacgaagacaaatctctccataatcccaggtcttaatcattttcagcctgactctatcccaaagacaatatgcctcagcattaaactgtatttacaggcactccctccactcccccatgactagtgggcaaagatggcccttgggatatcatgcagctgaatgagaagagggatcttgagacacatatgagatgtggcacccaggagaagaagagaaggtgaacataaacagttcacccttaaacaatgctgaggggttggggagggctgacccctgcacagtcaaaaatctgtgtatagcttttgactcccaccaaacttcactaagagcttactgttgaccagaaggctttctgataacataaacagtcaattattatatttttcttcagagacagggtcttgctctgttgcctaggctggaatacagtggcaccatcatagcacaccaatcatagctcactgtaacctccaactcctgggctccagcaatcctcttacctcaacctcccaagttgttaggattacaggtgtgcaccaccgtgcctggctaattttttttttttttttttttttttttttttttttttttttttttttaggatacagggtcttgctatgttttctaggttggtctcaaactctgcaattaacatatttttgtataagtattatatactgtattcttaaagctagaaagaaaatcataaggaagagaaaatagatttacttttcattgagtagaagtgggtcatcataagggtcttcatcctccttgtctttatgttcagtaggctgaggagcaggaggaaaagaaggggttgatgttgctatctcaggggtggcagaggtggaagaaaatctgcacactagtgaacccatgcaattcaagggtcaactatattttaaatgtttaaattgatattcatctgctactaaaagtccctgaaaaaaagttatatgaaaaatttaaaaagatatttggaaagaatttcactaggtagataaattgataccataaagatacattggaactagacaagatccactatgacattttctggaaaagtagtctgcaaattgaatatacatcagtgcttgctttgatatacagtttgcaagtcatttttttttttttttttgaaattgtgttaaaacccttacattctaacattccctgggctctgcagactgacaactattcatcagggattttcaggtacagctgcgaagcggcaaaaaatactaatgttagaagagctggccacgatcatgtgtgcatctgggtgggttgaataaattatggggctaaacaagggtcagtttccttcccttggatacaggggttactatgtcattcccctcagttgcataagatgcttgtttgcttaggttgcagttcactgtgactgactcgtttttttctttctaggttctgcaaattgtcctctgtttcacctctagtgatttccaggctaccctctatctctttctccttttttcaaatttgagatggagtctcactctgtcacctaggctggagtgcagtggcgcgatctcagctcattgcaacctccgcctcccaggttcaagaaattctgctgcctcaacctcctgagtagctggaattacaggcgtgtgccaccatacccagataatttttgtatttttaatagagaaggagcttcaccatgttggtcaggctggtcttgaactcctgacctcatgatccatctgccttggcctcccaaagtgctaggattacaggcatgagctcacctcagaaagtcatctcattactccttatctctccagcatttccagcataatttctatcttcctcttcctcgaactcagtatctctttgacaatatttttaaaagttagcaatattgccacatcacttcactgtatcttgcactcatttttttttactcttttattttgcccattctttccacaaatatttaatcattgcccaccaggtgccaggtgttatgttcgacatccaggataccacaaggaataaggcagaccgatgttatgcccacgtgaatttgaagttctaattaagaaggcagacattagacaggtgattgcctaatacagttgtgatcacgcactgaaaagagaaagggcaggctgcaaagagagcatactaatgggagctgaccagatgaaaggaatcaaggaaggattcacgtgggaaggagggcagacagaagggggttgaggggaattcacttctggtgcctgggaccccctggctggaaggcctgggggcagagagaagcacaggtgttgaaggactgggaagaagtgcagagatgggctgagagaaggcacagcaggaggagagctggcaaggcaggcagaggtaagaacatgggagcctggcaagtgatgtcatagatttctctttttcttttttttttctttttttttgagacagagtctccctctgtggcccaggctggagtgcagtggctctatctaggctcactgcaagctccgcctctcgggttcacaccattctcctgcctcagcctcccaagtagctgggaccacaggtacccgccaccacgcccgactaattttttgtatttttttagtagagacagggtttcaccatgttagccaagatggtctcgatctcctgaccttgtgatctgcctgcctcggcctcccaaagtgctaggatcacaggcatgaaccaccacgcccacccacttatttcattttttttaattgcaagaaacatatgaaaccatcagaggatttcaagcaggaaaaagaggtaaggcccattgttggttttgagagattgttcctgtgatgtgaagaagatgggtcagaaggagcaaaaggggacacagggagatgagctcaaggccccagtgatagtccaggggacagttgatgggggcttacattagcatgccagctgtgagaaggaatggaaatgggtgggcataagagagttaagtatggagaataaaggcgactcataaatgcccttgatatcctcctagtgcaatgacatgaaggtgtatatctgtttccagaatggaagctgacttttctacgttgcctctccactcatgccagaagccatcctacccaattcctcctttacatactcagggttcttctgtccttcactttgttcagaggttccccaggaactttgatccttgacttggagagccttatatatttgttcatagattaacatgattaataagtcagtacattctccagtgaccacaaacaccgggtctataatgtgctctggtcacgataaaattctgggctaaaaagtcatcaaagaagtaccttgtctactgtaactcatgccaacaggacaactaagagattagataataatcattatgattaacacctactgagtacttatgaatataccaggttttctagtttgatgatgaatgtaaacctcacagaactcttatgtcctataatttatctcaattttacagaagaaaagactgaggcttagaaggccaaagtaatttgcacaaagaatgtatggtggagccagcagtcttactctgcaactgactgacttatttgataaggtaatacacatctcacaagcagaagctttatcttctatgaaggaatctttggctccaagccccatgcaccagttaaaggcattgctgagatatcccacagtctcagtgatagccatatttgtcaaactgattattgagattctgattcccttagtgaggggagcatttaatagtcctccatggtgcgggggcagggaagtgacaggagagggagagcatcaggataaatagctaatgcatgctgggcataacacctaggtgatgggttgatgggtgcagcaaaccaccatggcacacatttacctatgaaacaaacctgcacatcctgcacatgtatcccagaacctaaaataaaataaaaaaaaaaaaaccagtcctccatccagtcccctctttctaacctgaaacccagcctcctttcatgttctgagaataaggaataatactgaataaggaaaaatcagcatcatgccaaacttcctataagtctgttgaggctcagtcctcaatagtagtctctacccatcttcctcactcatgaattctaggaaatggattaggaagctgagtctgtccccaagtctgcagcccagcagcctcaagactgagatcctccccttgtcagctctcccctgtgaccctgagtcctgccatttttatccaagctcttctgacagatgcccttaatgtgaactaaggagagcctcagatagagctgtgccaagaaacctggtgactgggtgtggtctggcaatcagatgtccttgttgctatgccatgtctgttagatcactgatgatgaatatacatcttgcaaaaatcaccgatttttcattctgtctggccttcctagccccacttttaccctagatggaaaagatctaatttcaggtttgccttcctcagctggatctggccatctgaatttaactggaccatcctcacccctgtccgtgcctatgagtcataagtgatacaaatgtcagcatcagcatcagtgtacagttcttgacttcaacaaaggatgttaagactgcagtcactccggtttttctcctagaatctgaactgtggccagaaataatttctggctcctggcccatggcatagatggtttgaaacctgagttctaacgccaaaagtgcttttaactcattaaagatgttggaaaaaccacttagccttctgttgattcatcccattagaagaatacaagccaaactatagggaggtaaatgaagactgtatttagaatcaaacttacatctataagagcagttaatatttatggagcactaatgtgccagacactgtgctagatgccttggataattatctcatgcaatcctcacaacaactcatgaatatataatgagattatttaaacgttatatttgagaaaaattaggcttggagagataaaaaaaaaaactaagattaaagagctaggacatgctggaagcaggagccaaccaaagtcctctttctcaaccctgggtggaggagttcatattctctctcagcatagccagatgcatatgtgatatgggcacatatgctttcaatgtatgcacatttaattttcaaagctagaaattcaattaaagaaaaaaaatgtccaatttgaccaaggctccttgaaacgggcttggttgtgaagaatgatgctcagaaaaacagctcccctttctctaacaattgttcccagctctctttcatagaagatgcaacatctactcctactaatacaaataaaagagaattattctgaagcaatttcttctcctaagtgctttttgtataggatatctatccataatcaacatttgatagcagttcttactttttaaaaaagtacttaaaaaccctttatttcaaagggattgtctgtagggcttgtccatgaaaataattctccaattatgctatacattctctttactcatctccacctcctacattaaaaataaactttccaaaacagataaaacaactacctaaaaagaaattaaccaactcagagggaaaatgtggggataaagtaagatcggcattcagaaagttaacttgtcgcagagataaaagatagtcccaccaacagggtatggggctaggccagcactatccagtagaaatattatgtgtgtcacatatgtaattttaaattttctgtagtcacatgtaagcaaatataaaaaaatgtgaaattaattttaataatatttatttaatgccaaaaatttcccatttcaacatgtaatcaatctaaacgttattaaggtttcatattggggggttgctaagatttggaatctggtatgtattctgtacttacagcacatctcaatttggactagctacatttcaaatgctctatagccagccacatgcagctagtggctatggtattatcagataggacagactagaccatcactaatctgtgaatattcttcaagtttctaaacataatggcttcccatctttagaaaacagccagctttttccttatgcttttctttgccaagcactgtttcttttcattgcttcccaacctctctaccaattcttcactcaactcatactaaagaaaacaattttctgtcaacagctcacaatactaaagtgtagaattatacaccactgtacctttttcttctctgctttatacagtaactaggttatttccctgctctagtattactttattttcatacctcttgcctttgatttatgagggctgccagtttctctgaggtttagtactgaaaactccataaagtttcctctctgagaggtctggtgtttctttctgacattaactgtgctgttatatttgcatttttactggaagccacctcaactcatctttctttcaaagaagttgggatattttgttacaaatgaactagtaataaaatagtttccttaggaaaacggagagaaactgataccaaacagaaatatttgcttgtaatcttcaaggaaccagtataaattgctacacgcagctatgccacccacaagggcatcctgacaagactaccagcacctcaagaagtagaatggattactacaggaaggtgattataaagtcaagtaaaaacaacaacagcacttccaggatcatcttgaagaaaggttaattggaaaggaagtgataaacagatttacactatttggataagaaggatctatggctatttctggtgtatcataatacactcatttactcagaaaaatgttaaaaaaaaaagtgcattgcaaagttgtttcaagtgagagatagaacaggaaatagaaaacaacatttgaggaagtggctgctccttccctagatgatcatataaaatggcaagctgagagaagaaaagggcaaatgagacatgatgaggtaataaaaaatagagaatgtcagtcaaatttattatctatttttgacaattaaaaccagtagttaattgtaggcagttaatgactagcaaaagtaggaggaaaaatagtcaatgtaagaattaaattcttattgaaaaaaagaacagtacatacctctctgtcataagaacaggtagcatttagaaaatgaaacttttcaatgtaccacagaaacagcagcctttcctgattggaagagatgtctacttcttaagacaaacaagcagccgtccaaaacccatggtagcaataatagacatgaaaaataaataaagaagagaaccattctccagctagaatgcaaggactgcatttactcacctaacatctaccccagggattagatggcatgcaacaggtactcattaaatatttgttgaaaatatttttggggaatgattatagctgtaggttactagtaggtatagttgtattcccaaatatgttggggtagaaacaatgctgagaaccactgggcgagtggcaacctcccccaaagtggaaggattaagtctgggtggtagcaggagtcttgctattatccaagctggtggagtgaccagggaaactttattatgaatcctaaacagagtaggggtcatgaggaggaaccctttcagaagccaaggtatgactgatccaattagatccgtggatcaagagccagggacctggaagaagtcaatatatcagccagaataaatagtgatcatactttccaagggacaagttgaatcaatgatgtccataacgtaaataggctttttttttgtgtgtgtgtgtgtggccatgcactcaacctttaccaggatcctgtcctggagtgtctaggatactgtgcaaatccccagattataagataacaaggaggaggaggaaagccaacattatccaataaagccagacaaagttaatagtgttaaaattggtgtgccggtaaattaatcaattttctattcaaaaacatcagttaccagtggattgccacaagggctacagctatggaaagactgaaatctttgtagaggacctttcctccattacatattcaagtgaaaggaggcaattttcattgacagtagcttctctaccttccactcaaaaatacagatcctatagctgtacagaattccttgtccttatctatgataatagtaatttctttttcaggttccttcagtgcttttccattgcttcctgtgtcttaattaaaatattatcttcatactatgagcatgctctctagagagctacctagctctcattcttccaggtgctgccagtggaaagttaccaaagcaagtaacagagtaagttaataaacaagcaaatgagtacatacataaatacatgaaaatgaaagtaataaaacattgcctaaatctaatttaatttattatactgttttcccatcatgccacaccagtacatttatcttctattcctgaaaaaaaaaggttcattcctataaggataggctttctcttccctttcacgctttctctagtcattacattttttctgcaattattagcctgctctttttaggacactgtgcccgggagataataaacataatgccctatatgtcctacacagatatttttgatgagcttctggttcctctttctccatgaatcctcagctagattcctgctgcctggtctgtcttcctgggtttgggtcctacggtgcattctgaccgccaagatttgtttgaataatagttcctgattgtgaagcaatctgctctggactgctaaactcattgcagacctccagctacatgttaacctttcattgcctggttctcctagaggcctggcccatcagcccatatatctcctgtctttgcacattagcccagctactagtgcttcagtctcagtacctcattctctgtatacaacccagtgccgcccagcctttgacactacttaaaggttattttccttcatcctttgagtaactcatccatcataatttagttttatacacagaaatcttactcaattatattacagacagttctattaatactgctgacatttactaaatgtgtagtattgtatggctatgttatatatcacagcaagaaattaatgaatttggcttctggttttaacaatcattctggtcctataaaaggcaaacttaggagtatcgctttgcaggggccacttgaatttcagggacaaacattttacacgtcacctgatggccataactgaaaggattgcttcatcagataaggtccatagataacaagcaacacggagatttctatggctccctggtggtaaagctgccaaattacctcaataggatgtcagactccaacatatataaactagtcagtaaaaaggactgcagttttgcagaatcagcatttaggaatggtcagtaaaaccctgaagaaaatacacaaatgacttacagattattcatatagagaacagaaagacttcctatgtttgctcaagactatagatgaatcaaagctgaagaaagacaaggtacatagagtaaataaattagaacccacatagagtaaataataaggaaaaacaggctgattaataaatgtagtcattcattcaacatttattctatgcccactaggtcccaaatattgcacttggagttctaaacacaaagataagcaagacaatgtttttgttcttgagcagcttaccttccagtggataaagcaaatacacgcatgaaagactacaatagaagataaatgctgtaggagaattatgcaaagcacttcacagagcagagagaaatgaccaatttcacagagcaagtagaagtaaacttagaggaatatcataaaaaggataagacttgacatgcagaaggagagggatagggacatttcaaaatgtaagaaaaggtcagaaacaccaaaggaaagaggtaaagatagtacagcgtactaaaaaagaccttttagaagcagggcacagaggtgtcccagaagccatgacaggagagatgttcagtgatcagagtatagtctgtaaggtcagaagcggcaaagccaggtcactgaagtgcagggcccctctgttcagcaacacccaatcagagatgggtggtactttggctgctgtggaggatactgaaagcttcaaatttgaaaaggataagttggtgtgcttaaagttagttctcaaatatattagcttaggatatttcacaaaatgaacaccataggaaggaccagtgcaggcagaagacaatacaaattctgcattggcagaatttgctggctgccacatcgattgaatataaaaacagtgaaaagggaaggaaacatcagaaatcttgttgtttgaaaaataaaataaagctgctgaactgactgggagaacttagaagagaaatcaatctctataagaagagctaaaagaaaatttataaatgaaagaacatccaaagagccacttatttccataacttattcatggatacattgcatatttcatagcattgaagcctgaaaatgtgttcacagcccagcagcattggcatctcctggaagtttgttagaaatgcagaatcttaggtggcacttcagacctgttcattcagaatctgcagttcattaagagccctatatgaatcacatgcacattgacgtttgagaggcacctttttatagaattggggaaattgtgcatgctacaaaaagggcaagaaagctgttgttaaggcactaagtgggaacatgtctttctccacctttggtaccctcctgttgctctctactcgtgctggtctaccagatgccccctggaatgccttagaatacctgcattacccacagggtagctacttccctatgactgagcttaattaggtactaagaggaaaagaatatgattatctcattaaaataagatctcaggtactaaggtgtgaaaggttgattggattaacattcccagcaagcattgacattttaagggaatttgctaatccaaatggatttctaattgacagtttacaggaaagagttatttttcagctgggaaggcttccaggtatctattgtccctgcccactgcaggccactgctagcagaacaataaattgttagaatccatttatgggcaaaatagcattataataaattaagccacattcatctgagttatggcaataatggtgatgagaggttgagctgattagctaagattaagttacatattatgataaaaatagagcataaatagataaggacagttttggatttaggattagaaataccaaaagagcctatttagttggatgtagaaaagaagtgaactgagaaggaaatgaacatattaaacactctcaaataaaactagatctctagaaagaatataagggattaaaaaaactgagtaaataaaatttatatccagattccttggctgtataaactacttaaaaattgaaaactaagctaacaaaaaggatattaaataacttgactaataaccatagcactgctgcctacacaatccaagaggcaactgtgtacatgaaaagaatatctttcagcagaagcttctaaaatcaagcaagctacacatccttgacagagactcaaaatgtaagttacatctgctaaacatgaagtaaaagaagcatttctttccgtgccttctgattgggatgaaaaacataggtaaagcttaagagaaaaataaaatggattaaaaaggaattttatttcaggccaacagggaatggaaaatgggcacaatagcacacaaagtaagaaaagcttatttggggatgagggataagtctgtattcagatttgagcaaaggcatatacccagcaagagctaaagtatttgacctttctgaaactcaatctcttaatctacaaaatgggtttaataataccaacatttttttcccccagggttgtcttgtgaactctgtgaaatgtacagagtgtctggctcaataaaaataaaaataaatatttgatctttaactccaaagggaataaaagatgagttacataatacattgaatacaatcaactataattcacgtaatacggattcagagattataaggaaagaatacattatttatgcatatatataaatttacatatgtgtaaatgagattacaaatgtggatataaatatgtatttgtttattgtcagtgtgtgtgtgtgtgtgtatttttttttgagatggagtcttgctctgttgcccaggctggagtgtagtggcacaatctcggctcactgcaacctccaccttctgggtttaagcgattctcctgcctcagcctcccaagtatctgggactacagggcacaccatcatgtcggctaatttctgtatttttagtagagatggggtttcaccttgttggccaggctagtctgaaactcctgacctcaagtgatccgcccaccttggtctcccaaagtgctgggattgcatgcgtgagccaccatgcttggcctcagttacttatgtaagaattttagagtctgggtgcaaatcctggcatcaccatacatagttgtataatcttagaagtcatatttaactctctttagctcagtttcctgaattgtaaaataagggtaatagtaatccctaatctcacatggttcccatggtacttgttcttgccaggttgccttttaactttcagtaccagtgttagtggcatgtatctatcgtaagttccaactaaccccaagctgtactgagaacactgtatgtgtctagcagccttaggatgatgtggtttaaggatctagagagactttaaggtccaattctatatttgttgtgcaaacaattaaagctgctttccttcacagccctgattctacacatggtctacgatttcttggctgtgtggactttctatatggtctttttttctatttcattgagtctgaaaagattgagtttatcttttcagattcaatgttctaatttgtttgctgctaccatttttaaaccaattgtttaaataacagggataaaacatgcattctataaaacatttgtactatacctgagtgtatccatccctagaggtaaccattcttatatactttacatgtttaaatcccagacttctctatataaacaatagacagacagatcactacctaggcagggataatgcacagcagacacttaataaacatttgttgagtgcatgcattaatatgcaaactgtatcagagactgctagttgcccgcaagtatccattcttcccattctactcttcttttatagaacccctgattttagctaggtgtttttattattatgttttaattagtacatgtatatctccttcattagaatgtgaactactcacgaagaaaaaccgtttaatccaatctcattttcataattccaaggacaacatctaacaccaactgggcataaaggaaatgttgaatggatgacaccacttattgatccacctgtttttctgaattgtttactcagtgtaatttgggaaagagaccaactcaattctcaatggcccctaccttattcaccccagttaacttgccttttctcagctgtgtaccatgcaatggctcataagcaaacaatggctatgagcaaactgatgaggctatttctgttctctaaattaattttctgtaagtaatttgtatattttctgcagtgttttactgactcttcttaaacgttgattttgtaaaactgtaatccttttttctaaccggtatgcagtagttagacttcctgtggcggtaatttggcagttttgccacttgggaataagtggggatgacttcatttcccagcctcccctgcagcaactggatgtgagcagaattcacatatgcatcttccggatgaccccctccctactgccaccaccaacccttttacccatcctgctggccaaaatgcagatataatggtggtgaggcatcttggatgaagaaaattccccggagatgtcagagcagcagcatagaaggagcctggctccctgttatggtggactgcttgtgtccacatggatacagagagagaaataaatttctcttaatgccttgcctaatacaaaagcagattatttcatctcatagtcttctcatttctcaggctgaaaaccaagtaccacttgaggtaatctgtactgattctgctgcctccccaaagtcaaccccaacaaactggagacaaggcattccaatgtgtatatgtctacagtgtacaccataggatgtgttcacacatttttcttctctctaatgagcagagattatatcagcttactttcctttgcccaatactgtcataacaggaaaattccacctgtcaagcatttaggtttggggagaattctatgatatccatggcatgagtttaaaaaacaggctttattaggaaatttatacatgccaagggtcccttgatcctttcatcatcccacagagaagcatgctggggcagggtgctgctattgctgcagtttgagtctgagtttcagtgaagaaatcctcctcttttgtgtgtcccctttttataggtaaagcaggggaagcagttgtcagtgcttggtacctgagagcctcaatatagggtgccagctgtttatatgaattgtcagagaaagacaagcccctggctactttagtctacctgtcaaggggaggaggtcacaggtcctgtaggaaactgggcataggtataacctcacacactgggtgaaggaggcaacccattctcccctaccttgttccactggtttaatcccagaggcaacagggtcaatccaggtttgacactgtgcagctttaaggacagagagctgcattagaataacaactttgaataaatctgttacattagaggagtgccaaagtctctacagatcacaaagagaattccatcacacagatttaaatgatacattctaacagcaatagagtttcataaaataagcaaaagacctgtgaaataggggttaagtcaccaaatgacagatatcaaagagaatttaaaataaattatttacatgtgatcattaaaacagcataggcaatgaacagtaattcatctcctaaagtaataggaagattgatttaaaccaataaagactaaaatattctaaggttgctataactttattctttttcatgttcatatatttattatagtagcctacttttgggaggataacattcatttaaaaaaatttttttaagttaaaataaaagtagtgcccaagtgagaaattgagaaagaattgtaaatgcagcttgtggaactctgcagggttcttattttagaccctaaggtaagaacattagagtgaaagccccccaaagtactttacattccatcattgaacattgtatctccatcaactctaaatgtaatgaaaaggaaaaggagaacagaagaataaaatactaggaaaactaagacagatagaggagttcggtgagtagagaagctaagagggatgtggctcttaacggatgctcaaagtacaggcagaaaaggggtaaccagctattctctcttctcatattctgcattctgtacccacccaaacccaaaacctcttgcacacacttcagaaattaaaggtaaaaacattcaggattgtttctgccaaaagggtaaggtggagtccagggcatgatgactgaatgcttagtttatttcatttctaacctggttcaaaagccacctcctccatgaagccttctctttctgctggtgtgaacacctcaagggcaggagttaggtcttcttgatattcatgactggctcttaggcagatgctccataaatgggcattgaattaaataagaatatagatttagggtggtgctttcattaacctcaatgagaaacatttcatggtttgtttagctaaaataaatagatttaggtttgtgtcaaatttatctcgcttataaacttggcaaatctgcttttaagtttcacatataatctgaaagtgctgacaacatgtgtcacaagctaatgtctacattatgatccaatggtgggaagtgaaatctaaagtgacttacatcaccttgctgcaatttcaaataaaaacaaagcacaaagccataatgaatcactgtcaataaggtaagcatgccacaaatccaaggggccaatgtaacaggaatggagagagagaatactagattatcattctcactggcaggacctcaactgttccacaaatcattcatgaaaatgcttcttgtagagagaaaagatttgtccatattatgaaacgatatatttataacaacagtcataacaaagtataatgtaacagtttattattgttataagcttccatttaagacacagtggaggctctggttaggatcatagcttggaatgaatgaagtgcactggttggggtgtcaagcatttttatcaaatacctacatagtcctccagctgtgagtttcattaaccttctgttttcaaagatactaaattcacatgtatatttaaagtgttttctagtttgaagcataaaataacatttagttttatagtaaattaaaccaagtgcattctgatacagaactgaatagagtactcctcaaaatatcatattttccaaggacagtcatacattttgtttatttgcaattttaaatacctagagaacaaggacttgttctcactattatatccaacttacagccttatacatataggcaattgatatatgtgatttgatggcataatacagaggccccttagttgctggtcagtatgaactgaattatttagctacagtaccatgggccagagacattgcttacctacacctatttaaataaaagccatttctgtgaagctgttagtaaattatcacctggttaattaaacactggatacctttgtgcttcactgtctagggaaactgtagggaaatatataaagcattaatgtgacccttgacttcaagattataatcttactaaaaaaaataaggcttgagtttttaaaaattacattaccaaaatataatgcctcaaataatagaataaatataacatctatttcaaaaataaattttagccaagaaaataagacaacaatggagaactatagctcaaacgctagcggaaacttctcagtagggcatttaagatcttctataatccagccctgaactaactttgtagtggtatttctctttgactccccagcccctacccaccaatgctgtgtattctagccaaaatagaacattcctcccttcccaaactctttcatgctcttatatcctaggtatatggctatccgaccccatttctcaatgtaaaataatctcactagagcaaaattactagtatttactaacatctgtgttctcttctatttgggcatatggctaaaatatattttccaacctctcttgtacttagatgtggctacgtatatgaatcatagaaaataaaatgtgaatggaaggaatggggccactttttgacttccatctgtagaccacttattctaaggatctgggacatggtaaagtaacagtaggaagaatccaaggtccccaaatcattctgtggcacgcagtcaccttccaccactgctgacctgctttgagctgttgacctgtgacctaagtgaaaaataaatcacctatgatgttatgccactgagatttgggagtttctctgttgtagcagctagcattatttaccttaaccaatatcttcatttatcttttcatcatacatcaaggtttcctccactcaaagtctttccctctgccttaggcagaactaatcaccctcttcattttgttcccagagcatttattatgtatatttattattcattgctgtctgaatcagcttgtgagatccttgaaagcagatactattttatttaactttgaattcttaacgcctatcccatagcagacactcaatgaatgtttactgaaagtggttaaatgactgatagtatctgataaagctgcattaatctaatagaaagcttatatatgagtttgatttagaacacaacagaaaaagaaaagatttttcatggttggtgagaaaatgttactgttggatccagcaatgtattcaattcacacttgaatgtcatgcttaaacagcatttccttggataaacatggttcattttttccctctccttttaacacttagcagtgtgaatcatcaaatccagccacaataaatgcatctcctcttagttgccccttaggggttaagtgacaacctgctggtaaataattatgatctgttgtgattttccagagtagttttatttttccttttgacaaaggaatatagacgatggatgtatacatctggtattcattcaataataatctagccacaagtaactgaaaaaaggtctgctgaacaaatgttaaaactgaaaatctgcaaaggtttatagtctatgttatcaaaaattgaaacaaaacccatacatttccaaggtgtttgtaagtcttatgtgcccacttccctccaaaagctgcaacacacaccgcagcgtttcttggggattataggtggaatgaagcaagcacacgtgtacatccacacacatgcacacacaggatacaattagattaagttgcgggtttaaataacgagagagacaacatattctatctcctgcagcttctatgagccattctgactcctagcaagggcagagagccgtcactacactgtctgctcaaggtagggtctcacaggatctaaaagcacaattttttctaaaccactgccctttaacactcagagctgataccattattccagaagtaagactaacatggagttctcttgattctcaagccaaaatcagcctgaggaagtccccattttcatgtaggagaaatgaaaacgggaggatagaaagtaataagagggtagaaagcccagatgcctctaaaaataactgcatgccagcattttgggaagccaatttccctgagtctgcctgcttcattctgataccctttcatctagttggctatcatgaaattgatcagaaggcaatgatcaaaaatccatttcactacacacaaaactatgccaccctttaggaagaagcaaacgagtatgattttcacattttctaaaatgccattatatctttttgctagggaatactgatggatataacttcccaaacataatgattattctagtaaaacaaaagaaagtgggccaaaataaaacatcaggaaacctgtgatctttatcagaaaattttcctattaaaaaaattccagagtaggaattgagaacacattttgacagtggtgcctgctaatatttaaaacagtaaaaaggcaatgaaaaaacaagcctttaatatttttttagaaatgtgaaatctcttaaagctgctctctttcattgcattatgtgataaataactaactaggactcactttatttttccttccaaaggcaaagagggcaaagaatgtggcgaactattttacattcatgctctacatccagccaggtggtcaccatacagtggtttctaatatgaggcaccctaatatcaaagccttttacattgttaaaaaataacaaagaaaggtatagtagcaatgaattcattagcacaaaaaaggatagcagtgtgtatcagacaaaagtcttatgcacatcttcatactcccttggctatgcttcctcccacctggggaactaagtttccaccaccagcgtcacctgctctgggagtgttgaatgttctcttgaggctgtggctgggcagtgggacctctccgttacccagctgaagtttctggattctctggccactcacagatgtgggagctggcagtccacactacagctggagaggccaatgcaacctggaaatgtcagggaattcactccccaaggggtgaactctgccctatgagaatggggagagagcagggcagataaatgccctcacctctctttttcactgttgtggagtgtggttcttttctccagcctatccagtagagttccatgtggcaagtgggtgcagctgcatggccaatggctgtgtcccttgttggtcttgagaagcagtaaccagccctggaaccactgcttcctgttgctttacttcctcccttgcctccttcccccatccttttaaaaattatggtaaaaagcacataaatgttaccatcttaaccttatttaagtgtacagaccagcagtgttaagtatatttacattgttgggcaacagatctctagaactccttcatcttgcaaaactgaaaccccatgcccactgagcaccaaatccccatttcccctcccccagaccctggcagccaccagtctactttctgcttctatgagtttcactactttagacacctcacgtgagtgcaatcatatcatatttgtcttttggtgactctcttcccttttccttcatctcactggcctgaatttgtatatccccaatgaagcattggtatttcgatctttgcttcagggtagtctttagaaaattctggctgggacaccatgttctgtataactgagcattaactcattggcgcagtgaacctgtctcctgaaaatagatccttgacttggatattaaaactagtctaaaacttgtatcatgtaataatgtttcatgttataagaactctttttctgatgaacacctggttctcacttcatagagcctcagtaatggtgggaattaaggtggtaggagtgataatgaaggtggtagtggcagtgggtggtagaagaggcagttaactagcattaagctctttgagccaggcagcatgcatcatctcatttaatcctgcctgcaatgaggtaaatttccttattgccatatgattcatatcatcattaccagatgacaactgagaatgtcaaggttaatcaagaacttgtctgagaccacagagccaatgaatggcaaagctggggtttgaatctaagcccttctgccttcagagactgccactaaccatgtggtgctagataaccgccactatctcagtcaaatccatctaaaccctatgtgccagaaacttctttaatttttaaatttttgtgagtacagagtaggtgtatatatttatgggatacatggaatattttgataaaggcatatagggacatcattatcacatgagggtaaatgaggtatccattacttcaagcatttatcatttctttatgttacaaatgatctaattattcttttatttttaaatgtacaataaattattgttgacggttgtcaccctgttgtgctatcaaatactagatcttattcatgtatttaactatatttttgtgcccgttagccatccctcctctcttccctcccacactgcctctcccagcctctggtaaccacctcacgtgagttggattgttttcatttttagcacccacaaataagtgagaatatgtgaagtttgtctttctgtgtctggcttatttcacttaacataatgaccttcagttctatccatgttattgcaaataataagatctcattttttttgtctgtataagtcaattctgtgtaagtaccacatttcccttatccattcatctgctgatgaacaaaggttcatcagcaacaaaggttgcttccaaatcttggctactgtgaatagtgcttcaacacatataggagtattgcagatacttcctcgatatactaatttcctttcttttggtaatatacctagcagttggattgctggaccatatggtagctccatttttagttttttaagggacctccaaattgttctccatagtggttgtactaattcatattcccacaacagtgtacgaaggttcccttttctctacatcctcatcaacacttgttattgcctgtcttttggataaaagccattttaactggggtaagacgatatctcactgtagttttgatttgcatctctctgatgatcaatgatgttcagcacctttcaggaacttttctcattgctttacattcatctttttggttgttggtaaatccccaacacaattctatgaaatgaaaagcctcattgatgcataaaaaatcttattatttttacccaaataaatctaggaagaaaataaagatcccatatattttactataaaaataaaacagaaaaaattacaaaatctgtgaaaaaaacaacatatatttacacaatgtagctggtttagaaatatttttagaaagcaagatgtattagttcgttttcatgctggtgataaagacatacctgaaactgggaacaaaaagagatttaattggacttacagttccacttggctggggaggcctcagaattatggtgggaggtaaaaggcatttcttacatggcagcagcaagagaaaaatgaggaacaaacaaaagcagaagctcctgataaacccatcagatcttgtgagacttattcactatcacaagaatagcatgggaaagactggcccccgtgattcaattacccccacccccggttcttcctacaacacatgggaattctgggagacacaattcaagttgacatttgggtggggacacagccaaatcatatcattctgcccctagcccctccaaatctcatgtcctcacatttcaaaaccaatcatgctttcccaacagtcctccaaagtcttaactcatctcagcattaacccaaaagtccatagtccaaaatctcatctgagacaaggcaagtcccttctgcctatgagcctgcaaaatcaaaagcaagctagttatttccaagatacaatggaggtacaggtactgggtaaacacagccattccaaatgggagaaattggcccaaacaaaggggatacagggcccatgcaagtccaaaatccagcagggcagtcaaattttaaaggtacaaaatgatcgcctttgactccaggtctcacatccaggtcatgctaatgcaagaggcaggttcccatggtcttgggcagctctgctcctgtggcttttcgggtacagcctccctcctggctgctttcatgggctggcattgagtgtctgcagcttttccaggcacatggttcaagctgtcagtggatctatcgttctggggtctggaggacggtgtccctcttctcacagctctgcccccagtagggactctgtatgggtgctcccaccccagatttgcattctgcattgccctagtagaagttctccatgaaggctccgcccctgcagcaaacttttgcctgggcatccaggagtttctatacatcttctgaaatctaggcggaggttcccaaaactcaaattttgacttctgtgcacccacaggctcaacaccatgtggaagctgccaaggcttgggacttccatcctctgaagccacagcatgagttctacattggcccctttcacccatggctggagccacagggcaccaagtccctaggctgcacacagcatggcaaccctgggcccagccctcaaaaccactttttcctcgtgggcctctgggcctgtgatgggaggagctgccatgaaggtctctgacatggcctggagacatcttccccatggtcttggggattaacattaggctccttgctacttatgcaaatttctgcatccagcttgaatttctcctcaaaaaaatcagtttgtcttttctactgcatcatcaggctgcaaattttctgaactattatgctctgcttcccttttaaaatgaaatgcttttaacagcacccaagtcaccttttgaatgctttgctgcttagaagtttcttctgccagataccctaaatcatctctctcaagttcaaagttccacaaatctctagagcaggggcaaaatgccgctagtctctttgctaaaacataacaataaatcacctttgctccagttcccaacaacttcctcatctccacctgaaaccacctcagcttggaccttattgttcataatactatcaacattttttttttttttgagatggagtcttgctctgtcgcccaggctgcagtgcaatggtgcaatctcggctcactgcaagctccgccttccgggttcacgccattctcctgcctcagcctccagagtagctgggactaaaggcacccaccaccatgcctggctaagtttttgtgtttttagtagagatggggtttcactgtgttagccaggatggtctcgatctcctgaccttgtgatccatgtgccttagcctcccaaagtgctgggattacaggtgtgagccaccttgcccagcacactatcagcatttttattaaagccattcaacaagtctctaggaggttccaaactttcccacattttcctgtcttcttctgagccctccaaactgtttcaacctctgcctgttacccagttccaaagtcgcttccatattttcaggtaccttttcagcaaccccctactcctggtactaatttctgtattagttcgttttcatgctgctgataaaaacaaaccccaaacaggggaaaataaaaagaggtttaattggatttacagttccacatggctggggaggcctcagaatcatggtgggaggtaaaaagcacttcttacgtggcggtggcaagagaaaaatgaaaaagcaaaagcagaattccttgataaacccatcagatctcatgagacttattcactgtcatgagaacagcacaagaaaataccagcccccatgattcagttaccttcctgtgggttcctcccacaaagtgtgggaattctgggagatacaattcaagctgagatttgggtggggacacagccaaaccctatcacaagaaatacttctgaaaacagaagagtattatgaatttaactggagataaaaatgactgcacaatgaagattacggaatatgaatattccacacatctcaatttgatctggaacttttctcagatcaaacttcaaattctgttagttagtatcttttttttttttttaattccccaaaagtagcctgggtcacctttgtctgttaaaatgacccagtgtgtcagataggtagtggaatgcagtgaaagctttgagctctatggaacctccaacttaccacacagtgtaagacagcatagcatgtcaccacaatttcttcaaatttactagtccatgcctctcaactgacttcgcaaaatggtctctgctttcttgcctttgtacatcatgagcacaatcagacatttacttctatcccattctttccttttcagctctccctaccccttcctgcttgactccactgtaacagatccttcgctaaatcttgcctttcctctatcccaagcatcactacagacaaacctttcttaagtacaagtcttttctccactcaaaaatttccacggattctcccttgtgtcttccaaattaagtacatgcatctttgtctgtcatccaagcccacacatctgccatgtcctccagccagagctgggtgcaagtcttccatgatactttttgctccagcttatttctgcatatttgcttattgtttccttacctaaaaggaagcccgtactgcctcaaccccagacttaccaatccttcggagaccttctctaatgttccagatcccacaaagtctcatttccttcctccattaaatgtaatttcttcttttccttgttccccgtcacattggaattgtgactctcctatggcacccagttaactctgccatgcattatctccctactcaactgaaagcttctcaaggacaggtatttcatattgacctgtgcctttcctttggagtctagcccacagcagggctcattaaatatacttttaaaggaagtagaagcttcaacacagcagtctcgaggacttatggtgttaataagctgggttctgaagaaatcctagagctagaagaatcaaaccccagcttcctcaagtctctgtgtttcattaagcaactaaacaagagagaagcaacaaatgtggtgcagcaaggaaaagcatggattctgtagccatgtggcctggggtgagtcctggctctaccccataccagctctgatgtgaacttgggcaggttacttatttctctctgcctcggtttcctcacctgtaaaatgaggatagttacatttcctatccctcagagttattaagaaaaataaatcagttaatatttgtatagcacttaactcagagcctggcacataataaattaaaataatgggaaaactaggtctccatggttttgctcttcccatgattatgacattcaattttgagatacaggcattttgaatttggagacactttctggtgatttacacttgctcagtatgaactttcctcaatagtaagtgtcaaggaataactgtcaacaaggagattctagactgaaggcaatttacctggccccaaggaagactcctactccacaactgcatcaacagtttcatttgcccctggtcagaggaggctgggaggaccccaatccctgatcagaggagcctacaatgaaaaacaaggggatggagcttcttagtcttcttattagtcttcctttccctctttcattttcctgttacttgttaatacttttcctattttctccttattgttaatttcaataatatatgttgtacaacttcatatatgctgtatgatttaatatatgctgtacaacttaaaatttgtggctaaacatctgcttaaatccttcggtgcatagatgcaaaagttggttcaattcaattctacaaacaccactaacaccattctgtacaagccactgtgcttatgctgggaaatcaaaaagaaatgagccaaagtccctgccctccaggaaactcatatttatttaaaggagacagacatgaacacacacaactgcaaggtaatgtattaaatgccttaatcggagcatatacaatgtgcagtggttacgcagattgattctgccctggggattggctttattaaaacatctaacaaattaataaacaatactggttgatttcatttcatcattccctgtgcttaatgtgttttgtatatgaggctgtttgcaggggctattgagctgaagtacagagcagtcactgatcatcatagtcttgatattctgtttacagaagccatgcccacatagtttgttctgttactgaaaatgcaaataaaagtgatacaattataaattgcaacacttttataaagaattataatttttataaaaaatttataatttaaaattggattattagatctctactgctaagctaatccttgctgtccttaaagcaaggacctggtgcatttgttttcctttgaacttccactatcagatttagattctgaccctctaaactacaaaggccactggctgcaactacagctagaaatcagacacccttgcaatccattctttcttccaagcttccctcaaaatcagctagtcatttgccggtttgaattgatgttccatctagcctactcctgtacaagttatctagtcttaagaaacaagctccacctcagacatgttttccatgtaaaattacaaacaactactgttctgaccacagtcaatgataattccccaggactcagcttgacagggacaaagaatgaagggaaagaaaactagatgcttgccagtatgactgttaaatgtcagctattttggagtttatccccacatgagatatttcttttgtactgtgaggacgatcactgaaaaaaacatgacaacataataaagccacggaagacaaccccatcattacagctgcaggaaataaaacatagattaatgtcaccaaagcacatgtcaggagggataatgatgatgtacacaaatgaatcttctcatcctggacaaagaacttaagtaccacctaaaaccggataataattatatacaaatcaccaacgacactgctatctgctaagcatgtattatactcacacattttcaaagagtttgttttatatttttctctcaaaattctcctcaagtcttcccacttgtattcaagtgacacaaattacaaagtggtgcagcaagcactgacattgcctaacaaggcaaatgcagcctgccatggacagctatgagacattgtgtccatactctaagtgccaagagcgagctgtgaacaagaaagctgtgcagctgtgaacaagagcagcaaaagtgatgtggaccatgcagaggggccatttggctgtccaaatcaaaactagatataaacaatcatttggaaaaataggttccatttgtgtttctggtcacagaaaactgcccacagagtgaaaaataatgagaaagaatctgaggccaatagctgatcaatataaggaatgtaaactccagtttgaataccaaagatagagggaactagaattattttaccttggctctaggctacagccatctattaattaatagtcttaatgtggtttagctactggatcatcacgttcatatcagccaagtgcaacctcaaggcaactgaactgctagaaaactgctttttcatttatgatgttttccataagagaaagcattactgaggaaaagttattattttacttatactaagacctttgaccaaaatttacactcaacttttcaggaatgtgctttacttcatagtaagatgttcaccaatacttgacagcaaatgaatgggttacaattactgaaaccccatctatgatttgtaaatcatggatacattctagaagcctttatatttattaagacctattaaaattcagttatttgtaaggacaaggggtggaaagggagtttgtgttttctctccctttttcttatattttttcctgttgggataaagtgtaaccagccataaagaatgtcacttgcatttgagcaaagccccctatctcttgtctgttttgcaaagccactgctgtgttctcctacagataaggagggcagcttaagtagtctgtaaaacgtaacaataacaacaatattactaatcacagctaattcttattttgtgcttcctatgtttcaaacactgttctaagtgctttatgtgaattagctcatcgaatccttacaaaactttatgaagtaggctctattattatccttattggatagataagaaagtttaggtatatatattttttctcataagtttatttacttgcagcttcaacagagtgcagaactgaaaggaggtagatttccttatctcactaaatatgtacccttcattgaaatcacatttggtcttcctcaatgatgagacaggcccttagccatagcctgttcatctgcctggtgatgatatttcctagattctgaaactcttaaagttgaagatgacctcggagtcatttagggcaatgctgcacccactgcaggaagcatattttttgaatgggtttctagccttcatctgaacacctctagcctctcttgtggatggagagctctggatgtcaaagctctcatcttccttcacactcatgacaatctttgaaatgactcctctttagaagaaaagatcttcttcctttgcagtgttgctctatgcaagtgaaacaggaaatgtcatagtttttttaaattagatcttacttaaaatcaagagtgtgatattgtggacttccacataagggaatgaagggggactaattctcatctgtgggttgggatatctaatcctcattcctagtggtcaccctctccttgcttcacactccatggtagcttcacatggcttctccactgtggaacatgctgacttttttctcacattgccttagggaaaaccactagaaacaaataatttgtagaattgatgttgagcaggaagctcttgagaaggaaagctgaaggagtatttttcttttataaacggtgtgaaaactcaccatccttgctctatttcagtgaaagaaatatacactagatttggaggaagaggcagaaatagaaaagatggggagacaggaagaagatgggaggagaatgaaccaggaggaaatgactgcagacataggatgtccttagttaaatagtgtgtgggcacagctgatcttcagaacttgcagaccactcaagactgttctggtaccaccatctaactttctacacccatgatccatcctcctccaggactcactacactgtggctcttgtttttttcctttcactatgaaaatatgctcagaggaaacacataaagctcatccacactgtgatataagtgactggctgacaactcgaaacactagccccatgaaaagtatattttcaacaagaattgaaatatcaaatcaaagggctgaagctccaggtcttgaatttcatatatcgaccaggaatggtagagatatctggggagtcagaagtcctttccaggactggcctccattctaggggctcccctggccttgctataaaagcacacccaggtcttccagatctgtgcatgtggccactcttctagaaggtggctggtattccagggacagctggcactcccttccttgctctttgccagcacacggcacacacaccttcattaaagcatttgtcacactgtactttgaggtcacatgactatgtcccccaccagactgtgagctcttggggagcagacactgggccttggtcacctttgtgttctcagcactttgtatcaggcctacatggtcacccattccttccaaatggctgccctgtgaggaaccaaacacactcggaagagcgctgcatgggtggccttccatgtagggagattcagtaacagtacaggaggttctcacgttacgagcaaaaccttgacttaaagatcaacagtcagggccaagactggctaattttttcattaaattataaatttgttagtgacatatttgtggattttatttagtggaattccaacctgctcttcctagttcagtgttgacacaaacatattcccagcaagtgaagtgttgagtaaaagctactgaagaatccattcatcattaagcaaacattccctatggataagagaatgaacaaatggataagggattcactgctacttccccttttccactggaattttctacccataacaaatacattaggtttgtctttaagtaataggagactcaaaactctatactacaacgttttaatgcatttatataaaatctgaaatgattttttttgtcattttctggattaatttctttaattttgctaccaacctaatcagctttaaatatcagaaagccattggatagcttttgaatgtaaatgcttttattttatttactttggaaactcagtttaaaatactattttttgccacgaagaagcaccttcaaatatcagattgtttttcaataaaggtactttaacaagatgtcttctctgagggatgaagagtgaggaggaggggaggaggggagaaaggaagcagttctcaaaagaagcatctaaggacaagaggcttaggaaaaaacaaagccacaaagaaaaccacttttattaccaataccctctttggtgagatgtttaaagagttatttcaactgaaaggtctgagacaggattaaaggcactagtgttctctgatacatctaactaaacaataaaagctgaagaagaaggctagtcacatcattttgccttctcagcaagtggctgtctctgtattaaaaaaaaaaaaaggctttaatcagtataactgacttttgacggtattaataggctaccaggctgatttcttgccgtaggctgaaaaactgcaaccaacatgagagaaaattacataaccactgaagcagaagacaagcaaataatttacacgtgactcaattgagatgtaggaccctgccacgatgctggtgtgcctctccttagctttgtccaccatggacataacatacatgttttggtgccatagtaaggcgatatcttataacaagataatagcctcgagttcttccccttttgaacaacgtgaaggtacaacaactcatttgtaaggtgccttgttaaaacaaccacagtcctcataggaagaggggagggttaagaatcaacgcaattcctgtcaaatgtgtatatgctgcaggcttatgaaagggagaatcaattcactccagcaatgagtaataacatctatgtccttgaagaagcactttgagaaatgctagagtcacagaactatacatccagtgacactgattaaatgctctatttggtctacattttattgaaggtggaggcagagcagcagattaatattgtttgctcctgcttataggaggaacattgggaaactgagtaggcatgtcttccaccagcaaatgccatttgagaattactggtactttctgatgaacttcactgaaattaatattttatataatctcagtgtagcaggcaaccactttcccaagttatataattgtggatcactgaagtatctgcctacaaatgcatgctcacatacaaacacatgcagctggagatgctacagatcttgttgtccggaacttgcaaccttgcaaattgcttccgtggcaataaagactagaattgccaatacagatgacgcacctcagtgaattgaggaagttaacgtgtgagagtgagtgtgacccagtgggctcaccagcaggctgaaggagtgaaggcaggaacaatgtgtccttactacaaccacctttctgattttcccaatggcgtggaggaaattatttaccttttccatgcacaggtcatagtgtaaggatatactatgtaaaataaatatgtcagctaaacactggttatacacaataacatctatccttttgatatggtgatattttattagtggtgactgaggacaaaagcaatgcttagtttttcacataacagggtgaaaaaaaactcaggtaacctgacccagaggacactgctgcacattagagtaactgagagacctctaaaacaattcttgtactcagcccacactccagatcaactctgtcagaatctctgggcatgtgacccagtgtttaaacctccccaggtaattccaacatgcagccactcttgagaaccaatggtatgggattccacaacagcacttcgcctccctaatccagtaggtcttgtgcatgagcttgcatgagaatcatctggagctctgttgaagagcagctggttgggccccacccccagagtttctgacgcagtaggtttggattggtgtttctaacaagttctcaggtgatgcggatgctgtggagggaccatatttgaggatcactgcctccatcaaaggtattcactgtacgaatctttctccaaatggaaatttttttttttttttttactttagcctttctgaaagtgtgtttcttggaccactgccatcagcatcccctggaggaaatggagatactgaggcccactcaaggtgaggcctcgtaaacttcaggtgccaccctccccaccctgtgattatgctccctgaagtttgagaaccactgttttacctcctctttctgcatgcttatgaaacagttctcccctaataaccaaaatgactcaagcatgaaaaggccaccagaccccaacatgagaagtgagaaacagcgaattccctgtggtgaggaatcttcactgcattattctgtgggccaggggacaagggcacgggtaccattttcagaacacatgtctgagaaattaactcagtcatggagaaaagtctgtgtatcctgagcacacacacttcgttatctctcttattgctgcaaatcctctgaatataggagggaaaaaaaaaatctccctttccagcaagttcactataacaaccaatggtctttttgcaatatttgtaatgtctttttggctatacctacttctacctctacacctcttgaactcacaaaaaataacagagtattaggaaaggaggatgtttcctttcccatcccaccttgctgacactctcaggtttaataagtaagagctagataataagagaactaaacaatattttatgagtttataatttaaaaattagtaacttgtttgaaggacaactgttggagctattcaagtatggcattttatcccaaatctgccactcaccaggttgtagccttggaggaaattatttaaccacctgtacccccatttcctcatctataaagtgggagtaataataaagcctacctcatggattattgaaatgaactaaaacatataaagcatttggcacagtgcctagcttatagcaagtgttcgataaatgtgagtttttgttttcatttttatatagtggacacagcaaatgctgaataaagaatgaaataaataaaaaactagccaaatgaataatatcaaaagcagtcctttaggactgtcaaacttcaaattcaaactaagttattgttcagggaacctaaaattcaagagtgcatggacagagtataattcagtatgaagttcaccaacaaaagtgatcccaaatttattttttgtagattggtcaagaccaagattattctgtgagggttatttctgtcaataaaaagaaaagaaggattcaggtcttgcacatcatgggacagactttttttaatcttttcaaaaaagattatgggaaatagcaagctgacggtcaccgctgggtcagcacctggagaagctggggcaagccaatgttagaggcccgtaaagtggccagacacaagcaggggactgaggaccacatgggcaatgaagcttgaaaaggtaagccaaacgggtcagggatctgtttaactttactctgtcatagagattttctcccatttttatttataaataaaataaggcatactccctatttcatggtaccagtaacctccacttattttaccagacaagcccaaagtgaaaacttagcagttggcggggtgcagtggctcatgcctataatcccagcactttgggaggccgaggcaggtggatcatgaggtcaggagttcgagaccagcctggccaacatggtgaaactccatctctactaaagatacaacaaattagccaggcatggtggtgcgcctgtaatcccagctactcgggaggctgaggcaggagaatcgcttgaacccaggaggcggaaattgcagtgagccaagatcacgccattgccttccaacctgggcaacagggcgagactctgtctcaaaagaaagatagaaagaaaaaaaaaccctcagcagttggcctatatgttgtagtttatcattcagagacatgccgaagactcagaatcagactcacactcacagcccattttatcttttggaggcttaatctcccacttaaattcagaaaattcttaaattcgtttttaatgatgatactcttattctcattattacatttttccaacctgatactcaaatgtaatatagtaatacaatgcaccattaagtctcaactatatttaaatgtatatcttgagccataatcatacaagaccttgcacagacacaacacacacatagatacagcaattcctataaagccaatgataaaattaaaatcaaaccattgagtacatcataaagtaatgcccatatgttgtttattgctatagatccatagggtatatgttaaggctgaattaaatttggggttcattttggtccaaagagacttggagataatttacttttggtcaatcccagcgcagagaggtccccaggaatgagtcagttcttaggctcactcagatccacagagttacacaaatgacctggcttttcagagcctactgggtcccaccccaaggccagagagtctcctgctgttggtttagaaagaaagaaagttctttaagcctgtaatgaataagaaatgttattttactagctctgacaagtgtctaagtccttagggtttgggccacatacagccaaaagtctcagatctaaatgaggttacatctgtggaggctcactgcaagtgccacggtctatagaaaagttttcaacatattaaaacaggatctgcacatacaaatggttcataaaaaggaccaaaggaccacaggaaaattataataaatatggtgataataaaggcgataactaaatagccaagacttatggagaacttgtattctagatgctgtgcagatattttacatggttatctcatttggtcctctaacagccccatgagataggtaagatatcatccccattttatagtttagggaaatgaggcttagtgatttcagttatttgtccaaggtcatgtgctcatagatggcagtgccagaatgtaaacctggtcctgtgatgtccagagctagagctctccatcccatcctcatctgactttcaatagagagcgattaagcagaggactcccaggtgtgtttagatcttaaatgagaaattataaaacacagaggaattgtcatataatcaagaaagaatactaaaatgtaatcccaaatgacagtgcagggagctaaaaccccaaataaaccatatccttcagaaaattgctgaaagcaacacattttattggtggagtccctgattgagaacatcaatcctgttggtgccaagcttcagccacagttgggcattttgaaggattaatgggatatgtctttaacagaggggtgtgaaaccatcaacaaaataacatgtgctaagggaaaaagctactattactaaaagacttgatctgaaaaggtaaaggcctcaggttagaggggcacctgattttgggttcattggtgtgtgttacccccaacatctaggcttgtgcggaactctggggattggagatagaaaagcattccttctttaaagccccttaggctttggtgagcacaaagtagctcagctctgaggcccttgtgacaaagtatagcacaaatgggagggaaagagcttttctcatttagactgattattgaaacccactggagacccaaattaggcctgagcacaagctggtagccatgcctcagaccatcaagagtggcaagatataagagaggaaaccttcccccaaatgtggcagctgggaaaatgaaacttcctacaccaagtggacaaaggatttccaaaacaagctggagtgcttgtctgttaaggaaattcaagaggaggaagaattctgcaattcttcagtgatgggtaggggtccacacaatggaatgggtaaagggaggcagagctgagaaatgacattttcgtagttactgaggtccgcatttaccttcaggtcagtgggaactttgaaagttgaggttaatgatgttatgtctggtcttggcaagaacaaagaaaagaaccaaatcatcgatgggcatttgggttggttccaagtctttgctattgtgagcagtgctgtaataaacatacctgtgcatgtgtctttatagtagaatgatttataatcctttgggtatatacccagtaatgggattgatgggtcaaatggtatttctggttctagatccttgaggaattgccacactgtgtgaagctggaaactatcattcttagcaaactaacacaggaacagaaaaccaaacaccgcatgttcttgctcataagtgggagttgaacaatgagaacacacggacatagggaggggatcatcacacaccagagcctgtcagggggtcgggggctaggggagtgatagcattaggagaaatacctaacgtagatgatgggttgataggtgcagcaaaccaccatggcatgtgtatacctatgtaacaaacctgcacattctgcacgtgtatcccagaacttaaagtataataataaaaacaaaaagaaaataaaagaaccaaatcactgcttttgttttgtggggatgggggttaactgctgtaatgttaagaaaatataaaaagcaaacagaagtattaaactttttggcatgtcttttctttatcaaagaaagcataatatgcaaaaatatactatgaggcagctcttagtgctttagtttaagtggactcaagacttcacacccaatggtttacatcaaaagatacaaatgatgaagatccaagaactgctgtgattaatctctgcatagtcatgggtaaacctgaatggtgctagaagatgggagttaaaaaaaaaaagtatcaaagttcaaagttcaaaaatggagaacagtatatttgacaatgaattcaatgagatattgacctgtagtagtaaaaggacaaaaccaaatgcttgaaaagtgactttcagggccaccatatactcattgtgtgactagggaacaatcttcctgcctctaatttgccatccatagaaatggaattcattaagatcattaacaggctcactccacctcctaaggtctgagggaggctcaaatgagatcatgttttcctatgaaaatgctctgaaaaccaaagctcttaaagttgccatgcccaatagttctatctacagtttatatagacagaaataaactcaacccaatatgaatgtgacacaactgaattaatgtgttaagaagtgacttaatgaagattaataaagcactcaacttgaacagtaagacaaaatccaaaagaatggaatgtaacagggacacacttgtcttaatatgtaaaacattattaatatgcacaggcctaagcaagtggggaggtgtagacttaactttggagcctttgatgtagaaaaaactttggagatttctttttaccacaagctaactatgagtcaagaatatgacctggatgataaaaagaaatgcaaccataggctacacgaatggaaatatcattccagtaagatagagtgggactggagctacacttgtactattgcagcctcaatgtactgtttggagagtgctttagatacactggcagtccatgggattttaagggctggcttagaatcctaatgaccataaacaagttttcatcaggaaaacaaagtattcaaagttctgaacagtcaatttactaatatactttagaatatagctcattaacaaagagggggagggggagaatacaggtacttggggctgtctcttacacagaatcactccctcccctgtgcaagcctctcatttcacaggtgcttgcttgcaaagatgatttggaaagatggaggtaaattaacatattgatttcccagcactctgaaggccataagcagacacactgggtcatgtttcaaatgatggaatgtgaaattaaattaaaggatgcatctgtgctcagcccctaattgccagcctagtggatgtttttaaggagcacagagagggaggagagagaataggaagaagcaaggtgaatgcattagaaagcctgaaaaacaagctgaaacaaagggggttgggacaattaagaatttctatgtgcagattaaagttgacagtgtctgttaaatacatctccataatttaaaatacacgtgagaggagtcatcagttggcatctttgacaacacagtagaagttgtagaatcattcccctggccacatttcaggtatctgaaaatgtaatatagttagaggaaattaatagctgggtctggttttttaaaatcatcttcatttgtcaattttagctttaaacatttgtcatgttagctttaatctaactggttctgggatggaatctattacaaaatagatcctaaacaaaaatattcacttcatctgtggcctatttctgtggtcaatcagctataaactagcctgtaactggacagagacctttcatttgatgaagataaaaattttaaatatatttaataataattatttataaagttatataattcacctctatttggtataaaataaaaagcagagaaaaaacaactgctctttctccaactctactgtgcagaaaattgatattctgtgatatactgataggtgttactagggggaaaaatggttttctgtggtcaaatcaatttgagaaacactggaataaagagttttctttcccgcagggcttctcaaaacgcttaatatgcttatgtgcaaggaggagggagacacagtatagcattgccaaaatggaacatttgttactatctccagggacccacacgttctgggaacacaggctaggaaaggctgctcagactcctgacccagcacacaatcctctgtccaaatccagttgcaaatcacatttcaaagattctgaaaactaagtgatggtatagtcaatggcctaatgacctcagcagccagatgcccaaggctacaggccagaaattgctgcatagtttcaagatgacaaaacagatagaagcaaataaagcgacaggaccctggtttaactgtatttactgtcacctacataggtatccaattcagtcctactcaggtttttgtatatttaaagaaatgcttactttagggattaaaaataagagaacaaattgactatttctatcctgaacactaaagatagaatacgtacttgttctcagctagcagtcaagagtaggtaatacaataaatcaaagactttcaccgacagttgaataatcactgaataacaataactttaattagtaaattaatgacataggattatatagcataattcaaacagaattaagcaaagttctagtcaaagggagagggtgtaaaaaaataagaggttagccctgctctcaagaagcttataataaagagtggaacacaaggacatgcacaagtaaatacagagcaatatttgctataatcgctgtaaagtgcaaatccatttgacagcccagagaagaggaagagcggggtagaatctacattatttataatttagagtgcagagtgattgctcaaagtgacgccaataagagaatacttttgcttattagattggcagaagtaaaattgttgatgaaatgccatagtgataacaggaaaacaatcactcccaaacactgtggatcacatacatttgtacagctttttcagaggcaacttggcattatctagaaaaattaaaaatagacattgtagctgtcattattaggaatttatcctgcacataagatcacacacatgtgcaaagatatgttgattccaggatatatacacggtcttgtagttctgataaaaacaggtcagaaacaacctaagtatccatctcaagagaagactggtaaatacatcctctgtaccacaggatgctttgtggctgctaatcagaacacagcagaccttcttacactcagagtgaaaggctcagtggtgacaggagccttgaaagtgcaacaaagtggcaaagccacacaggatctgctgcactccccaccctgacctcactcacgctgtgttcccctctcttgcctcactccagccacactggccttctgctcctcaaatgtgacaggtaccctcccaacttggtcttggtgctgccctcctcctcttggaacacccttccccctgagattcacctgtaactaacccccttgaatccttcaagatattgagcaaacctcaccttcttaatgaggtctactctgagcaccctatttgtgatggaaactgccccccaacacagaattttactttttctttttattcacagtacctatgactttctaacacacttgctatataatttacttacttagatgtttatcatctatctcttgcctctaaaatatagtctttgaaggcaggggtgttgaacagttctgtttactgatgtaaccaagtcccaagaaaagtgtgtggcacatagtaggttgtcaataagcatttgttgaattgaatggaccacacatatatgtacacatacatgcagatgcacatgcatgcatacctacacacacacgaacacacactttacctgagtacagaataactccaaaaagtatgtaagaaattgtgtttgactttgagaagaaagactaaagaagggaagatcagaagcatgcagaaatacaggaagtcttatttgccaatgtttaccctattatatgttattactttctttctccctccttccctccctctctcagtgtaatccattatagtagccactagccactcatagctaatgagcacttgaaacacgctagtccacatcaaaatgaactgtaaaatacacaccaaattttgaagaataatataaagaaagcaaaataccttactaataatttttatgtggattgcatggtaaaattatactatttgcaatatactggtataataaaatacatcattagagttaatttcacctgtttcttttggcattttaaaaggtggctacagtagaatatacaatcatatatgcagcttgaatttgtgatttgtattatatttctattgaacaataaaacgatctctccaaaaagaaattttacacacacacacacagacatattattaaaagtggcaaaaagactctgaagttagatagataggcagtcatgaactaaaaaccagctttgcttttacttaacttctctgagccttagtttcctttgccagtaaatggggatatgatcccctacaatattatagtggaaattaaaggagataaatgcatataagatacttgctacataaacgtaaaccatataatggtacagtgctggatttgtttctagaggaaatagtgtataaagctactataaaaccatgagccctaccaccaagcaagcagtaagacagtgtcgtttttctgcatgtttgtgtagcccgtgttacctatgacaaaaaaagaatgtaaagacaccctataaagaaacaaatcttgcacagaaaaacacaaactggagtcaaatgaagaaatgaataatttaattttcagtgtagtgctggaggtgctccaatctatgacatttctatatgtaaacagtctgatatattcgatacgtgcaaaattgctcagtagtaaaaactttagtagacataggaaagggaaaggggaatcaatggaaagctgtggagcttgtaccaacactgtccagatgtgacaggtgatcaagatacgaaggagaagtctgaactgacctcacctctagccaaaatttgaaaatgtgaggaagaactctatcccgttaatgtgagattaagagaagaacacattagctggccacatagctttgggagcacttttccccaaaaagagaaattcaaagaaaagatggagaaatcagaaaaccggctcaataaagatgaagtgctatacttcaggaaaatgtctttgttaacatataatttcaaggagaaaaactgaaatcagatttaagttgcccaaggacaatttgtctttcctattccaggtcaatatggcaggttttcaaattaagctggactttactatctgacaaaccacaagacatcaaacagaataataagaacctcttgaaaataaaaatcatgtgtaatgtagtgtagcatttattttagtggctgaatttattttaatggctttagaaatgattttagttctgtattcaaaaaaaaccattaagagtcacttaaatttttcagttacactttactgcattttatggggtagattttatgttataatactggtgaatttgtggatacaagaagaccttctgggcatattcctcatgaatgtcacacgtttattgtatcaaagaatattaaacatggaaacacttcttagtaagctgaggttcacaagacaaagcagcttagagatcataatgatagttatcatacaatcgggaaacctggattagtcattcacttttcattcgttcattcaacctactaatatttattgaacatctgtgtaacaggtactgggaatacagtgttgaacaagacagacaacattccatacataatagtgttttggggggacccagtaaacaagtaatatcacataatatgtgcagtagtgaaaataaaatggaataatgtggtagagaatgatggggaagctactgtagacaggaaggtcaagtctgaggacatggcatttaaaatgatatttgcatattaagaagtggtcagccacatgactatattcaggaagtacattccaattgaaaggccctaaagcaaagttaaagaacataaaaattagtgtggtgaatgtatcaggaggcagggaaggagcgggagatatggagtgggatttcatttggggtgtacttgggtaagatgttggtggtagtggcagcataatttgaggttttcccaagtccccacataaaaacagagcaactagttggtcaaaaccctaaggacaacacatacatcaaacccggagatgatgtatctcacaaactccaaattataagcaagtgaggacaagctaccaagaagagcaggaatcagtgtttgtgcaagagaaagcagagagaagcaagcaggcatctgatggatgcgggaacaggagaacctccaaatagtcagcaggtgttcactagagagtgttacatgccagtttggtaacagtggttgaaaatacccaagtcaaagccagtgagggctatgggctcacggcaagacccaaggggccatgtctgtagcagtcttgcccctgtgaactcttgaatctgaccaggtgggctcccttccaggacaggaccccatattgaggagaaactgctgggagtggaatcaaaattaatcaggacaggaacaacagcaatggaggaaagagaagatccagatgaaaggaaaggcatactttccaaagcagcatcccacaatgtctcccatgtactgtttacagtgtcaccttgacacctttcccattgagtgatgaggtctatatcctctccctttgaatctgggctgaattttgggacttgatcaacagaggatggcaaaagtgtctttatgtgacttttaaggccagatcataaaaatgccatgcactgccgctttgccctcttggaatactctatcttggaacccagctgtcatactgtgagaaagctcaaactagcccatgcagagaagccacatgtaggtattctggctcaactagaatacctgcatgtgctagaatacctacagttgagctgaggtttcagctaacactaagctgaggcccaagacagcgtggagcaggcaaactgtctgctgtgctccatctgaatccctgacccataaaggccaagagcatgataaaatgattattgttcaccactgagttctaggggagtttgttacccagcaggtaacggcgataccacagttttaattaaatattctgtctcgtggtaacatttataaggtacacttactttaaaagttgtcttaatttttggtaaattataaaacaaactcaatcccagtggaagggttcccctttcaaaagagtagcttaattgattggggtagcacaatcaattttcccttgctttcaatggcatctcttgctagaaaatgcttcaaaaactgtgccaggggaagtctgtttttgtttttccaaatgaagcagtgaggcttatttaggtatctttctttctgtcctttttaaagtaacttatttgcaaatggtagaaattgattaagtagaatgaccacataatttatcatccaaactagaaaaaatcatcaaaacagctttattgagatacagttcatataccaaaaaaattacccaagcaaagtatacacaatgttttcttattacactcatagagttctgcaaacatctccacaatctaattttagaatttttttcatctccctctaacctaggacaaattgaaaatgaaaggagcactaataataattatgcaagaacaataggtatgaatttggtatatccagagtctgtccaaggcaaactgaagtgaagcatcactgaggtagaagatacaggtattggagagaaagctgtataacttaattcaaaataggaggctgcatgaaggttttaaaacagataatcagaaaccttcttaggtaggggaagggtgtataaattggtatagccatttttgaaaactatttggcaatatctatcaaagctgaacatatgcatgtactatatgacctagcaattccactccaaaatataccaatggaaatgactactaaccgtatgatgatttcatttatataaacttcaaaaacatgcaaaagtaatctataacattacattccagatcaggatggtggttaaccttggataagaattagtgactagaaggagaggcataaagggaattttgaggtgctggctaatgttctacttcttgatctggatgctggtacatggttatgttcacttcttaaaaattcattaagttgtacacttagaatctgtgcactttttatataaatgttacacttcaataaaaatcctatatagaaatgaacaggtttgtgtttgataaagagatattaggaattcggattgagatcggattttcaagccctcccaattaacagaaagctatcttaaagaaagcaattaagagcagttagtgttcacacagtagcaagtggttgttaattttcttcttaacacctttctctggaactggaggcaatgaagttcctggggaaatagaagtggtgaaaaacaaaaggtctttccctgacataaaggaatgtttaagtaaagactgaaataattaactaccaattagaaacggagggggctttttgttttagtttgagtttttaaatgcttctgctaaccagaatagtattttagaattggaagtaattttcaagatcatgcaatcaatttctttcacttctggttatggaaactaagattcagagaactgatatgatagccccaaattgcataggtagttagtgacaaagctgggatcagaacccagtactcttgactcatgaaagatttttcctatttacaaaggtagttactcttactgcttgctatgtaacaatctctgcctaagttttcctattgctctcctctccacaagagatgatagataggtataacagttatctccattttacagagaaggaaactgaagatggttagagaagttaacatactttgacaaaattaaaaatcagttaagtagagatgccaggattctgatcatttctcactctggagtctgagattttaaccaaggggcaatactgcttctttgaattaatagtgcattgccatatttctcagctgaaaggcaaatgagtaaaggtacttttttttttttaagacactctgtcacccaggctggagtgcagtggcacaattttggcccactgcaacctctgcctcccgggttcaagcaattcttatgcctcagctacctgagtagctaggattacaggcatgcattaccacacttggctactttttgtactgttttagtagagacatgtgttttgccatgttggccaggctggtcttgaactcctggcctcatgtgattggcccatctcagcctaccaaagtgtttggattacaggcgtgagccaccatgcctggccacattgtttcttgattattataatgtcatggggaaaaaaagtgcatagtttgtttctgtgtcacagtccagttctcatttattcatatctgagaaaaatacatccatttgacaatggctaaccagtggcacccgcattttcctcttggcagcaacttataagtgaggtggctgtgcttaaaggtctaggagttaatcaacactcagagagatgatcttgcaaacatgacatgctttaatgatacatctttatttccttggcaatgttcttaacaacatttgataagcagggttaaaaattcatggccaacacatcgattttacagttttcttcttaagtatccacagatatttaagataaggtattctaaatagagtctaggtaaccacttataccttaaagtgctaaaaaaatactagttttgagttcaatactatctcaagtattgaactcaagtttgagttcaatatgaaaaaattcagataagaaattatatttggcaaaagacagcttgcgttaagatttgattttcctcacattctttctaaatatctaacctgtagtagaactgagacatttaagaagtgcaggctcattcatcatgcattgcaaaatgcatttcctttcaattcattcatattgtaagactatcaaggttaacagaagaacaaaaatggtatttactttccatataatcgtcataattttaaacttatataattaagaacagagggacagcagggaaaatggacgagaaggcctccaatttaagccaatatttcctctaatttttttttaagttgtaagtagataactatgttacatgaaaagtaaaataggaggattgagcataaatgatcactttatccagctataccccaaggatgataaatacgtggcctactttcactcccacagcagacatcactaattgatagggcctgctttcccaacaaacacagattcctctgacctcagaatttcccaatagtaacattgattatctattatttgcacagcactgtactaacctcttcacatgcatcatttcatttttataacctcacaatatcctaatgaggtaggtaatattatattctcttttagagatgtggacactgagaatcaggagttagttagcttaacagttggcaggggctgagtggcattgaaagccagactcattttaatccaatgtccatgctcgtaatgactaccctctaaagccagcttccaccagttgactgcagttagcacctaatctatttgctatcctaatttttatgtttacattcctgctatagcatcactaaccatggtcacaggaaagatgttactgctttcaggaaaaaaaaatcttttttaaaaactactccctggtcttagctttgtttttaagagtcacacaaagcatactcatgggttacgcatgttagcactattgtacctccaacctcctctctgttatttttctataaagtctcgtcttgaacagaatagacaccttctgttctttcagtcaggccatatgcacctttcatatgtctagtcattcttctctggcagtgcttcagtttgtccacatctccctgaagcaaataacatgttgcctgtgaggtctgaccagcccagagtacagtaggactaccactaccttccgtgttctggctctctttcttatcacatctgaaagctgatttttaaatcaatttcatactccactgacttgtactgaataatattttactaggtcaccataggccttgaactccaaataaaaaggtagatataagaagagggaagtagaaaaaagttaagagctacttgaagaaaaaaggttgagggccaggcatggtggctcatgcctgtaatcccagcactttgggaggctgaggtgggcagatcgcttgagctcaggagttcaagaccagcctgggcaacatggtgaaaccctgactcttccaagaatttaacatacatacatacatacatacatacatacatacatacatatatatatatatatatattagttgggcatggtagcactttcctatagtcccagctgctcacgaggctgacacagggggatcacttcagcctgggggatggaagctgtggtgagctctgattgtgccactgcactccagccttggcaacacagcaagaccctgtctcaaaaagaaaaaggttgaggcgatggaaatatttcgggtgggagaggctgcaagttccccatatcaaaatgtgtccttttatttaagtagaatatacttagccaaatgtagtaaagtgacccaatccaaaattctctcttactctgcctgaaattccatcatttagagattcatttgggttaataagcaaaaacaaataaaataaagccaaacaaaacaaaaacttcattaataataacttggattatcagacaatcacacacttaagtaacctttaaaaggaaagcagggctgggcatggtggctcacacctataatctcagcactttgggaggctgaggtgggaggattgcttgaggccaggagtttgagaccagcctgggcaaaatagagagactccaactctacaaaaaaatttaaaaattagccgggcatggtggcatgcaccaatagtcccagctattcaggaggctgaggtgggaggattgcttgagcccaggagatggaggctacagtgagatatgactgcaccactgtactctagcctgggtgacaaagcaagatcctgtcacacaaaaaaataaaaataaagcaatttggtttagcaagtgacactaagtttttgtattgaaattatagctttttgaatggaataagggttgaggaaaaggtgaagacgactaggaatttggagttgggggtagaaaatcaaaatcattctgctagatggatatgacaaccacattttgcaaaataaaaatcaatacacatggtcagatagaggaaagaggaatttggattggcacagtggccacacacatgagatgcatggataccacagaactttgttggtggacagacctggagggaacagcaccgtgtcttacagcaaactgcaagacagcagcagggctggggacagcttcaggaggcaacttcaccttcatggccattcaacctgagactagttaggctgttgctttctcttcctccccaacccaaaccatgtatctctggtctcatcctcagacactgactatggtctgcttttcccagcagcccccagtgctttacccagtatctactggtgagcactcaagggtgaatgttgctggaacaccaaatactctgcctgggaggtgctgcagctggagggagaatgatgagagccttggtctattggctctccagacatactgactcccaagggtcctcacatgactaggaaggggagaagccaacagtcattatcgagaggagccttgagcaacacccagtttatatgggactgcagggtggaaaacagcactaaggcttaacaaatgatctttgcttttgccactgacctaatacaatataatttaatcttaagaaccatgtaataattctattttctctctgaaaaagaaccacagctgaccctcaggtctaatccttttgatacctgaaagtgggggtgcagagtgggcgctggagaggaaggagaagaaatccaaaacaaaacaacaagccagctgctataaagctgtgactacagcttatgaggtttaaatttacgcacaagtaaccttggatacctagtatttgacccctaaatggccccagctgagcccaattactatctgtgcacacacatctgtgttttctgtaagtcaacacagtaataaggctttgttttcattctaaagctccagacagatgaactgaattcagtcctggggatgtgttctactaacaattaaaggttacacagaaagtttaggacgtttgtttccagaagacacactcatattgcaaaactgtggcttagcttttgctattgattttaaacaatatttagcaaaaattcttactgaggaggagaattctcttcccatttctgccatcaaaagaagatgttatcctgtacatctttaagtccaccagtgctatgagttgaatgtctgtgtcttccactgtgccccctcccctgcaaattcatatgctgaaatcctaaaccctaaggtgatgatggtattaagaagtgaagccttggggaggtgattagatcatgagggcagggcacagcttcatggatgggatcagtgcccttataaaagtgatcccagagtgttgccttgttccttctgtcatgtaaggacacagctagaaggcaccatctatgagcaacagaccctcacccaacaccgaatctacctgtgccttgatcttggaatgcccaagctccagaactatgagaaatacatttctgttgtctataaggtacccagtctatagtattttgttacagcagcctgaatgaactaagataccccccaaaagcaaactgtatgagttagaacaggtagggacttaaagagtgacagaagggtgccgtgggccttagtgatctgcctaccatcagccaaggcgccttattgtggtcacagcacctcaaggtttactttcctccactctgagttcatatgatttagattttggcttctgtcactttctccgggttccaggggtggggaagtgacccaggattggtcaactggagtatttcacacacccctgccataggggtggtcatggggcacaagacagattgatagaatccattcaagactatttagaaagcaaagttgagtgccaatggagaacagaacagaattctgctgcacctactatcgggacaacactgagactcttttttgttaaatacaaaaaacacaaaaataaaatacttttttttttttttaagctaaagccagtttgagctgcacttctgtagctttcccttaaaaagtctggacacagttgaggtcagtctgctggaattttatttctttgagtttactatggttgaacaataatatttaacatgaataaggtaggcagtattcggatggcccaaatgattgagacctcctagtatcctcctagtgttgaatactagggagatgtaatcccttcctcatgagtatagactggacctaatgactctcttctaatgaacagaaggctacagtgatgagatgtcacttctgaaattaaatttaaaaaaaaaaactgtgttttttttgtcttgcatgccctttcttgctctctctggcccacctattctaagagtgaccagttgccttgtttgagctgctcagtggagaggggcatttgccgggagaaaaagccctcacaaaactggtatctccatacaatagccatctagaacttggatcctgcctgcagctacgttggtgagcttagaagggatccctccccattccagccgagagatgattgtagccccagcctatactttggtcacagccttctgagagaccatgaacccgagtatccagctaagctgcaccagtattcctgatccacagaaactatgagagaagaaatgtttgtttttttaagctgccaaattttggggtaatttgtcatgcagcaaaagataactgatagaaaggaattaaacttaaatagattaacaataaaatacttatcctttgcctttgtgttatgttttccaagacaactctcaattactttatttttaggactttaaaatgcaatttcagtatattcaaggtcacagcataattctattaggttgacagaatatagtatttgagtagtaaaattctttacaaaaaggctcacacttgaaattccattctagtttagatgaatctgttttacaaatacacattgagaacctgcaatgttctaggcacaggagaattaagtcggatgggcagcttgtttcaaagagctctaagtccattcaggagaggagaaaatcccataagatttggaaataagtgaatcaggaggaatgccagtattcactagttgtgtgacactggataagccatttaaattttcagtgcttttgttttctcatctataaaatgaggaataacagtaacaacagctaatttatcaacttataagatggctagaaagaccaaaaaggacaatgtatgttatagcattgtaaaattttaaaataatataaaattataattattgcaatggttattaccaaaactataatatacaaactttgctgtacaaatagataatggtccataattaatttgctgtttactgtcatgtaaaaaattttttccattaactatttaaacatgtccttaaatttgaaatttgtattctaaacatagctgttttgatcactcttttcaaaaccatgcaatccgaattacttctcccttgaatataaaactctcatactttcatcttaatttattctctgtgacaagatagttacagtaattgtttacagaaaaactgaatgaaaattacaaggaacatgcaaattctaatcattttgattagaccaattaataacttttataagcagaaaagtttctatcttataaaaaggagaaaaaattttatttgatgttaaatttaaagtgtttagagctaccatttagaatccattaaatgttatcattacttctattgccttctccactaagctttaatataatttgtgattcattagatcaacattttgaggtcactgaaaaacactttattttcaatatgccactgtacttaaatttataattctagtccaaacagcagatcccttaataaaaatgcaccagcaagaataactgatttcattttagggaaaagatatcaacaataaactgctttggactgcgcaatcaatggttattgaattctggactccaagctaatatttccagctacataggtccttcagactcaagttgcccactttgcttttaatgaacaaggtcagaatcatgaatataagtactatgacaggaacagaatactttacctcaaaaaattttagccttgaggcatcgtaaactgtcaagtatctttccagtaggcctaaatattaatatacactttaaagttggagatagatctgtcccttgaaatccactattctagttgtctacagtttggtgtgaaataaaataaaattaaacatttattaagctctaactatggactaccccgggtgcagagggaatacaaagatgaagtataaagtagatgaaatagataaaatataatagaaaacttagataacgtaaggaatgagaaatgaattcaaggttcctagtttttagaggataatgcctttatagctaaaagagagaagaaaggtactgggaacatatttgggtaggagctaaggtattgagttcagtttaggaaaagtcaaaatctgaggtaatgcaccacccagaagacagttggaaagatagatccagagctcatttgtgacatctaaattacaaaacgagggaggcggagatagcccaggaagaattcagagagttagaagggccagtgctgaaccccagagttaaggggaaggagcgggaggaaggagaaggtatcaaagagaggctggaggactggaaagaagatgggtcacagaagccaagacaggaaagactcaaagaccaaaatgatgactggtacagttgctacaggaagctcaacgaagttaagaaagtcttaaagaccactaaatttggaataaggtgatcgctggtgatctctgctgaatccttttcagtagaatggcaggtgcagaatccagagggccacaaggcatcgctcaatcactctaagtgaaccaggcatctgctttgtgttttggggacaggaaagtacgtgctgcatagtggaagtttttgtaaaagatatttggaaggtgggagaagcagagtcaagtaaactaagaagtagcctctatcttcagttcagagtgtgtttccggatgggaggagcagactgggacttcagaagagaggtgcgatttgggaataattgcttagggaaagggaaagagagtggctggagataaagacaaaagattgatgactagtgttgagaaaccagctgaggctggaactcataaatctgtaatgtagccaaccaccatggttatacagtttttttcttccagtaatgtcagtagcaggagtgaagaccacagatggtttgatggagctaaggttgagcattggcagggttgtaaggatgaagtctcgaggagaaacaaatacttgaggggcctggtatcaggcctggtatcagggaactgaatacctaatcaaagaataactcaacaatactcttttttgatgtccttaatattagatatgtattatttcagcttttggggtacaagtggtttttagttacacagctgagttgtatactggtgctgagattttaatgcacctgtcacccgaatagtgtacattgtacccaatatgtagttttctatccctcattccccttaccctccctgcttctgagtctccagtgtccattgtaccactccgtatgtctttgcttagctcccactcaaaaatgggaacatgcagcatttgatttgccattcctgagttagagaagtcaacaatgttctcacatgtggggatgactggtagggaattgaagggcctggaaagtttaacattctggatttctcatgagaaagaggtgggaaaatgagattttatgaaacttttgaggagaaaaatagatacaaaaatagagaaagaacctgataaatgtaagagctaccaaatacgcttaacaaagcaaaagaactgatttggagcttttagaaatgatacactttactacgacttttctctacaaagcttaatatttgcactttgttcataacatcaaacaactccaaatcatatcagaccatttctttcttttttcttttttgcagtgcagtagcatgatcatggctcactacagccttgacctcctgggctcaagtgatccttctgcctcagtgtccacacccccttctcccaagtagctgggattacaggaacgcaccactatgactggctaattttaaaattttttgtaggagctgggcatggtggctcacacctgtaatcacagcactttgggaggccgaggggtgagcttgagttcaggagttcaagaacagcctgggcaatatggcaaaaccccatatctacaaaataaaataatttaaaaagtaaatttttcatagaggcagagtctccttatgttgcccaggctatatgggactatctctgaggtttgctattacaactcaaactaagagatctctgtctcatttaaataaaatattgcaatttctgattgaggaacactcaactttacaaagtaaaaactaaaaagtaaaaaacaaaaccttctaaatgaaaagaaaacatacctaattgtctgagaaaattacaacactccaagtagaacactttaacaaagccaagctcaaactggataacataaattacataacttgacactaagagttccctgaccactgttgccaataatccaaataatattcactaaaaatgcatatattttatagtaaataattttactctctttgagaaatatttcctatcagtaaatttgatatgtaagtatttactttattcatggaagaggagaatatgattcatgtgtgacttagcaatagaaaatataaataaataaaactagttcctatatagttttccaattctcatgaattctagatttatttggaattcctcagagaactctctgatcttatgaaagttttatacccacattcacatttttgtttatatagatgcattggttttttactgttccacttttcacaatttgagttctaggtattacagacacaaaatgcattcatattcaaatattgtgatggctggacatgacacaggacaatgtcacagccctcctgctcttgtactacgttgctgagggattatacacaaagctgagtcaaggtcccaactctaaactggatctgtttgctcaccttggtgataaattttcttccagtccaagtatgctgtgaattacatacatcagtccctaatttcagattcagtgggaaaaaaaacaacaacaacaaagtcacactagagtgtaaggtaaattctcctattcaaagtataattgaatacaaaataattgaatgaacgtactgagaagaacattcacctcattacaaaaatggttagtcataacagcatgttgcgtttgctgctttttctccttttggagccgtggaattatatccaagctgactcaggagtttatcaacccatcacgaggatggaggctgccatcatgaaggcacagttgactggcagcatggggaaggatggcacacagcactgcagttgggagctgggatattcctgccatggctctcagcacatagtagtgcttaatgcatattggctgataatagctaacataccgacaattgtgtaacattgagaaaattaagctcatttggctcaagttttatctggaaaataaagataatagtattagtctcatggagttgtgtggattaaatgagctaatgcacataaattacgaagcatagggcctagcatgcactgatctcaggagatcaagcataataaacttcgtagcatgtgttgaaaagaaaaaggtaggtctataagaatcttataaagtataaacactgctttccccttctattttccttgcatttggattctcaaaacatctgttgcaggagctgtgttttcctgtgctacacagagtagtagatggagaggaatagcatcggaatcattgatatggcaaactaagattcttacagccagagtatggttttctaaacttcctaatcatttcaaatacacgaatagtgactacaaagtaatgagataggtttctgtgggtggcttatgggaatcagtcttcttcacagctttttaagacagaaacatctatagatggtccaggcactgtcttagatgctggaatacaaagatgaggatatggcactcacaaaaggacactgtatgtaagtaatcacaaaacgatggagtaattgggggtgccattcacatacacaggggctccagggctaacccttgggagagtgagcagggttgtgggaaatttcacatgaaggcagtgtttgaagcaatgggaagtgtatgggggaggatacgattaaaaatacaccaagttcacagacttaaatacttacgttacttctattctgagctgtgtaatcttgagttagacattttctctctttaagccttaaacaattactgagcaaattactctgttgttagagatattaaatttatgtaaaatcagagggctggattggaagatcccaacagttcttaggtttaaaattccttttatgcctgatcatcttccaaatagtgctaaaaacaccattacacagaagatttggaatttttaagaataaaagagagaggtgtttgttcctataaatcatgaaaacttggcattggtagataaaaccagccataaataacagttttaaggtgatggggattccccaattctacttcaataatgaaagaccactgtaaatccataaagtggaaatttacaaccaactgctgagcacccgtacatctcaccctaaattttaacagctgttcccctaaaagtgatcacgattataagcagggtgaaatgtactgagcaaagtttttaaaggtataagttcatattcatgtcttcaaaatacttgcagaagttaattttttgcaggcagattacagtttacaaaaacaagtattaaccagagctgtaatcatttgtaaaactttccactacagcaatttgttaacctatatccaatttttagaatcagcaaggatgccactgttggcgtcacattccatattgcttacatttgacatgtgcctagttttatctcaaaaatggggcttcacaaatcaaatgttattttctgcacctgaaaattcaggaaccacatactactgccagcagaagcacaatgtgaaaacataagaccagcttagcagtaatcaaaagcacctgttttcacaaaatgtttgccactgttctgaaactacacataaattttaagtttgttggctagactcaatcgtgaaaagcagttcagataattatcagaaaacaggaatttcatcttacattaaatttatttttaaacataaaagtccaatcctctgaatcatatttaacacatagtaagttatgtagaaaataacttattccaacaagcaacatacaattccctgtttatctattgatagtaacataatctacaatagcaatataaagggtctaattctccacaaagcacagaagatggtgatgctgtgggctgtaacctgaaagaccctgtacaactttgtgcactttctggaaataatttctttgacatataatctttccttggacatacaaaagccattaagaatctttataatggagtgcacttgaaagactagggagaagcataaaataattttgttctacagaaaacaaacaacgactataaagcaatcatacattttagtatcctctgatgacatggtaagtgtacttttagcttaagaatcatgctcaatggatgtttaggatccaaatacagagaagattatgacacacttactaacactattctacagacagagcaaaccatcttttcatacccccaaatcaccacccccactttagacaatccctaactttgcaatagtatactaacagaagactcctctatgtgaatagcaacagcagtcctgcaaaataaaggttttctccagtaactatgtcccctttggccacagtcgtcttttacctgttagtgacatattgcaaaaagactttatgattaggcctggttttaaatctacatttttcctattctgagtgcattattcctaggaaaaaatggattcggaattaaaaaaaaaaactgatttaacaaatgaatgtcaaagaaacaagccatccagaagatggcaagggaagtactgtattagaatgaatacacttttatctctggaggctttatgccccagcctcctatccagattatacaatgactccatctcttcaatcagggtcatcccaacatcctgttctccaagaaggaacactgtatctcaaacgctcacccttctcaacacctccaccactccatcccaaaactttgatctggttttcttcattgtacttgccactagtttttctgttttctttttagcttgctgactccactagggcaaggacctcctctgtcttctgtaccacggtatctccagcatgtagaatgactcttgacacgtgcatcatcaagtaattgctgaatgaataaaaatggtgggatgcttaccacaaatacaatcttcctattcttgaaagaataaagatggtaagaagaaaattcaagcattatattttattatttacaatattattaattatgaataacttatttagtcacaatctcatactattttgagccagttcaaataatttctaaaacagaggtcttcaaaggtttggatatcaactgaaattcagctcagtttctacatatctataaacctacttgctgacgtttagtttaaatctacagatccaaataactcagtcccatggttggatgtttcagaaaagctttttggttgtaagattatgtaatagttagtgagatagtggggtagaattctaacacttcaaattttaaaaagcagattaaaaattctattatattctaatacaccactaggcatgtttccatctggcatcatggtgaatgatctggtgagaggtacatggggaagttgtgtgttccctctaaaacaagacttaactctctaaatgaaaagtaagggcaaagaatgttaaatgcactgcagttatgctgctaagcggaacgtcatctgtccaaatttgcccactagctatccccttcttccagctgtttgggatgtatgctgccctggggagacacagctctactgactacacctgccagtgattcctctctctctggggtcttcagcactctccactgggatttagaaccccattttacaaataggaaactgaagaagcatactgacccaggtgattcatccaaagtcacatagttttttagtcccattaagagaattatattttgggaggatgggaacttttatggaaagaatatagtttccatcggtggcatttattactatcaaatgaaaataactaaagaatcatattttccaaataagagcttaccaacactatcaaacttgaaactagctgatctgagttccaatctgagttctggtcctttctaattctctaacctagagaccttaaggactggaattagtgaatacaaccctgagaggagcctcttgatccttcatgtctgtctcctttggatgtgggcttgattccctcccagtccagaatggtttctccatgagcacagtgcactgagttgaatttgcaaactctcacaggagcattctgattgacctagctgtttatgaacagacaaatcactaaagactaaaacgtggtagttttctataattgtaacccaaattatcacagttttgatcaatcaataatgacagaactgaaggagaaacaggagcattttaaatatgaacattgctcttccaaggggaatgaaaaaggagttttaaggcagacaaatgatgaccactacatcatgcaaacagaaagcactagaatatgctttttattaaataaatagaagccttggtgatcttgtagaaatcaacaaaaaataagtagaaaacaagaaataaaaattaccacatggatgtgggcccaatacagagctcttctgtgtttgtatagttaaaacagaaatagcattgaaggaattactcacctccacatgccatatgttacatccgtgaaagagtaatgtgaataaaaaggaggcatgaaatcttattgcacattaaattcaatagagtctatgtttatttgggtcaagatatagattttgaacacatattgtatttcttgaaataagccagcaacttaacatataacttacaatgtatttaaaggaggcataggtttattcagtaacttgccttgtctggaaatgaacatgttcacattggaacgatttaaatgaaagctggatgtccatatagctgggatattgaagaaggaccttctatttcagatagcatgccgtactaactggactccgaagtccctcctaactctaatactgtttgaaataattatgccattttaagtcccctgaaataatattcactgatgaaggtagctatatttgcaaaccacagagcaaatgacaggtgacacagaaaatcacctatggtttttgagccaccgacaatcactttaattaacatcatctgtaaatataatatcatattaatttgacttgcagtattaaatcaggagtttgtttttgttcaggagtttaagataagatggcctactgttcaaaaaaataaagccacctatcagggaactaagtagttacaatttatatgtagatgatcctggaccttaaatatcatcagaaggctcatcagtgagctaaaacaaaagtggggatgagaggtgaaggaccagacccaataagggagtctggctgctattcccagttccacgacaatcagtggggactccgtaagttgattaacttgtttgtatatgttactttatctaaaaatatactcaggttgacaaagtagattctaaggtccctttcaactttagtatttctttattccatatagaaaaaaatatagcttgagacaagaaagttggtcatacaaaataaccagcccatggaacatgatagccaatcaattttcaacaagacaaatatactatagatggaaagcaattcttagggaagaaaaataagcagtatagtcataaaacaagcaagtttgccctatttctttataattgatgtttcttctaattcattcgggattttttgagttaaactaaatacagctaaggcttgaatcattcaggatttcacatccaagacctgtcagtctgatgatcccactatttttaacatagaaataaatggcttctatgcttgtaagcactagagaagtaaggacagcctatgaaatgtgcttccctctctccttccttttcccctccccagttccttcctcttccctgtcatcccccacagactgaggaaggcaagactccctttgattatgtgttcagctcttgcacatatttctgcacaaatcaggcatctttccaaagtatatgtcagagttctcactctagccttgtggcacacttatcaagaaagaaagtcctaattagacgtcagtttcctgaagcagagagggtgtggttacatgaatttaccaaagggggaaaactctaaaggaaccagtaagaataaattacttatctaatcacccacaccacagcctaaaaattatcattctacaaataccactgtcaatattgtttttcctctaagaagaacaatgcatcgtgtttttcaatgacatgaaagaaagtgaagcacccttttaaaatacgatttgaatatctaaggcactttaaagcctgaattgcctaactaggaattgtaaatgcatacaatgcatcataaaataatttagctaacaatgatttcatacacacacatcacaattactgctgaatatctattagaataggcaaacaacaacaacaaaacaacaaatgaaataatttgtacatacaaatgacccttttattcagaaggtctaagccatattcatgttcctccctctctccagtttccctgaaatgaccccagtaagaaaagttaattggtcactaatgactgccctgagagctttcccagacagcttttcttcaatctaggagagtcaggaagaccaagaacagcagttaccatggaggagtcccactcctaattccatactattacacaggtgtataagatgctagcgctgtacatgagagtggctcacatacctctattcataagagagaaacaaattcttctttctcaagtaattcagctgcatggacagcaagaggtcaggattgttatgtataagcacagtgttaagagattgcttctttaatatacattatctgtcttatagctggaatattatccggtgtggctaaataaaaatacacatgacaatagaatcagacattttatttttgtatgacacatgaattaacatatgacctgccagagcctataaaaagacattaccataacacagtatttagcgaaaaacaaaaacaccaaacataaaaaaatggaatgttagggtccttttctagctcttcactacattcaagtttatgacagttttgtaatcaaagcaagtttttctcaaggaaaaataccaaatgaatcatctttgtgagaatttcaaaaagtaaatggtgcttcttggtggatacgattaaataaaaaatgcagtctcggatttacaaacatcttcagaatttcaaaggtttatcaaaattctccaacactacttaatattcagtgatagattatgaccctaaagtaacaggaattctccccactgagcattcctgtcagaaaaacaattccctcaggatatttaggtgatttctttttgccttgaataccaatgaaaattctccagtcaatacctttacctaaattgttttggaaatcaagcaaagttcaaaatatatacaatatagttctataactgggaaaagctttagggacaaagccaccttgtatcacattttaaaagactaaaacccagaaatgtttggtgacttacccaaagcatgcgtctgtctagtttatttaaactctaactctagaattatgaaggatagatgagtgatgaaagcagtttttaaaaaaatcaaacatggccatctcatgtacattgacatacatcaagtcaatataaagtcagaggagatttaaaatcattctatcatcattgtcactgctaaaactgagttttgatggaatttcagaaaagtcatctattattaaaataacttcttttccatagcatttcaccctatggacattttaattcagactctggcatttaacaagattataagtgatgctgtatttaagatgaaggaatgggtggtgaaattctaaatcagaacccacaatagaagagacattaggataaaattaaatatcagaactggaaaatgtactacagggaggacagacttggagaattttctgggaggttctttttagctgactatttcattattacacatacaaagttcttgtggcaatcttctctaaaggaaaaactgacaagacagagggttaagtttctttcaagaagtaaacactctagggagaaaaagaagaatgacacttctggttcatcaatagcatcattaagatgtgaacatcatcagtaaattccaccacgttttcagccttaatgtagatagtttttctaagccgtctcgagaaacacatggggtataaacgtttaaattatgccaaaaactaattaaaacagatatgttgtagatgtaattgaatgcaaccatattacccatttgagaggactggttttaaggtcggtctcactctttaatgcttttctacagctctaagatgtaagtggatgtctcccctacccaattcagagaagccctgaaaccgaagccaaaagatgcactgagaagtcattgtattatatgacttatcttctttaaaagccctggctatttgacatttgatgaaatgccaaatcccaagtgcctgagtccactctgacacattctgtttattatgtagtagtttcaagttggggacccaatttgcaactaactccacaagttatatattacataatgggtatgttctgataaatcacaggaaaaacatgtcagtttcatatctaaaggaaatgacttttgatatttaacatcttatccttagcatggccttgacaaatgagataaaacgtgattctctttgagttatttcacttaatgtataaagactacttactatcttcattatataattgtcctaactctagtttgggaatatttcttagatacctccatatatagttcttcttgtcaagacattttataaacttacagagtaattctattgtttttaaattcttaccaaagctagtagtatgcaggcatttgagaaatattgttcaattctgtttctacaaacatatatcatggtacaaacctgagatggtatgaatctgactcagtatatattgactgcaaaaaatctgtacaatgtctaccagtctaattaaaagttcataagctccttttattcagtttctgagttttcagaattacacatgcaatctgacaatattttttgatgtgacataaattttagttaaattctaggatatagtacggaaacaaaatttaggaaacagagtgtcactctatcagaacacattattcatgtgcacacatttaaaagagaaacatctctaaaaccccgaggttactcaggtaaaagcaatacagccacattattcaagcaaatatcaaataattacaattttacattcttgtattattgccaccacatgaattttcaaccctcagtcttcatcaatcgcaacagaatttctagcatttagaaggaattctcatggctttcaataccacagaaattgggatttaaattatttattagttaatgctcagagtttataagtgggatgcattcatgattagacatcaaaagaccagaacgaattagaattgaaatataagtttataaagatccttattgaagaagacaaataaataatttttagctttttaaaaatgtagatcatacataactgtcatcttcccccatttggggcacatcataaactcagtgatctctgtgcatagctgctttctctctgcacccttaggcatttctgggcattttaaatctagtgggacaagtctaaaccttaccagaaacttaaagcgctgacagataaaagaaaactgctagttctcttctatttataagctaagtttcaaatgtctcaatatagacatattacggatactacaggtatcactgcttctagctgacagcaaataagaattaaccttatttaataacaaaattgtaaacatgcatcagagaaaggtacttgaacttccttgtacaaacaacacctgagattaatcacagataactgtctagaagtctgtatcaggagcattaagcattaacatcaacttgaacatgaacaattatttcttccaaatgagctagccttccctattctgaaagaaaaaggaaagcaacaactacaacagagcatattctggccacctactacgttggcttgcaacttttttgaatggcttattaaaataacataattaatttcacctaaaatattaacgatgtgtacagaccttggctggtgacactgtctagatgctattatctaatggctgttcttgcaacaaatcaagcaaaacatagcacttcagtacttacagactgctcacagagaacaccatctgagaaaccttttgcatttaagattaaggctccacacaaggtttattgttagccccagcatgcgagaaggaaccggaggatggagagaagcgcttacttcgaaaatgctctgaagcgtaataatagacatcctcatagccctcgtggtaatcctcttctggtcggtactttttcccctttcttctcctagatcttcttatcgccttgacaaaacccaggaagcggtccatctcttactcaccgtgcagcgcggcacagctagcacaagagcacagcaacagcccagctgctctgcgagccggtggagcatgaatgaccaataccaaacctggaccaggacagctacccttctatctacctctgggctaccatcaacacggcgactttggccatcggaggggaaagaaaataatagcgatatgggtttaccttgacaatatttctcatttagatcaataaactgtcaaatctgtaatttttttaaaaaaaaaagaggaaaagagaaagaaaatgaaatggtaataaaagactaagagaaaaaacaaacagcaaagctttggactttaaatagcttcaaaacaaagttcaagagattcagctgaggcaagaggagtcccagcacgagaatttcactatccaatatctccatcatctcatcatcggggcgggggtataggagaagggagggccggggaaacacattagtcaatggactgaaccaaagttagagactgaactgactttcctacctgctaatccaacaccctaatcctagcccacattatctcaaaacatgtgcttgggaaacctcttgaaaagctattgttttgcaatgggcgtactgattaaccctttgtgctcccttgcatatcatattaataagcagcaaagtggtttcatccatatgcacagccctcttgctgacaggagtgtgcagtatgtgttaattggagcagcagggagaaggctcagcagctgctttcaaatgacacgtttacccactgggcattaatgtattccaatcactgtttgatttaaatattaaaatgcacttcacagagaagcttctcataggcttagtaacagcataccataatcagcaaataaaggaaactgcctggtttaagggaaaagaaatacaaataatccaactcaacttagactgaactcaaatataaacctagctcaattgttacatttttaaaaaaacatgaaagtaaatgggctaaacagcaaacaaaacttaattcttcttggtgaagacagtggaaagagaaatttcataatatgctcacatgctgttcatcctttatctctaaaaatcacaagctttaaaaaattatttttaagaaccacaatcagaaacacttcatagtagacgagagaggtactctaaagtctagagaggtcagcattaatcatgaataatttttttttctctatagcttctttcttcttcaggtctttaagcgaaagagaacttttaacaccaggaaaaatctgatttgtttacaatataattaatcaagcatgtcagcatattacctatgaaactaatgatatactgcagctccatgttcccagaaatataatttttaaaaagccttcttactgaataaagatagttcaatatctgtgtaatgtcaagtttgtaggatc

SEQ ID NO: 243 - DNA, 250934 bp, Homo sapiens
  source 1..250934: mol_type = genomic DNA
atcttgggttgttacaatcagtgaccagaccagtttccaaggcctggaaggtttattgatttctttatattctccaatgcataataactgttctctgtttctctcggcacctccctgcgacttcctggcagccctggggacagagggtttcctccttctggacagagaaggcccagagtcggcttctgaacggatatccggcccgcaggatgcagaggaggcaaaggcctcattgttctttggggcctgcctgccccgcccccagctgtaggacactcgtggcagatcccgggtgaccgaagacagcccatttccaggagtggggccttcggagcggagggagcaaggaaacggggctgagcacagacctggagtctgatgttctgagcataacactggaaggagctaagagccccaaaataaataagaccggaatttaaaaacgttaatcccacgccggcttggcgctggcctggctgttactcattaacgctccccacggcggagactccggcgactccgtctgcgtttttattacttaatctggctgggtttggctgcagggaggctcgtggatttgctggccgggtgtgctggaaggcagtttattcacagaataagcagcttcccacgctggaccctgagccccaggcgccgtccgcgtagaccccgcgccgcgcaccgcggccggcggggggcgctcgggtcgcaccgagagcagcgcgggcagccagcgccgggtcgcagccgacccgcagagcccttcgcgccctccgaggaaacaaagtgcatctttgtccgcggcccgaggcgccgcgtgggagacgctgggcaggggccaggccgggccggccgccgccgcgtgcggggaccctgggcgcgcgtcactgacccgggactcagaccctcgcgggcctggcgcggaccggaggaagcgggctgtggcgcgcggccgagctggcagccctcccactccgagcacggctcgggacccgcactggctcctgccgggccgcggcgcttcacgcgccgtcaccggggcccgtgcactccgctttccgggctggcgacggggcgggaagggggcaagcgggagcctgcgggggggtgctggggacttcggcttggctgggccgcctttgagtcgcctgtcggccgggcggtgcccgccttcgctttcggtgccgtcccggggcgggtcctcgctccgacagccgcgcgccagcccagctcagccccggcgccgcgcggccgggaggactccagctcccagcaggccccgcgccgcgagcaccgaggcaggaggcgcgcctgggccggcgcttgcgcagtgcggccgcccgagcctgctagtaccacacccccgggagggactgaggggaggcagaagcatccgaggcattaaagcatccgagggagccggaggggaggagaatggagtgacagagacacgcggagggtggggggtgggggggagcgtgttgagggaggggggaggggggacacagagggaggaagaagcggcggcggcggcggcggcggcggcggctcctctttgcagagggggaaactcttgggctgagagcaggaataatgcggtaggcaaggcgggctgctggctcccccggctccggcagcagcggcggcagcccgagcagcggcagcagcagcggcagcaccccaggcgctgacagccccgccggccggctccgttgctgaccgccgactgtcaatggagctggaaaacatcgtggccaacacggtcttgctgaaagccagggaaggtaagaggcagggccggtacgtgcccggcgcgtccgccgcgggccagggtgcgggtgtcgggtggcgtgcgggctggggctgcgcccgtgcaggatgcccgctgccggcgagtgggtcgcgagcaggacacttcggagagcggctctgcagacccttcagggttcctgccttggggctcagagaatctggacttgggctgagaaggttgcagggatttggatgctaacatatctcctagtttccagcgctcgccctgcagagcgtgccatctcggcagctgttgaaaggtcagttggaaaagcattcattcggggagcgacgagcaaacatgcacataaaatagcgtttcaagtcggcccgggatggttctgtgtgaactggtgtgtgtgttcgaggggcgggggtggaatgagcagaagccaagtctttgcctgcgcaggctgagttgatatagactattgctggaaaccatccgctgggatgtttcttagggaaatcccgtcgtgtggaaggaagccttttaaaggcaaagtcagatgttgaggaattagccttttcatagaattatcaaaggatggctgtacagaccacctagaaaataattcagtatttcaggtttttcttttctgggagtgtgataactgaaattgttagattttggctcagttaagaaaagaaaggtaagtgtgctggtgctttagatacgttttctatgcaaatcattagatttcctgcatttagctggcaggaaatattgtctaaatggagtgtgtaagatcctgagtcaaaccctaagaacgcatattttgactcttccttttgatgaaaaacagaaaaaaggggggggaggcagaaacttgggtgcttcctgaaatgattgtgttgtgtccatgtaaacatatgtatttaggaatacctggaatttatgtcgcatattttccttttttttttctggtcaagatttgagctctagtgtgcgacctttttcataaaaggggaagaggtttttccctttcacgggagaacgctttatttgatacaaggtagaaggcagactgagtaagggcttgagtttagaaggatactcggtgagcagcccatgaaaatgtcttacctgcttaatattttcattcacctactttgatgaatgaagggaagaatttctggccagcaataaaacgattcgtgtttattcagcccgttccatcaccttgtggctccctacacactgtgggggtaggtgatgcatagccttccgtgggcagcgtttcagcaactcaacccggcattcgtgtcttactttcgtcgtcacttgtcactctaaagcagccagtgggcaagaaggtttatttcagaagccccgaagggaggcagtgctttgaaaaccccagcagagtttaaaatattcaggttagtctccctcccattgcttagctttggtgggaataaatttttaggagaggcttgttacttggtgacttcaggttctaaggcctgagctgtgtgtgtgtgtgtggtttttttttttttttttttttttttttcctaacctgacatttttagtggacaggatctaggtgggtgctggtaggctctcctctgggttggggaatggtcctgaaagggaggaagcagagaaaacagccctccacctcccccgcccctctttcagcctttgcagctggccacctagtggtgggacacggttgtgtatctcaggattcgggggctgggaaagttttcactctcgctccattctgaaattatttcttgggaaatcactgggtctgatggtactggagccttgcaagtttcgctggttcctcctgttgcccagggaatctgcccccgacatttgctgctgtagatatttgtttgcctgatagatgctttttttcttccctgagcatttggttgcttcttttataatgctttgcttagagtgggcaaagtgatatcaattccacccgccccctccaaattgttctccccagtattttttcaccaacgtgaatttactgtctgatattgttgttcgttaggccaacaaattgggtttttttcccagagccttggagaagagagctgcaggctggaagcttgtgtggagtgaccgactcccattggggcagaattacagtgattgaaagtgctcaagaatgtgcctttcacttttttttttccttttaaaggctttttcaattttgctgtgagagtttggtcgtcatctcatggtgagaaaatagctcttgatgatgccttggaaatggagagggcctgcggaagcagggagagactgacacgtgaacaagaaaaattaatcatttaatggaaacctcatttacaatttgcatctctccccttctttctctcttatgcctagaggaaagccatgattttaagtgcttccagtttcttttggctgggcctttattagagacttgagcccatatatcctaattagtgtggacacttttagaaattaaagcaatttatgtttctcttctcagttctcatatatttgaatttattttactaaacttagtagttctccaaataaccatattatctaaatattcagaaatgaaatcttcagtcagtttagtgaaatatctaatataaaacagtatattaaaaaaatctgagttgtttaaaaggtttaaaaacacttcttaaagattcttgtcagtggttacagatgagaaatataattggcaaatgtgaaatttaatttagttcacttaacaaaatacaccgtaagcaatttaaaatttggctttcaagtaaaagtcacatttgtcccaaacaatagagaaacagaccttgaagaaagacaggcacactttgaaaatgctgtaaaataatttgtagttgtccatgttggtgggtaacactgggacctatcttttctttttgttttgcattaaagacagatggctcctaaattcactgtatcttcaaagtcttaccgtaataagacataatataaagtggaaagcattaatgtagcaataaaatagaaagcctgtaagtggattagagtaaaatgatggattgttagtaattagaaaatatagcaagcaagcttcatgaacacttgtgataattattttaaaataagaaaaggtagaggtatgggttcaagattttgaaccacggaaatgtattttggggcctgtttatttgtcctgggtctcatgagaaaacatcaactcgatcactcttaggaactttagattgctctcctaaaaagtgcttaaggaaaaaaagaaagaagttgagactgaattcatggcaatttatgggaatgagctaagtgattaagcatttcatgaaaaagaggcccagactaactctatctatttatttacatttcagaatctcagaaaattggcaggcgacctaatgttgaaataataatgagaaggagagtttgctgagtgccttttgtgtgtttctttttggttttattgttgcagtaaaggtttttgtgtttttctcatcttctagatctgttgcctttcttctgagtgaacagtggtgagaaaaaattttgcaaggccccgcttttcctttcttcacaggccagcagtagccatatctgatcaaaaaagatacctgaaggaatattgatcacattttcctgaggccctagcaagcacaggaattgagaagttaggactggaacaactttgtcatttgtcacaattgccaaacattagaatacacaggaaccgttttttcaggtaactctgtgacttggctggatcttcctgatcatcaagattagcacctcggggcctggaagaggttagggagggcaggaagaaggagtgagccagcatccagctctgcgtggggcaggctatggcgtggacagacttaacattccacagcacggctgaaagccctggacctctttcccttgcacccctaattcatggtgataaaaccaaaacatggtgaattaggttattagaacgttggaacatctctgaagctcaaagccctcttatggctatgtgaaggcatacgtggaggcatacgtactccaccctgaagcttctccttcaattttaatgttaatcttaccaagcgacagctttcatcctggttaaggcagctcggtgtgtgtaaaagcagcctggcctgttaaacacaatgccgttaaatcaaactgcctttctttttttttttttaaagtttccttttcagtactgacaacttggaggtagagaaaccaaaagcaatgttttcagaaggccttttgctttcttaaagatttcaaacgatgattgtagttaatctggctgcctgtttgaaaaaccatcagataaatgcccacaaggctctcatctttcagtagcttagctgctgcttgtcagattctaaactccaaagtgcttgactcttccagtgcccaaactaatccttgtttaaattatgtcttcagaagctataactcttatagtggcttgctaaatgataccctttggatctgggctgaagacttccagaatgcccaagtgaatttcaggagcgggctcaatgtttaaccaaattcacctttaccaagggctattcaatccatatctgggatgttttaaataaaactatccaggactgtgggcaatattcaaagttaatatttgttgccaatatgtttggagtgcaagataaagcattataatgtctagacatttttgaaataaaaaagtcttctggttaccaaaaggcattattgtcataggtcatgcaactcagaggtgaaacttgagaaaacagaaagtgactaccaacaggtgacacattgagaagataattaggaatttcctcaatcatacagccctcagcacccatttctcacatcaaaatagaatggtggagccgagtgcggtggcacagcctgtggtcccagctactctggaggctgaggaagatcatttgagcccaggagtactggtctggagcgaactatgcctattgggtatctgcagtaagctcggcatcaatatggtgacctttcgggagtggggaccaccaagttgcccaaggaggggtgaactggcttggtgggaaacagaacaggtaaaaactccatgctgatcagcagtgggactgcatctgtgcatagccactgccctccagcctgggcaacacacaagaccctgtctctaaaaataaataaataaatgaatggaatagaagagaatattgaagacaaggggatgaaggcatgattttaaatgactaaaatggtctgggcatggtggctcatgtctgtaatcccagcactttgggaggccgaggcaggcggatcacctgaggtcaggagattgagatcagcctggccaacatggtgaaatcctgtctctactaaaaatacaaaaatcagcggggtgtggtggtgcccgcatgtaatcccagctactcggaaagctgaggcaggagaatcacttgaacctgggaggtggagattgcagtgagccagtattgcaccaccgtactccggactgggtgacagagtaagactctgtttcaaaaaagaaaaataaaaaattaaaatgtattatggccttaaataatagggttgatttccactttaaaacatatcctgttatatttcagtgaaaatttttatttaaaaatattctaaatattgaaaagatgtattttgggggggcagagataatgtcattccttttattaccatccaaaaactggaagaagcatttcattttgtgaaaactgtgctgcttttaaaagagaaagtccttacttcctgactggacccttcccccacccctgcttctcattttgaggaaaccattcttgaataggcttctgaaaatcttacaagagtaaaatttatttgttcagcatttggttgttgaaggacccagtgcggaggtgacattcgggtgtcagcctcagataatacaatgtgaaatgactgaaaagatgcaattgggcactgccgttctctttttacatgtttttttgtttgttttttgttttgttttgagacagagtctgctctgtcgcgcaggctagactgcagtggcgcagtctgggctcactgcaacctctgcctcccaggttcaagcgattctcctgcctcagcctcctgagtagctgggattacaggcgcccaccatcaagcctggctaatttttgtatttttagtagaggcggggtttcgccatgttggccaggctggtctcaaactcctggcctcaggtgatctgcctgccttggcctctcaaagtgctgggattacaggcatgagccactgcactcagtctcttttgatgttttttaactgatcaactaggtgtgaacagaactggatttttttccccgaagagctgaggctgactggggtgtgacctccttagctgtgtagactgcattgactctactgtgcctagaatttggacaatggcctgagggaccagtatgtgatttaagcataattaaaaggttatacttgagggatagacctgaatctggaagacaactgctaattttctggggcactgaggggtttttgttttgttttgttttttgagacagggtcttgctgtcacccagtctgtagtgcagtggtgccatctcagctcactgcaacttcgacctcctgggctcaagtgatcctcccacctcagcctcctgagtagctgggactataggctcgtgccaacatgcctggctaatttttgtattttttgtagagatggggtttcgccctgttgcccaggttggtctctaaactcctgggctcaagcaatccatccaccttggcctcccaaaatgttgggactacaggtgtgagccaccacgcccggccaacactgtttttatgaaggtctgttcctagaaatggaaaccattaaaaacaatggcaagaagaccctttggttgaggaatgacaagatccaagaggaaaactggtgtgccatggcgccttccaggcagagcaggtgttcagggcagaggcctgggcgggtagacgggctgcagttctggagtgaagacggtggaggctgcattcttttctggctttctgttgggattggcctgggtatgtcctttgacatagcctgtcacagggaatgaccgaaaagattaaaggtacctgttcctcttcaggggctctgttcaacgtagtagccactagctgtatgttgttatttatacttaaattaattaaagttaggaattatgttcctgaagcatgcaaaccacatgtctagtgctcagtagccatgtgtggctagtggccattgtattgggccatgcatatagaacattcccatcattgcagaaagctcatcgggacagagcttctctagaggattctgtgcatttagtgagtgtgataaccccatgacttctgacatgaaaaattagggaaaattaaaagaagcagagggaggcagggagttggggagagagacagtgtggaggagggggagaaggagagatgagagggggaaatgggtaggagaaggagaaaatagggaagggggtgcggagagtgaggaagagactgaggaaggggagggggctgcaccatggaggaggggtgaaggcaggggttgggagttgggactgactcacctaagaggaaattcaggtcagggacaatcatggatggtggcgggggtggagggggttaagctaccatatcctcccccaccccctttttcaatatcttgttgggaaatttgcctaaattgagcaactgactttcctgattcaaattaagtgcatgatatagatacatacagagccccatgttccttcttgaaattcttaatgtggggctattttaaagcagtcattttatttaaaaaaacaattaagttgcataagtgcggcagatctacagaaagaatagaaagaaacctccacaggcaggtgatctaaaatgggggtgaagacaggcaaaaccattttaagggttttcattttttctgagctgggaagacatcaggaagaaggtatacttaaagatgccaaagaaactcactgttcttgtatccacttgaaaatggttttctccttaaaaactgtttcttgtgagatttgaaacattttaacaataactcagagcacacttagaaagaaagtgtttgaaacaataaaacagttcattgcttgttccctggtgtccgaagcaagggagtctatctgacgtaccagagtcaactggtgacatcctcctaaactaggccagttttgatagggcctactgtgtttctaagaacttgtaatctgtggaatatcaaaaatttttttaaaaaggtaatgatgaaatgaaccccaaggacagcttctggggcctgtgcagaaagcaagggtaaacagataagctgagataaacagataagaacatgcctctgtcctgaagtggcagaggccacagggccactggtgcctcggcttccctgagccttctcagctgatctgctgccctgtcctctgtttccggcatagaggttacccttggtttaacggatggggaaactgagatgaaagaaagggagtcagggccgggtgcagtggctcacgcctgtaatcccagcattttgggaggctgaggcaggaggattgcttgaggccaggagttcaagaccagcgtgggcagcatagcaagacccctatctctacaaaaaataaaaaataaataaaaatggccaggcgtggtggctcacgcctgtaatcccagcactttgggaggccaaggtgtgtggatcacttgcggtcaggagttcaagatcagcctgaccaccgtggtgaaaacccatctctactaaaaatacaaaattacctggatgtggtggtgggtgcctataataatcccagctacttgggagactgaggcaggagaattgtttgaacctgggagtgccactgcactccagcctgggtaacagcgaaactccgtctaaaaggtaaaataataatttaaaaaaaaacataaaaataaaaaaagggagtcacttgttcaaggtcacttgaactgtggacttttggggagcaattgcaagtggatctcccctatcctccaaagtgcttttatgttccaaaataaatctttcttccttcctctcataatatatgccaaaacaacaaactcttctcgagatggtagggtttttaagtgtaaatacccatgaggttgtaattgtggaagagaaagagtgtctttgtcagattccctgggaaaaggggcaaattgggaatataatttctgtctcagaccgtgatttcagctgagggccagtttgagagcagttgggtaaattaattcctactaggttgtaaatgactgataggtgaatcctcaaagtagatgtttccattttaaaagtagaactgtgtatcaatacaactgaatctgtgtttgaggacaaggcaggatgcctacatgccatacataagtgcctgtacacacataagcacatgtgtacgtatgtggtatgatcgcctgtggaggcccattacctgtactctctcgctgcctgggcccctcctaccaacacatcggacaagcgaggccagcctcttgcgttatttttcccctcagcatggctagtggccaacgaattgcccccaagggactggatgtgaagccccatgggtggtggtggtggggacagtcatgggagtttaggtgtgggccacatcattggcagcagcaccacctcctttccttggcagaggcaagaggtgggcagcgggcatgccagttcctgctggctcaccacacatagctcccatctgccctgcaccctgcttccctggccgcttactgctccttaggaggttctcgccctcagttacctctgcctgacagtggtaccttatgtgcaggctcaggtttctgcagctctctttacttactacccaagtagggggttagagagggggaggcgaggagggtttttcttgcagattgcagggcatccccaccccctcaccaaagagagggtatgaagtggccttttcccccagaaaagctctctccggatgaccccttgccatttttcagtggtaaccttgagtgtttgcatttagaaaccatgtcaacccgtttgtgtgtgtgtgtgtgtgtgtgtgtgtgttgcgttaatgttgcaactctgcttttcagggggctttgtgaggcaagggagtgtataagagccatgcacttccttgggggtccacagtcagacttgagatcctggtgggaaggcagcctggtgtcgctccctgatgatgagggtacaggaagccatgcttttgatctgctcctgcagagaaggtgtagctctaaacttacccactccaggaagggaaggggagggggtaggagatagaattacccaactgctggatggagagaacccagccaatgtaattgctctgcaagtctgataaaaagtcttgtgaaacctcatttgaaaatggaattccatcctggcatgggtcttagcactgcttctgaaatggaaacaagctggagaaggtcgacaaatgtcccaggaagaacagctttaagtggctgatgcagaaatgggtcctgcttggtcttaatgttttctgttaatgcactcaggaggggcttgttgggatatgtagataacatcccaggagaaggaactcctagctctaggaagaataggggtggagtaaggacaaaggattggaccatcgacttgaatagcaaaggatacctgagcatccaacttttctcaagccaaatgctgttgtgggttgatgccactacccctgctgtcacagattagggagagtgtgtgtctaatgaatatgttcctggaacatagtaggtgttcaaaaatatttccagaatgaatgactgatgctacacagcttgagtatccctaactgaagaatctgaaatccaaaatctgaaactttttttttttttttttgagacggagtctcgctctgtccctaggccagagtgcagtggcacgatctcagctcaccgcaacctccgcttcccgggttcaagcgattctcctgcctcagtctcccaagcagctgggactacaggcacgtgctgggatttttttgtatttttagtagagagcgggtttcaccgtgttagccaggatggtctcgatctcctgacctcgtgatcctccctgcctcggcctcccaaagtgctgggattacaggcttgagccaccatgcccggcccaatatctgaaactttttgaaagccaacatgatgcatacaaaatgatcattggatctgttgcctaggctggagtgcagtggcaccatcatagcttagctcactgcagccttggcctcctgggctcaagtgatcctcctgcctcagcctccaaagtagctgggactacaggtgcgtgccaccacacttgactctttgcaacattttggattttagattttcagatttgggatgctcgaccagtataatgcaaatattccaaaatccaaaaacatcagaaatccaaagcacttctggtcacaagcatttcagataagggatactcaacctgtatttatgttatgtgatggtgaagaagagagccgagaaagtgatatcctcaagaaatggccttggggtcacaatagatggtacattaggatacgattcaacatggttaagaaaggttaactaaggttatagggcaaattggaaaatgttttccaaatgtttgtcttaactctgaaaaatgtttggcaaactccccctcccccctaatttggaagtggtttgttttagtcgttttggaagaaataaatatttgcattagaccaaacatttggggcaaacagttctccccatttctgaggctctgtgtgagtaggaggagatgtttcatgccgataacactcatcccttttttggccaaatcgaaggtaactttcgatgtgagcttcacatgcttttcacataactgctagaatgaggttgagcaaatggaaagaaaagaggaagccaagcagcttgatccttccagacctagggatggctgatgacctggcatttgaaggatgtaatcgttaaagaaaaattgcctttctgctcatgggcagggaggctggatccaattaagacaaggaaaacgtatgttaacttggaggaaaaatttctaaacagtcaattctgtaatcctctctgaagaggaagaggccaacatgatgaggctttatggatggtgccaagccctgtgatatataataattagtaaccactggttattttgccgcacacttattctccaaaccactaaccattgcttgggatggaatgcaccaggcctagatatttgccccagatgtcttcccttcagcagtatccaattagagggatttttacaaattaaagcttaattctctataatatatagcaaaatataaattaaggaaggagaaacccgatttccttggttggttccatgggttacggaggtgagggctagtcttcaggtgcacctcttagtttatgcttcagtggctagtggtgactgttctatatcatggtccttggtatttttgctagtctttttggtagcttaaaaacatttcagaggcgaggcatggtggctcatgcctgtaatcccagcactttgggaggccaaggtgggtggatcacctgaggtcaggagtttgagaccaccctggccaacatggcaaaaccccgtctctattaaaaatccaagaattagccaggcatggtggcacgcgcctgtaatctcggctacttgggaggctgagacaggagaatcgcttgaacccgggaggcggaggttgtggtgagctgagatcgcgccactgcactccagcctgggtgacagaggctcaaaaaaaaaaaaaatttgcaaaggtaatactcactaaagaaagtccaggccagaagtggtggctcatgcctgtaatcccagcactttgggaggctgaggctggcagatcacctgaggtcaggagtttgagaagagcctggccaacatggcaaaaccctgtctctactaaaaatacaaaaaaattagcctggtgtgatggcatgcgcctgtagtcccagctactcgggaggctgaagggagagaatggcgtgaacccgggaggcggaggttgcagtgagccgagatcgtgccactgcactccagcctgagggacaaagtaaaactatatctcggaaaaaaaaaaaagtccaaaggaccatgtaaagcatctctctctgtcttcccatgcacccctgctaccaatcccaccactcagaaataattagcgtcagcatgtaggtgaacgttttcccaaatctctgtatatgcacatacgaacatctagatagaactttacacaaaatgggtcccagtgtacacactgttccgcagctgttttcagtccacaatatgctgcagagcctttccatatctgtgtttatagtttcccatgaaatggatgggtgtcaggaaaaattgtgaaagactttggaagctgaatgctgtttcaatggaatgctgggtatgttctagcagactcttaggggttatccagttctaaaggggtctgtgtttttcattgtctttgactagttttataatatatttaaccaagcccctagaatgagccatttaaattctctaatttttaaagataatataaaggaatatcctacccatgatatattcatctttatgcacttattttaaagacttctgtttttttcctgtgggagtatctgcctaataacatcccctttcctctttgggaagaatcataataatttgtgaaataggcttcagtgaccctagggatgtacaatgtagattttcttatgagaaaggagcatgatacatgtgacatgacatttctgagacctttgggacttaacatccctcacctctgagtaatgagtcatcttttctatggtattcaaagtttgaattagggaaattaaggttgagttcagtcaaagactttagttgtagatgacttttcagttgcccttggattttgcatgtgtaaatcaggcagggggtacactcagaaaacaagcccacagcttcgtaaggtgtcttggatctctcactgtggatcatcagcacaaccctgtgggcctgggaattgtttttgctgttgctgttagtattattctagtttgagaaagaaggaaaacaagctcagagaggtgaagtggttttccaagatcacataccaaggagccacttccccttgtttcctgtggtgccaatccattgcttcgtttttcgtgtttgagagcttttgcgtttcattgtacattgtacaattctagggagccattgttcccatcctaaagctggtagatgtgtaaatgtatcaggtcggggggcagaaagtgtcttgaggaagggacgccccttcctaatcccctccaagtgctgcctgtgctggtgtcagtcctcctgaggtcatttgccctgtctttgatctggcacagtatcctcctctgtggaattctgtagctcttcctctggtaactgctttcactaaaggtttgcatggaatttacctagacaagggccctacggttcccacctgagaatagaaaacgcccattaaaaacagcaccacacaaaacaaatcagtggcccctcctcctgctctgcctccctccgagataagcttggcatgagggcatagtccagagccccacggccttcagtaattttgttaacaattggaggagaatggcattttcttctgggaaacatttgcagatgtgtgagctagctctacatggggaagggctgccccttcactgcgtgctgaggctacgggctccgtgtcctgtcagagtgtgggagggagctcctcacactgaagccagctccttccttccgcaaagaagggatctgagggccaaaaggggcccgcatgggtggccgtgcaggagcagaaagaggctccaaagcaggatgggtcccctggcctggattttcctccagggcagctctgcaactctaacacccatccccaggctgtgtgtttcctagggatacgtaataaagtgccaccaactgggtggtttagaacaacagacatctattgtcgcacagttctggaggccagacgtttgaaatcaaggtgtgtgcagggccgtgctccctctgaaggtacccggggaagacccgttccaggcctctctccttggcttgttggtggctgtcttctccctgtgcgtcttcctcttgtgcatctgtccctgtgtccagagttatcctttgtataaggacaccagtgctattggatcatggcccacttgaatgacctcatgttaacttgattacctccataaagatcctatttccaaataaagtcacattctgaggtaccgggggttaggacttcaacataatcttctttggaggacgcagtgaaccctggaacacaggccctgcctgtactgaagcagcagcttttggggatagcctgtatttttaaaacaggaggttctgaggatgaaccaggcgtgggaactgctgctctatagaaccctggagctggtgggttttctgagtgccttctgagattatcttggacatccagactactctgaccgggtccccaaataggactctgcaggttccctggcagttggtttctgtcttctgctcaaatatttctagagacggggagctcataccttcttctaagcagcctatccgattttaaaccactggattaaaaatatctataataatatatatatattatatatatctatatatattagataggcttcttgcctcacccactaaattgtagacttcctgagggctgacaccagggctttttctttgtatcttactggaactaacgagatgctaaaagtaaacccaagtcggcctgtggagacctggtatgtctggtgccatgttaacccattaggtcctggttctgctctttggaggtatccaggataaatgcaccactctttgcctgagggggcccttctaatattagaagacaactatgatacccactgtagaactaaaagcagaaccccaagtccggcacggtggcactcacctgtagtcccagctactcccaagccaggaagatcacttgagccaggagttctgggctgcagtgtgctatgcactgcactccagtgaatagccactgcactccaatctgggcaacagagtgagaccctgtctcttaaaaaacaaacaaacaaacaaacatagccagaaccctgccctccagattcccagactgggctctcattgtgcattgcagccaagtaacagacataaccaaccttaggataggatttattagcaggtgggaatgatgttgttgctaacatctggcaaagctcaaggcttcataacttgccagaagtgagatccagtcacccactatttatttattaatttattatttatttatttatttatttatttatttatttattgagacggagtgttgctctgtcgcccaggctggagtgcaatggcacgatctcggctcactgcaaccttctgcctcccaggttcaagcggttctcttgcctcagcgccccgagtagctgggattacaggcgcccgccaccatgcccggctaacttttgcatttttttttagtagagatggggtttcaccatgttggtcaggctggtctcgaacttctgacctcaggttatccaactgccttggccttacaaagtgctaggattacaggcgtgagccactgcgcccagcctagtcacccactttttaattttcgaggtaatatggtatcttctcctgctgtgcattgaggcaagatgtttccattccattgaaagcttgatcaaggttctatgagaagttcaaagggaaaaggagagtgtgccactcatgtgctgtgtggctcctctccaagcaaaaccatcctcagctgcataaatgtgcagcttggccaggtgatcctggagtctcttctcacccttcaaatcttgagaatttgcaggtgcattttccactgataattcaactgtgggtacttcagaataaaatttgatgttaatttgaagagcaggcattacacattaaaacaaaaattaccccaagggaagaatgagagccaagaggggttacatttgtagtagaaataaacaggaaaaaaacccgccactgctaattgaactgattctcgcaatccaagaaaggcaaatgcatgattctaatgttttctttagtagattacagaaaggaagattaaatcaaaagtcaaaaataaacagtttgattatcctacactgtattatcttaataaactgtcttcctggaaagtttaaaaatacacagtacttcatctggccaaagaaaacagtaagtaaatattgttgagaaaatgtaagaattttccatctagatgtgaggggtggaaatattgccatgtggacttcaagacatcccacaaggagtgagagagtgataggtattacctaccttttaaggcttgttgtcggggacactgttgtcacatacgggggaagaggttgggaggggaatgggccctatcaagcactcttctgggctcctggcaaaacctcacccagttctgcattctcctgcaaggtttgtctagatactagctgtatcctgactggtgatgctcagatttcatagtttagggtgatgtggagaggactgctgattttcttctctctctctcttttttttttttttttttgagatagagtctcgctctgtcacccaggctggagtgcaatggcgcgatcttggctcactgcaacctcctcctcctgggttcaagcaattctcctgtctcagcctcctgagtagctgggactacaggcatgcaccactgtgcccggctaatttttgtatttttttttctttttttttttgagatggagtctcgctctgtcacccaggctggtgtgcagtggcatgatcttggctcactgcaagctccgcctcccgggttcacgccattctcctgcttcagcctcccgtgtagctgggactacaggtgcccgccaccatgccttgctaatttttgtatttttagtagagatggtgtttcaccatgttggccaggatggtctcgatctcccgacctcatgatccacccgcttcagcctcccaaagtgctgggattacaggcatgagccagcacccggctaatttttgtatttttaatagagacgaggtttcatcatattggccagtctgggctcgaactcctgaccttgtgatctgcccgtctcggctccccaaagagctgggattacaggtgtgagccactgtgcctggcatcttcttctttttcttttttttttttttaattttaattttttttttttttttgagatgaagcctaactctgtcacccaggctggagtgcagtggagcaatctcggcccactgcaacctttgcctcccaggttcaagcgtgctgattctcttctgcttaatttttctacagttggaagtagcaaaaggtggagactagtgatgtgagttctgtcctagctttgttgctaacctgccagagaccaaggctggtaactttgtgtctctgtatctttttttttttttttttgagacacagtctcacgcttgcccaggctggagtacagtggtgcgatctcggctcactgcaatctctgcctcctgggttcaagagattcccttgtctctgccacctgagtagctaggattacaggcgcctgctaccatgcccggcttttttttttctttttcttttttttgtatttttagtagagatggggtttcaccatgttggtcaggttggtctcaaactcctgacctcaaatgacccatctgcctcagcctcccaaagtgctgggattacaggtatgaaccactgtacctggcctgtatcttttcttttgagatggtgtcttgctttgttgcccaggctggagtgcagtggcgtgatcttggctcactgccaccttggcctcctgggctcaagtggttttcctgcctccgcctcccaagtagctgggattatatgcgcccgccagcacatctgactaatttttgtatttttagtaaagacgtttcactgtgttggctaggctggtctctaactcccagtctcaggtgatccgccctccttggcctctcaaagtgctaagattacaggtatgagccaccactactggcctgcctctctgtatctttatcatcacataggaataatgccctattgatcacagagaccaaataaaaaatgtaaataagatggggagtccagatgcaaaccctagtatatgtaaaattttagtatataataggctgggcacggtggctcatgcctataatcccagcactttgggaagccgaggtgggtggattgcttgagcccaggagtttgagaccagcctgggcaatatggcgaaactccatctctactaaaaatacaaaaattagccgggcatggtggcgcatgcctgtaaactcagctactagggaggaggttgaggcaagagaatcgcttgaacccgggaggcagagatttgcagtgagctgagatcgtggcactgcactccagcctgggtgacagaacaagacttgatctcaaacaacaacaacagcagcaacaaacaaacaaacatggtagccttgttacagccaggaaggatggagatagtaaatggggaggtagtttctaaggaaaaaagcaagtcctggttagacaggtagtatgtagggatccactacacatgaaaagatgctcgatctcactagaaatctaagatatatagaatcttagtttggcaataatttaaaacattgataaaggcttatttaaaaagtgtgggtgaataggttctttcaaacattacgatcttgttgctgactagagtgtaaattggtaagtctttgtctcaagaacattttggtaatatagacatcaaaagccttaaaattgggtaacccttgaccttgaagttccacgtctaagattttatcttaaggaaaaattagcgtaccaatgacgtgcaggaagttgttcagtagatgatgtttataatagaggttaattggaaacagttccaatgaccatctgtaaaggatcgatataataaatcctggcatattcaaatagtagactcatacatagctattaagaattatggagatccagactgggcagcatggtgaaaccccatctctacaaaaaacaaaaacaaaaaactaaaattagctgggcatggtggtgtgcgcctgaagtcccagctactgtggaggctgaggtgggatgatcacttgagcctgggagttggaggttgcagtgagccacgatggtgccagtatgctccagcctgggtgacaaagtgataccctgtctcaaaaaaaacaaaacaaaacaaaaaaccaacccgcccccccgcaaaaacgttatggagatctagttcgagaccagcctgggcaacatagtgagacccaatctctaaaaaaaaaaaaaaaattaaaaaacatcagcaatcagccaggcatggtggtgcatgcctgtagtcctagctacttgggtgggaggatcatttgagcccaagaattcaaggctgcagtgagctgtgatcatgccattgtgctccagcctggggtgacgagtgagaccatgtctctgagaaaaaaagaaaaaagaattatggagacctattcttattggcatggagagacgatcataacatagtgagcaggggttaggaaaacccagattatgtacaacgaatgtgcgttacacttaataattagaagaaaaaagatgtcttttttggggagggggtgacaatgccttgtaaatgtaaggccacttgagaggactgtacagaaataaaatccttaaagaaaagtaaacatgccaggtcttctgaatctcagcaagggttggccttcttagcattcctccatgggagattctaggattattccagctgtgttacttcaaggattcttgaaactcttcttggacccatttgttgactgactgctttgatggactgtaaatacacatcattaaggctagatgccttaacgcatctagcatactgttttgactccgctagatgatgacatgtctttgtctttcaaatgcgaatttgatttttcggaaaatcaaattttgttaggcttgatgcgtaaagtggccattttggagctggagagtaaggggcaagaatggggaatgagaagactgggacctttcccagtgccctgtgctgggttggggtttataaaaaaccctccaaggcattggctttgttaggctgggctcttctgggtgtgcagcgttgtgtgtttgttttaatagtaaccaccattattttataataaaatgacggttggtggaaggtgagcactcctatccttggttgacaagctgggcagttgatgaagagatactctgtctgtaatcctttaaccagggatgtgcccagtagaggctagattcctgttatctctgtctagtgaactagtgaccaactaatgagcagggaggggtgctttagcatgtgcaaaatccgagtcaattgaactgacatgattcaagacctcctgggtgtgtaatgctggctggggtacttcaggaatgcaaagatgtgagattctgctcttcctcttcaggaccttccagcctagttgggggaaaggcaggtacatgatcaactccattacaaagtaatctaagtacagaggcagccttgatggggggcagggatcagtaaagctttcatcagagaagtggtcttgagctgtgccttgaggacaggtggctggtggtatgaagacagcatttacagggcccctaactggtgcaggctctgtgaaggaggctttatagagatagatgtatttttcaccacggtccaatgcattaggtttcattgtcttttgcacatgacaaatctgacaggctaaggacacattcaggtaggtgttggagcttggctttgagcttccagcctgtgctgtggggagaattccatcttatgaggttacggggtgtgagggacaaaggttgttggcactggggaaagccaaatggtggtgacttgggaacagcttgtggtggccccatttttctggagcctggagtagttgtgggggagcagggagcaggaaggctgcagaagaatagggtcatatggggaggtctctgagtgtcaggctagaatttgggagttaaggttttaggcaaaaaatagccggccaggtacggtagctcacgcctgtaatcctagcactttgggaggccaaagtgggaggattacttgagcccaggagttccagactagcctaggcaatatggtaagacccatatattagtccattttcacactactgataaagacatacctgagactgggtaatttatgcatgaaaaagggtttaatggacttacagttctacgtggctgggaggcctcacaatcatggcagaaggcaaggaagagcaaagtcacgccttaggatggcagcaggcaaagagagagcttgtgcaaggaaactcccccttataataactgtcagatctcatgagacttactcactgtctcaagaacagcaaatacctgtccccatgattcagttacctcccactgggtccctcccacaacatgtgggaattcaagatgaaatttgggtggggacacagccaaaccgtatcaccccatctctacaaaaaataaaaaaattagccaggtgtggtggtgtgcacctgtagtcccagccacttggggaggactgaagcggatcacttgagcccagggatgctgcagtgagctataattacatcactgtactctagcctgggtggcagagtgagaccctatctcaaaaaaaaaaaaaaaaaaaaaaagagccactgagagtttttcagcagaggaggctcaaaaactacctgtacttgaagacaccagatctggcagcagaagctgtagggccaaatgggcagtggttcttggaagtattgtgggggcttccagggttctgcaaaaaagagggagaggggtgggttggagcagctttggggagactaaatctatagcacttggcacctgataggacatggcggtgagtggaaggacaacactgtaacttttgtgcagcaaaagaaacaatcaacagagtgaaaagacaacacacagaattgggggaaacatttgcaaactgttcacctgacaagggattgatacccagaacatacaaggaactcaaacatctcaacaggaaaaaaacattcctattaaaaaatgggcagatgatctggacagacatttctcaaaagaagacatacacaccactaaagaacttactcatgtaaccaaatactgctgtaccccaataacttatagaaaaattaaaaaattaaaaaacatctaaacataaaaaaagaagacatacaaagatggccaataaaaagtgctgaggccgggtgcagtgggtcatgcctgtaatcctagcactttgggaggctgaggcaggtggatcacttgaggtcaggagttcgaaaccagcctgaccaacatggtgaaaccttgtctctactaaaaataaaaaaaattagctgggcgtggtggtggatgcctgtaatcccagctacttgggaggctgagacaggagaatcgcttgaacctgggaggcggaggttgcagtgagccgagatcgtgccaccgcactctagcctgagtgacagagcaagactctgcctcaaaaaaaaaaaaaaaaagaaaaaaaactcaacatcactaatcattaaggaagtgcaaatcaaaaccacaatgaggtattatctcaccgcagttaaaatggccattatcaaaaggacaaaaaataacaaataccggagacgatgtagagaaaagggaactcatacactgttggtgggaatgtaaactagtacagccacgatggagaacagtatggaggttcctccaaaaactacaactagaactaccatatgatccagcaatctcactactgggcatttatccaaaataaaggaaataagtgcatcaaagagacatctgcacccccatgtttattgcagcactattcacaatagccaagatagtggaatcaacttagatatccaacaacagatgaatggataaagaaaatgtggcatatatacacaacgggaatctattcggccctgaagaatgaagtcttgccattcgcagcaacatggatggaactggagggcattatgctaagtgaaataaaccaggcacagaaagttaaatgctatgtgttctcacttatacgtggaagctaaaaaaaagttgattcatagaagtaaaaagtagaacagataatactagaggctgggaagggtagggggaaggggatagagaaaggtttgtttaacaacacaaaattatagctagataggaggaagaaactcctagtgttctatatctgtagaatgactgtagttaacactaatatgtagtttcaaatagctagaaggaggatattgaatgttcctaactgatatggtttggctgtgttcccacccacatctcatcttgaattcccacgtgttgtgggaggggcccgtgggaggtaattgaatcatggggggcaggtcttttccatgctgttctcgtgatagtaagtctcacaagatctgatggttattataaaggggagtttccctgcacaagctctctttgcctgctgccatccatgtaagacgtgacttgctcctacttgtctcccaccatgattatgaggcttccccagccatgtgaaactgaaagtccaatgaaacctctttcttttgtaaattgcccagtcctgggtatgtctttatcagcagtgtgaaaagagactaatacactagcacaaataaatgataaacatttgagatgacagatatgctaattaccctgatctgatcactgtacatcatatgaattgcaacatcaccatgtaccccataaatacgtagttatgtgtcagctaaaagataaaaaactataatatttgcacccaggtgatgctgcagggcagtcaggagatgtggctggctctggggaaaggtgtcagcttggtctgggcctccctcagtggccaaatggccagtgtgaagtcttggagggtgaagggctcctccatgccagaggcaagcacctggcagtagctttgaagaaatgtgggagcagacggtgtctgttgtttttctggcccacatctaccccctcttcttctggcaacagcacctccatttttcttgggggaccactcctccctgtatttaatccacaaggttgggtggagatgatgtctcattggttccatcagtgagcacatgactcagccctggctgtgcagagccttgattctctgcttggcctcagggatggggatgggattcttggttccaaaagggctgctcttctgctgctggggttgccaagctggtggagggaaacttggagctcttggtggccgttgccacagcctatctgagaataaaggcggcatagcacgatgttgaatcaaaggctgatggggtgggggagagagagagagtcctcattgcattgtttcattttggtgtccagccattctgggggccagatgtacccccctggtttcctgtttgggtgaacgtgtgacttgccacttacagtcaaaggatcctgactcattcagggttaaaagtcacatccttaggggatacctgccttaaagaacccaagacagcaggccagagacatggggcctgggtcaggaggagccagccccctgagtcaaggaaggctggatgtgcacctttgtcccaggctttgcttgagcagagggccaggtgtatttgatatttgccacaaagaatacaatccttaacctggctgcccttgtgagactccaactgtagcaaagaaagattaggaaacaaacatcccagtcaccatggaaatgtgaacccaaggtgttaggaacaatagctgtgtgagtccggaagtggattctgtccacacacatgttggtttgatcccccatctatttccttgtgggggcctgggcatatctgtgaacgtatgatatagccagctgctctagggctgggtgccacctcccattagccttggtttcatcatcaccaaaatagctgtaaacctaatacactgcttatgcatgtcagaacctccttacagcctccctcggaggtaaatattatttttatcttaattccacagatgagaaaacagaagctcagggaggttcctaaactttcccaaggtcacagttgttgatggaagagccagggtttgaacccagcccgttgagtctgtgcttttttaaccaccacgttcctcacgttggtgttgacaaaaaatattactaaaagtagttcattcttactctacatgtcttatttcaattctgccacaaacctatgaggcaagtacaactggttaattccatcttataaacgaggaagctgaggcacagaagacttaggaatcttgcccaagttccaccgtcagtaggaggcaaaagtacatttgggggttacttttttcaggtggatttgaaatgataatgtgtcttaaatttaatttggaagccaagaatgggtgataactgtaattttttcttttcttttctccttcccctcccctccttttcttttctattcttttcttttctccctccccttttttcttttcttttctttcttcttttcttttcttattattttttgagacagagtcttgctctgtcacccaggctggagtgcagtggcacgatctcggctcactgcaacctctgcctcctgggttcaagtgattgtcctgcctcagcctcccgaatacctgggattataggtgcacgccttgtatttttagtagagacagcatttcaccatgttagccaggctggtctcgaactcctgacctcaggtgatcagcctgcctcggcctcccaaagtgctgagattacagacatgagctaccacgcccggcctaattaattaatttttttgagatggagtctcactctgttgcccaggctggagtgcagtgacaccatctcagctcactgcaacctctgccttcccaggcttgggtgatcctcccacctcagccttctgagtagctgggactagaggtgcacaccaccaggactggctaatttttttttattttttttatttttgtagagacggtttcaccatgttgcccaggctgggataagtgtaatttctaaatctggctttcatcagtggtgatgttcttcatgtgtagatttatactagggaaacaaatcaggagggggaacaaggtggacagagaataatagcaacttgatttgcctattatccctggaaaaccatatcctggaactcactagcatgtaagtaattggaaaatgttaaagcaaaagagccaggtttagaaacaaaatcacaccatcaagtctatgtaaatgagttcctcggtgaagagaaaagcaaatgcactgctgtttgtgggctggctggctgtgtcccaagtgctgcagagtgggagtctgggaccagttgttttttcattgagggccccttacaaggcacactcgggttgttcagactccatgaagctcatgaattggctcaataacaaaaagcatgaatcatttgaacgtgaaggtacagggacatctgtttgagtaatttctgacagtttttttttcctttttgaaaatgtgttatatttaggatttacttgagaaataaggtggacttggggactgacagcccatcagtttcatgggaacagggcctgtgtctttttattgctctttttgtgtatgtctgtagacaataggtgctcaataagtactttgtgtaaatggtgactttaggagcacctggattctgccccaggagattcctgaggggctggcaggtaaccaaaggctaatggaggtttacagccaagttccagatggttcaggggcccgaacccctgggtggagcctctcttgggccatatacccattcccatgcctggctgtcccccatcccttagaccgtggctgctgctgctggactgtgttctcttgtgcagatattaacggtgccaaatagtgccagggcccaggttgcagtgggctccttattgtcctgtaatctcagcactttgggaggccgaggcaggctgatcacctgaggtcaggagttcttattgtctagcccagaggttgcaaactgacctacacactattttttttttcttttttttgagacggagtctcgctgtctctcccaggctggagtgcagtggcgcgatctcggctcactgcaagctccgcctcccgggttcacgccattctcctgcctcagcctcccgagtagctgggactacaggcgcccgcacctcacctggctaattttttgtgtttttagtagagatggggtttcactgtgttagccaggatggtctcgatctcccgatctcgtgatccgcccgccttggcctcccaaagtgctgggattacaggcgtgagccactgcgcctggcccctacacactattttaaaaatcgggaaatttcacgtaacctttctgatttaagacttcttttagataattcaaagttttggcgacattaggtaagaatttttgtgtagcagcatttgtctgcagttaatttttttcttttttttgagacggagtcttgctctgttgctcaggctggagtacagtggcatgatcttggcttactgcaacctctgcctcccaggttcaagcaattctcctgcctcagcctcacaagtagctgggcacacgccactgcacctgactaatttttgtatttttagtagagctggggttttgccatgttatccaggctggtctcgaactcctgacctcaggtgatccacccactttggcctcccaaagtgcagttaaatattgattgtctcttttgtggcaagattccagtctcttccttttaccacaggccacaatagttcctcttgtctcatatcaagtcccctttactcatttatatcacctgaccagcctctggtttcagggcctgtcttctgtagtgtatttgccttaccttttttttttttttttttgagacggagtctcactctgtcactcaggttggaatgcagccgcgcgatcttggcttactgcaatctccgactcccaggttcaagtgattctcgtgtctcagccacttgagtagctgggattacaggcatgtgccaccattcccagctaagttttgtatttttagtagaaatggggtttcatcatgttggccaggctggtctcgaactcctgcactcaagtgatttgcccccgttggcctcccagagtgctgggattacaggcgtaagccatcttgcctggcctgtatttgccttacaaactgcaagtgatctaaaaagaacaaattctcatttgaaaaaataagcactatggccagcacaggactgacttaaaacataatttcaataggcactgattttgtcatttaatgctgagaagaggcaaaaaccctatatggattcttagaaataggactatgttggaatggaagagatggcaggcattgatttggagtctccagcatactaaagggaagggctttcttcaaggaaatgaaaagtgataaagaaagctacttgatagaagtattcaggggcttgaaggcctttcaacttcagggagccggagagggggagggaactgaggagggcaggtcgggtggggtggggaagagagagagacccttccatctcagccttccccactccccatgggaacactggaaaatagaaaggacaaaggaaatggaagcaagtgcgctgggaaatgcccaagtttcagcttgaatgatgctgtttacatgttcttacaggaaagactattatgggccagctgttaatgggttgtctgtctgtcaagagagagagggatggaggaaggggctggagttgagggatggaggaaggggctggagttaaggcatggaaagggctctaagccttgcttcttgcatttcctgtctttaaacttacgaactaaagggcttgagggtgagggggtgctgatctagggaggaaggaggttgctttctgtgtgcgtgtttttctgtttcatgtcctgactatttcctgggtccagagagggttttctggtctgaagaggagagtgtgcccctcacagtagatggggtgacagacagttctgccctctgctgtgctggtgacagccgggagggtcagactttatcagtttcctgggtggagggtggacgggaagcggggggccttctgctgaagatctcaattaaactttggactggctcatccagggaggtggcgcgatttcctctggaggtttaaaataaatagcaggtacttgatttcatctggaatggagggtgtggccctgcctggcactgggatggacccaatggtctccccagccttctttgttctgatactacacaccccacccctcaaccgcctgagaaatttctggaactgcgtttagtctcagtacattaggattattgctagaaataaagcatccctggatcctttggcttcttggacaatatgcaggaaaacacccgccttctcttagacatgtagggttcgcgccgttgacctgagcttcagtgccagagagtcgagcaaagagaatatcacttttacttaaaagtgaactgcacgggggttgactctttcaaggcctgagattgatgcactctaatttgccatctggaattggttagccacattcttctgggctctgatgagaaatgatgaccccggagaagggtggtcatatggccagtgtcaggattaatagaatcccctttcattcttgaaagggtccctgtttgggcaataaagttgatggttactctaccatgaaagagcagaaaaagctgagcagaaaactttgttttggaaaagggggtgttgaagccaaggcattagagaaacgtgatttttcatttaattatatatatagttttcttttttgtaatctaaatgacatgtgcaaccttcagagcctgactccttgctggaaagagagaaaggaggttttgttactgagaagcttattttaaaagtcaagtcgggtataataaaataaatgaaataaataaaagagctccccagttaagggcctttcccatgctggggcttcgggataacaagagcttgaactgccttctgtcacatggggcaggtccttaaggagcagaaggttttttttttttttttgagacacagtctcactctgtcacccaggctggagtacagtggtgcaatctcagctcactgcaacctccgcctcccggtttcaagcgattttcctgcttcagcctcccaagtagctgggactacaggcacctgccaccgtacttgactaaattttttgtatttttagtagagatggggttttgccgtgttgccaggctggtctcaaactcctgacctcaggtgatccgtctgcctcagcctcccaaagtcctgggattacaggcatgagccactgcactaggcctggtttattattatattttaagttctgggatacatgtgcagaacgtgcaggtttgttacataggtatacatgtgctatggtggcttgctgcatccatcaacccatcacctacgtttggtttttctcctaatgctatccctcccctagccccccaccccctaataagccccggtgtgtgatgttcccctccctttgtccatgtgttgttattgttcagctctcacttatgaatgtttggttttatgttcctgtgttagtttgctgagaatgatggtttccagcttcattcatgtccctgcaaaggatgtgaactcatccttttttatggctgcatagtattccatggtgtatatgtgccatgttttctttatccagtctgtcattgatgggcatttgggttggttccaagtctttgctattgtgaacagtgctgcaataaacatacgtgtgcgtgtgtctttatagtagaataatttataatcctttgggtatatacccagtaatgggactgctgggtcaaatggtatttctggctctagatccttgaggaatcaccacattgtcttccacaatggtagaactaatttacattcccaccaacagtgtaaaagcattcctatttctccacatcctctccagcatctgtttcccgactttttttttttttttttttttttttttttgagacggagtctcactctgtcactcaggctggagtgcagtggcaggatctccgctcactgcaagctctttcctctgggttcatgccattctcctgcctcagcctcctgagtagctgggactacaggcgcctgctaccatgcccggctaatttttttgtatttttagtagagacggggtttcaccatgttagccaggatggtctcgacctcctgacatcatgatctgcccgcctcagcctcccaaagtgctgggattacaggcatgagccaccacgcccggccttcccaactttttaatgatcaccattctaactggcatgagatggcatctattgtgtttttgatttgcatttctctaatgaccagtgatgatgagcttttttttaatatgtttgttggccacataaatgtcttcttttgagaagtatctgttcatatcctttgcccgctttttgatggggttgtttttttcttgtaaatttaagttctttgtagattctggacattagccctttgtcagatggatagattgcaattttttttttaagtgacgtggtctcaccacgtatcccagtctagacttgaactcctgagctcaagcaatcttcctgcctcagcctccctagcttccaagtagctaggattacaggctcaagccactgtgcccagccaggagcagttttgaaaggcaaaaggaccatgactgaatgctgcatatctagaacatccaggaatgcagatgcccaggccaaagggctctggggtcggagcaggcaggattgtgccgggggctctcaaccctttgctgggggccacttgttctctccttaaccgtggactattgcaaagggtggagatcggagactggaaaaaaatccgtgttctagtcccttgttgcgtgcttcctggtggactgacctgtagcagatagccctcctcctccggcctcagcttcctcgtctgtgacgtgggcagggtgccgtcatctatccccggggcttctgtgagaatcaaatggagaagagcaaaggccacgtgaggggttggctctgtggtccctgtgctcatagactgcggtttcctacgggcaaaaggggaaagtgaccctagaacacctttgtgtcagggatgcatgccagatggcctttagtgcactctcttcccagccctgtcagcaactgacaggttcaataagactttgccaaaatgttcaactagcttttcctgatgcgggtctttcttcaaattctgtcccacaccgttaactgcaaacttctttcagaacacctttcacgaaaatgaagctggcatagctgtggaaagagttgatggtagtgttgtatataattgtgaaaattggcatagtggtgggcacataggggatgttcattcattcacccagtgagcctttcactgtgcccaggccctgagacagtcggggtggctgggaacatggtctttgccttgattgtggaattgcctgcttgagggaatggcctgcaaatcacacaggtggagaggaggaagagccgttttcctccgccctcttaggttcattggttgggggttacaaatgaagttgacaaaagattaacaagagaaaaaatggatttaattggattcttaggcactggagttcatagggaaatgtggctcaaggaggcagctaggatttggggcttatataccatcttaggctaaaaaagaaaaggagttttgggcttctggagggtagggaagccatgggaaggtaaggggaggaaatgtatggtaaataagggttgtttagtaggtaagagttgtctcaggtgctaagagttgtctgcttttcttcctgctgtgggggaggagggagacatctttacaagtagaaatttatgccctgcttttaggcagaagaagggcagagagctaattgccttcagctgaaaacaattcttatgccaaagtggtatattttcgggtggcatattttggtcccctttattaataacttacaccctattaaagaagaataacgactgagtgaccagagattgaatgctgagtggaaaagttttactgccaggtggggagcccgatctagcttagtctcagctctgagggatggaatcggagcgggggcaggaatgatgtaggtttttcatagctgaaagcccacaagctgtgctgcattgacgtcaggaaggcagtcttgccgagcactggtgcctgcctggccacacctgagcttgtcagtgagctgggtacctgactggctgacagtgctctcctgcatccaagagctgccctggcatcatggtgcccagtgtgtctgctgcacacgagatacaccaaagcaggtgatatggttagggctttgtgtccccacccaaatctcatcttgaattgtaacccccataatctccacgtatcaagggagggacaagttggaggaaattgaatcatggggatggtttccaccttgctgttcttgtgaactatcttgtgatagtgagtgagttctcatgagatctgatggttttatgaggggctctttccccttggcttggcacttctccttcctgccaccttgtgaagaaggtgtcttgcttcccctttgccttccgccatgattgtaagtttcctgagctccccccgcccccagccatgctgaactgtgagtcaattaaacccccttcctttataaattacccagtctcgggcagttcttatagcaatgtgaaaacagactaataggccaggcgcagtggctcacgcctataatcccagcactttgggagggtgaggtaggcggatcacctaaggtcaggagttcaagaccagcctggccaccatgatgaaaccctgtctctactaaaaatacaaaaattagctggacatggaggtgtgcctgtaatcccaactactcaggaggctgagacaggagaattgcttgaacctgggaggtggaagttgcagtgagctgagatcacaccactgcattcccacctgggtgaaagagcaagactccatctcagaaaatggactgatacagcaggattgtggcacccagggaggtgtgctctgtgtcggcatgttaggtggccaggtcgagtttgtcccatctgatgggttatgtacctattaaaataatatagaatcatgaaaaataatatataaactcataaatgcaagaagtagaacattacaaaatcccaactatagtgcttagaaaccctttgacagcaactgatagcaactcaaatataattagtgtatacaaaaaagagaatttatggattcatatgtctgggagtattcctggatttctggatccaaggattcaaacaatgttcccagtttttctttttttttttttttttctttctgtccctatctctcagcttgcttgtctttcctctgcttaattcttggctgggtcagggggtcaaagaacagcttgcttaacaaccccaaggcaaatagagcttcttttctgaaaaccagcaggaaagtcacggaaaggactctcttgggaaggatggtgggggtcatgtggaatgacttactgaagaaggggatgaaggagtgccacacagtgaaaaccacaactgtgtgagcacgaggcacccctgataggacctagtggttcatcagtcacttctctgcctgagtggtaggagcctagattttatagttgttttcaatgacaaaaatcatagtttataaaagagcataatctgacccagaggtgtcctttctgtcacgttatgattggggacaaagtagacatgctcttcagcttgatcatatagtagctaccagggtttagtacactgtctctataaagggcagatgataagtagttaaggcttatgagccatatggcttctgttgcaggcactcagctctgccattgtagtttgaaagcagccacaggctatacctaaagaaatgggcatgacagtgtgccaataaaactttatttacaagaacaggtgttgggccagatttggcccacaggccttatcttgccatccccttgatataaacatgactgaaaaatttatattctaatagaccataagacactgctctaaagtaaattgtatatttttaaatcatgtgtctgataaggagttaagatgcaaaatatataaggaactcctactattcaataacaacaacaacagcaacaaaaaacctgattaaaaaatgagcaaaggaattgaacagacatttctccaaagaaggtatacaaatgactataagtatatgaaaagatgctcaatatcactagtcattagaaaaatgcaaatcaaaacctcaatgtgttgcctgggcaacaaagtgagacccccatctctacagaaaaaacaaaaaattagccgggcatggtggcttgggcctatagtcctagctacacaggaggctgaggtgggaggatcatttggacccaggaggtcgaagctgcagtgagctgtgattgcaatactgcactccagcctgagcaacagagttgagaccctgtctcaacaaaacaaaacaaaaacccaaaaaaccacaatgagctgtcacctcatacctgttaggacagatattataataaaaacaaaaaataacttgttgatgaagatgtggagaaatgggaacagttgtgcactgttggtggggatataaaatagcatagtcagctactatggaaaatagtatggaggttcctcaaaaaattaaaagtaggattaccacatggtccagcaatctcacttctgggtttttatccaaaagaattcaaggctgggcgcggtggctcgcacctgtaatcccagcactttgggaggccgaggtgggtggatcacgaggtcagaagatcaagaccatcctggccaacatggtgaaatcccgtctctactaaaaatacaaaaaaattagctgggcgtggttgcgtgtgcctgtagtcccaggtactctggagactgaggcagaagaatctcttgaacccagtaggcggaggttgcagtgagccaagatcgcactactgcactgcagcctggcgacagagcaagactctttcttaaaaaaaaaaagaattcaaatcgggatctcaaagagatatttgcactcccttgttcattgcagcattattcataatagccgagaggtggaaacaacctcaaagtctataggtaaatgaatgaaatgaaaaaactgtggcgtgttcgtgcaatggaatactatccagccttattaaaaaggaaatcctgccatagccacaacatgtatgaacttgtaggacattatcgtaagtaaaataagctagtcacagaagaacaaataatgcacaattccattcatatgagaaatttatagtagtcaaactcataagagaatggtggttgccaggggagagggaaatggagaattgttgctcagtgggtataaagtttctgatatacaagatgagaaagtttgagaggtctgctgtataacattgtgcttatagttaatcatactgtgcacttaaaaatttgttaaggccgggcgcggtggctcacgcctgtaatcccagcactttgggaggccgaggcgggcggatcacgaggtcaggagattgagaccatcctggctaacatgatgaaaccccgtctctactaaaaaaatacaaaaaagttagctgggcatggtggcgggtgcctgtagtcccagctactcgggaggctgaggcaggagaatggcgtgaacccgggaggcagagcctgcagtgagccgagatcatgctactgccctccagcctgggtgacagagcgagactccatctcaaaaaaaaaaaaaaaaaaaaaaaaaagaaaaaaagataaatttgttaagagaacagatctcatgttgtgttttttaaaatcacaataaaaatatacagttatcccttagtatcctttggtcattggttccaggtccccccttatatactaaatccatggatgctcaagtccctgatataaagtgacatagtattcacatataacttatgcacatcatcatccaaactctaatctctggattacttataatacctcatacaatgtaaatgctgtgtaatagttgttatactgtgttgttcagggaataatgacaagaaaaaagtctatatgtgttcagtacagacggctttttttttccccctcaagagttttcagttggagggtggttgaatccatggatgtggaacctgtggatagggagggctgactgtatgtgtataccaaatcatgtaaattttataatagtttattttttgttcctgatgtaatgggaagcatttggaaaacataaaattgatcccatcacaaaagaggaattaagattgccttgggttaagggttaagtaatgtcctatcaccagttaatctgccaaggatgttggtcatggccacattcaagaagtggtgtctggaggccacaatgagatggcccagttcagacatcggctagaattgtgtggcagagcgtacaattatgtcacgaatttgggattagcatggcatacctagttgaggtttaaagctccctcctgcaccttccaaagcaggtgttgcttggggttgaaaaccttcactgtttggtcaacagaaggccctcacagctctgatgggaatgtcacctgagaagggctggtctcctcgtggatttgcatttccgcaccttcagacactgcctcagccagctgctgttttaactggcacagagggcctcgctgagagcctcttgggttctatccagatctgagaaggaatctgggatgccggggtcagatccgtgccctggcccgaggatgggattttgtaccccgttgctttctgcagttgtgatgaggtggtgcttggcaatggcctggagctcggcatctgagtgactgtccgtcctagggcgtccaactccagacctctcttacccaggccagcggagggcggaaactctgagaacattccattagaataagatacgtttaataagagcaatggaaaatggtaaacctgacttggggaaagggaatgtgctctttcatgtaaaacaaacaaacaaaaaatgtgactgtgagaagcatccagaaaaatacgatgacctggaggctggatttaaaattggcactgagggaaatctcatttccacagtcgatgactcccccttcagctatgttcatgccagtggagcaaaccaaaataactttataaattaaagtttatgtagtcaggaaagctatgcctggactatcacacaccagatgaaacccttgaaggctttgtttacaaccgacatcctggggttggaggttaatagtgtctggagaaggttaggtcatgcacatgtttaatagcaattaaaacaaaatcactggtgatggtcaaagagacacagctatgtttatttactatagtttatgccacctttgtttgtttgtttgttttgccctctggaaaaaatgtctttgtcctgccataattaattgtaaccagcttttgtttagagggggccacatggaaactgctcagagagctcaaagtgtgttggcaagtggtgacttgtaactagtacctcaatcattttcttttatgatacacataatagaaggatgcatttgggatgtaaaagtttcaaattataggggcacatatatatacagacaatcatgaaagtcccccccaccctgcctggctgctgacatttggtgataatctttccagacatctttctaaatgctgactgtttatatgtgagtgaacaagtgtttatatccatatgcacacaaatacgtaattagctttatttttattttaatttcttttgagacagggtctcaggctggagtgcactggtgtgatcatagctcactgcagcctcaacctcctggactctagcaatcctcccaccttggcctctgaaggagctgggactataggcatgtaccaccacacccagccaatttttaaatttttgtgtggagaaagggtcttgccatgttgcccaggctggtctcaaactcctgggctcaagcaatcctcctgcctctgcctcccaaagtgctaggattatagaagtgagccactatcgctggctgttgtcgttatttttgatccataaaaagagggtcatgatgtgtgtgttgatgtacagcttgcttttttcacttacacatccagagttccttcacactggcccatgtgcagatgacatttttttaatcctgcagggcgttccataatatgaattctgttcctaatttattgagccatttcctcaccctttctttttgatactaaatgaagcaatgatagcatgagattatgaatgtgccttgtggagcttagactgcctggctttgaaacaggacttagactagatgagtgacctagggcagggggtggcaagctatagcctccatggcaaatccaccccgctgtgtttctgtagggcctgtgaggcaagactgattttttcatttttaaatggttaaaaaaaaaaggtaagtatttcctaatatatgaaaacggtgtgaaattcaaaattcagtgtccattaacttgttttgttgaacagcatgctcatttgtggatctattatctagggcttttttcatgccacagaattgagtagttgtgacagagaccatatggcccacctagaatatttaccatctggccttttacagaaaacatttgccgacctctgacctagggcaagttactaatctctccatgtctcaactttcttttctttaaaatggagatactagctgggcgcggtggctcatgcctgtaatcccagcattttgggaggctgaggtgggtggatcacctgaggtcagaagttcaagaccagcctggtcaacatggtgaaaccccgtctttactaaatatacaaaaaaattagccgggcatggtggcgggtgcctgtaatcccagctactcaggaggctgagacaggagaataacttgaacccaggaagcggaggttgcagtgagccgagatcgtgccattgtgctccagcctgggcaacaagagcgaaacttcgtctcaaaaaacaaaaaacgaaaaacaaaaaggagatactaataatacctaccttgtagggtgaagtgacttaatatatatatcaaataaatatcatatgtagaatacctactttgtaggcttatctaagttacttagtacatatatcaaataaatattatgtgacacaccaggtatatcatgtatcaaatatgtatgaattgtgtgtaaacactttaaacattttattttattttattttacttatttgagatggagtctcactctgttgcccaggctggagtgcaatggcgcgatctcggctcactgcaatctccatctcccaggttcaagcaattctcttgtctcagcctcctaagtagctgggactacaggtgcgctccaccatgcccatctaattttttaaatatttttagtagagatggggtttcatcatgttggccaggctggtcttgaactcctgacctcaggtgatctgcctacctcggcctcccaaaatgctgggattataggcgtgagccactgcgtccagctgactttgaactttttaaatgctcaaaaaagtttactattactgtgtcattgttattgtaagtgcataactctttgtgcacgtgtgcaaggatgtcacagatacctggcagtgggcttaaagatgaagggtcttaacaaattgccttccagaatggccccactaagtcatgctcccaacagtggagtctctgctttcccgcattcttggcaactctggatagggactagggcttagaaaagaacactgaatcctcaaagagcctctgacctccacagaggctcttcagagtctaggagtgctgtgcccagacctgtggggtgaatctccctggaaagccttcagtcagaacatgctcattgtttgttgagtgagagtctcttctgtgttaagcctttgacctgtaaattttcattttacagatgaagaaactgaggggctcagagaaattaaatcacctgctccaggtcctgaagctacttgtggatgtagggtttgaactcagttgtgggggccttcatacaactttctttgccattctccctaattccaggaaggataaggcaacgtcagagatagtcattttctttaactttttctttttcttttatttgaggcagggtctcgctctgtcacccaggctggagtgcagtggcgtcatcacaacctattacaaccttgatctcccaggctccaggcatcctacagcctcatttaaattttttttttttttttgtacagtcaaggtctcactttgttgcccaggtcttgaactcctggactcaaatgatcctactgcctcggcctcccaaagtgctgggattacaggcatgagccactgtgcctggccctacaccacatattccatccacactttttccttaagtcagcaccttgatgactggatcagagctacacacaaaattggaagtgaacgttggagaaagtggcttagtcatgacctgtgtttatctcctcttgctctgagtaaagaggatgtgtaatagagtatgttactatatttttcatatcccgatgccatagcctgtgctgcccagtcacactgagaacaatgcagttctcatagataacccgttgttgggtgatatgtctatttctaggcatctccacgctctcctatcgagggcctttgcaacagtatttcccatgttccatcagcgcgtctgcaaaacatgaagcagcttcattcacccagagactcctgaccttgtgcatgaggggaaaatgtttctggttttgtgtgtgttttcaatgacgaacatttgcattctttcctcccctcactttttttttttctcacgttgacattaagaaacaacaacaaaacgctgcttgctcccaaactgtttgaatttaaaactctgaatcttaatttgcatagacagtagttctttacaaggaatgtgaaccatttgacagaatttcctgaaggaacaaagagccatgatttcctgattaaaaccatgttaaaacaaaaagcagactataaccaaaaggctctgtaagagtatttcttgttcaatcagatttcaaaggcagcacaagctggatgtttatggcatcaccaatgcctttctgtgatgcctgagcttttcaagaacatactcagaactttgtcttaagcctgtctttactcggagctgtctcccgaagccttggccttcctctccgcagcttcagttactgagtcactggaacagaggaagaagcccaggcttccattctgacaggctgcgaacatttatctggagttgtaattgtcatactcccacgttattttcttgctgtcttctaaagcgatgatgaaagatgtctgggggaaagaaaataaaacaaaaaaccttctagcatctacacacctaaagcagggtttgtcaaccttgacaccgttgccatctggggctggataattctttgtcatgggggccggcctgtgcgttggatgatgtttaacagcatctgtggcctttagcttcatagttatgacaaccaaaaatgtctccagactttgtcaaatgtcctcttgggggtaaaattgctcctggttgagaaccactcgcctcgattttggtggtctagaatttgcaagctgcttctccgccctgtgcatatccaatcctcagcccttccactaaggattagaacttgattttcttcttttcatcccaccctccctgccttgagatattgctgcatctggacagatgtgccaagtacaattctggctcaggtgactgaagtctaagtcagacatatgtcttcactctccctgaccatccctcttgctgctggcctgcgtggcgtgctcgtgccgataggggcagctgtgtgagtagcaggaccatcctggagacagccatgcaaagggaaaccatctgggtggggtgagcttgccagccccagctacaggtcctggtggagttgacagttgatggatcactgtgctgtgacctctgggcagcccaggcctgcgacgggcagagagctgtcttgtttctccttttggaacctgaagggcagagacagggtgaagttgccaggagaggctttcagctggatcctaggggccagcgtgcagccctttcccagggctgggggtaggggagaagtgtctctctctgggccgtgtggatgggccagaaccctgagctgggtgcagagggctacgctggagaggcggggaagggcactggaccgggtgtctcgagacctgggcatggttttagttctaccccgggtagcagcacgatcttgtgcaaatagtgtcttccttctggtcctcatgtttctcgtaaagctgacttccaactagaacagtctacctttctatttttctcctgatttgtagaaaaagatggtgctgttaagagacggaaatgtggccttcctaaatttgctttgagtcctgagttcctgatttgggggcaagtgtctgtgaagggcttggggtcactctgtggcttttgcctcatttttatgggtcgtagaggatacctcaataaatagcatttttcttccctgaacaaattgagagatgaggccatggttgaaactttgaactttggaacttgcccagatgtatcaggtcagtcaccctcctcccctggggccaataaaccaagtgttccaaaggccaggtggtcttagggaaaatgatggaccctgaagggtgagggtcatggccagtgtggactacagaggatcccctagccacactggagaggggacagtgccctggttttcctgatacgcccccttagtgctcaaggctggtttcaaccctgctgtactaatctgctgatgagggagagttggtggctcagtggtgacagcacaggtttgacagagggtgtctacaccacccagtgcccccttgagctcacatctgagggtctgttgagattacagaggcccttgatagagtccgaaatttgaaggacaagcaaggaagattggagcatctgtgaactatctccagttcagcattgcattagaaaaggaattacatcaggtcactgatgtcttctcctaactcagtgatctccacagccccctggatcctgccaggcctgtggagaagagggacaagccagcctccccaccacccctgccctccgttccttttatatttaaatcagaagcttaggctcctccgtgtagctgctctatttttcatgcctcttgcctgggtctaagccctggagcttagggtgctgtgatatgcttgcgggatgctgccccaccacggctggaaccagggcttcagcccggcgcacacccagctcgtttggaggtcacggctcaccataaaaatggtgtgagtggccagctcttttttcactgtggctctgggcagcccagcccagctccggggtggatgcaaggcctgagagtgaactttgttgtgaatgatgacacaattccagaaaaatgcagtgtctcccagatacggcttctggagctttgcctggggtggggggctggaggttgtttagtgtttgggttcctggtggttctttgccccaggggtgtgtgtgtgtgtgtgtgtgtgtgtacacatgtgtgtgcgtgcatgctttttcatgaggcacacttattttcagatgttcacatggactctttttgagattccccaggggaaaaggagaaagtacagaaagccgtgacacctgatggaaaatattacgctttagtcaacagggctgatgtgtctcctctgactttgcctttaaaccaaaccacaccacagcggggaaagatgagccacacatgaggcctgctgggccggtgactgtcccctaaagtgggactcttgtaattctaagcgcctttgaaaaatgctttcagaatcatccagtacttgagttgtagggggcctgaaaggtcatcttggcccagtggcttgttttaaaggaggaggaaactgagggccagagaggacctatgaccctcccagggttgcacagctagaactcaaatcctgtctcttgatcctcagagaagggtttggtctgttctgttctgccctactttagtttttagacagtgtattgtgataagttttagatttttttttttgtactctgctcttattcattcaacaactctggggatttactggggaacaggcagacctggtccttgtgctcagggggcttacagcctaatgggaaaggcagcttggaacaagaaaccgtgcatgggatttgtagcgggtgtggctatcttatttctggccagtatggggagggagaaggggtgggagttgatggctggggcacggaggatgtcatttcagctctgtggcctgggtcaggtgcccagcccagcaatctgagtgtggatgactctggactatttctccaggaggaggtgggattcacaggcagagacatatcaaaacagggaccttgggatgtatgatgtattttgtaagaaaaaaatggaaaaacaggccgggcacggtggctcacgcctgtaatctcagcactttgggaggctgagacggatggatcacctgaggtcaggagttcgagaccagcctggccaatgtggtgaaaccccatctctactaaaaatgcaaaagttagctgggcatgttggcaggtgcctgtaatcccagctactcaggaggcttaagcaggagaattgctttaacccaggaagccgagattgcgccattgcactccagcctgggcgacagagcaagactcagtctcaaaaaaaaaaaaaaaaaaagaaggaaaaacagagtagagcaggaagctctgtgtatgtatgcgcaggtaaggtcgtcaggtgggaggaggccaggagatgagccatttggaagcccggaggtggccttgacttccctgatgggaggagagagagctgctgggagagataggatccagggaggggtgtggcacaggcttctggagggacagcagctatggccagaggtggatctcttattctcaggggtatcagggacccaggctctttccacttggaacacaagatagcaggggcctttgtcaccagcaggatggaagctgacacacaggacaccccttccaggaagctttgtcacatcgacttcacctaactccaatgacctctcccttctgagtccctctgcacttagaggctctttctgtttggactgagtggtggttttggaaaggctcttgtgtgattttcactggcgtggactcttccccagatgctcactttgtactaacaccgctggctcattatcacagagtcatggagcaggcactgagactcagagagctctgtggctgcgcaaggtcagggtaaaggtgggacttcagcctcaccagactccagagcctctggccgttcccgccatgcctgctgccccctgtcctggtgtgttttctgcccattctcccagacacgggctccttgagggacaaggtggtgagttagccctcttgcttcgagccatcatttatcatggattgtgctagcagtcgtaggtacacagacgagcaaggcctggctttgccctcgagagctgaccgggttgtagaagctgggatgcagggagggctctgggcccagggaacaaccacttgaggcagccagggaaggcttcttggaggaatgacacaggagctggcttgggctatatagtctctcactttgctgaacttccatttcctagtaagtaacttggatatgactgtgaagttattgcaaccattgtgtaaaatagttattcaagcaaaccagtttgaaaccctttgcaaatagaagacaccgagacttggtattgacagtcctctgtcaggagaggatcccagtcttggcccagcctccactgcacactgtcccaggaaagcctcccagagccaccctctcgctgcctgcagggctgcccttcagtggcctcgactcctgtggagactctgcattcccggccagatttgcctttccctctgggcggacccccccacacacctcacagcaccagcctgggagcttgggagggggcgtgaaaccagcaggtgggagtctggagtcctggctccggtagtcgccagccacttcttgtcccctggtccctcatcctccatcctctaggcctactcttctctttgcagaaaggctccttggggttcagagaatgtaggaaacttgttggagctcacacagctgagtaacaaccaggccctgctgcctcctgtacacagtatttcctgctgctctctgggtacatggagtgggaaggggaggccctgggccacagcaccccacccctcacctctatcgcaccccacccttcacccctattgcaccccacccctcacccgtcgcctctttattctatctctgaggtcgtgactgtgtctctggtaatgaatattttgctttggaacatcccccctctttttattgagagataattcacgtaccataatattctccactttaaagtgtaaatttaatagtctttgtacattcacaatgttgtgcaaccatcaccactatctaattccaaaacactttcatcaccatcaccccaaaaagaaaccctggatctaatagcgatcacttcccacttgcccctaccacggtccctggcaaccgccaatctgggttgtctctggatttatctattgtggacatttcacgtaaatgaaataatacaatatgtggctttttgtatctggttaatttcacgtagcatagtgttttcaaggttcatccatgttgcagcctgcatcagtgattcattactttttgtggctgaataatattccattggatggatgtaccacaatttgttaatccactcatccactgatgctaccttcgttttaacttcagttacagcctcctgctgtcccttgagttctttggggagtgttcttatttttaatttctctaatggaaactttggtcagtgttctccacctgtaggctgggtattttgacatgttttccaagtggcttctggaaacacggaagcagtgattctgaaatggaaaagagaacattctctcccataggcccccctgtctgatataactccctggtggcacgcctcagtgagggtggcaccatcgcaggtgggagggagtatgtctatttcaaaagtgctggggcaggggccgggtacggtggctcacacctataatcctccactttggaaggcggaggtgggtggattacttcaggccaggagtttgagaccagcctggccaacatggtgaaaccctgtctctactaaaaatacaaaaattagccaggtgtggtggcggatgcctgtagtcccagctactcaggaggctgaggcaggagaatcatttgagcctgggaagtggaggctacaatgagccgagatcatgccattgaactccagcttgggcaacagagcgagactctgtctaaacaaaagaaaacaacccccaaaaaagtgctggggcaaagtggctgagcccactggtgaaaaggcgctgtggatggggtgcctccgacttgtgtgcagctcctcagttatggctatgccctggctgtgacaaggacaggattctggcacagctagtctaagatcatgttttggggtccttgctcagagtgttgccttcattctcttttatttttttcccatttatttagtgaaaatgtaatttatatacagtaacatctgcctcttaaaagtgcatagttctgcgtgttgtaactgtgtacaccacgtagttagtacacatggtgtcatgtaactaccaccacaatcaggagtactttcatcaccccctgaaactcccccagactcccttgtagttacctcctactcctagccccagcccctggcaaccactggtctgctttttgtctttacaagaatgtcatatacatggaatcacaccgagtgtagccttttgagtctgatttctttcacttagcataatgtatttgagatttgtctgtgttgttatgtgtatcagtttccctttatttctgagcaagagttcagggtttgtttattccccaattgaaggatgtttgggttgtttccaatttttggtgattatgaataaagccactataagcattcacgaacagttttttctctgaacacaagttttcttttcacttgggtaaatatgtaggagtgggattgctgggtcacatggtaggtgtatgtttaattttataagaaacctgcaagctgctttccaaagagctgtaccgtcttgcattctcaacagtgatgcatgagcattcattatctttcattatgttctaggctctcacattgatcagaggcaatatgggcttggcgttttaattgcaaggaacaaagactctgcctcccttgcctgttttagtttaggttccccagaagtggactctggtgcaatgatttgagtgtaagtagtttatccgggggtcaatgccaggaaactccccccacctccagcaggggagtggagaggggagaggaaaaggaaggtagctggtaaagggtatgtcatcaggcaggaagcctagtttctagaatccatcccctgtcagttattgactgagggctcctgcgggagtcttgtcaattccctggcactccagcctgcccccttctcaggagagctggctttgctggctttggcagccagtctcaggtgaagggtatttggaagtctggcccaggtgcaacagtgacagggcactcttcccaggtgatagcggttccttccatcctctttccatgacactccctctttctttttctttttttttttttttttgagacagagtctcgctctttcgcccaggccggactgcagtggtgctatctcggctcactgcaagctccgtctcccaggttcacgccattctcctgcctcagcctcccgagtagctgggactataggcgcccaccaccgcgcctggctaattttttgtatttttagtagagacggggtttcaccgtgttagccaggatggtctcgatctcctgacctcatgatcctcccgcctcagcctcccaaagtgctgggattacaggcgtgagccactgcgcccggcctaacactccctctttcatcttggctctgtctactggtggcttccttttctgcatcatactttctgctcattgtgtttctcttcatatgttcccactaccagctaactgaatgttgacaccccaaagagagaaaaattggttggtgagttagtcactgcttttctcttggacagagccctcaatttaagtcatctggtaggcacaccagtcattgttggctgcccttgggtcaagtggcctgccctgggccaaccagctgtgaccagggaagtgggtcagagagttcagagcagcgctgtccaatggaaccttctgtgatgatggaaatgttctgtatattatggtagctactagccatgtgtggccattgagtgcttgaagtgtggcttgtgctaccaaggaactgagtttttaatttcatttaattttaataaattaagatttaaattcacatagctgcatatggctagcggctaccatagtggacagcatagctctagaacatgggcccagtttttggcgattatgaataaagccactataagcattcacgaacagctttttctatgaacataagttgtcatgttcttggcctcttctctccactaaataatgtggtataacattctcttgagatcagttgtttttttttttgagacggagtctccctctgttgcccagactggagtgcagtggagcgatctccgttcactgcaagctctgtctcctgggttcatgccattctcctgcctcagcctcccaagtagctgggactacaggtgcccaccatcatgcccggctaaatttttttgtatttttagtagagatggggtttcatcgtgttagccaggatggtctcgatctcctgacctcgtgatccacccgcctcggcctcccaaagtgctgggattacaggcgtgagccgccgcaccggccaaggtcagttttttaaaaagccaattaatatctgatttgtgattctgaatctttaacatatttaaccgtctgctttttttttttttttttttaattcacagatgacatggtctttttttttttttattgatcattcttgggtgtttctcacagagggggatttggcagggtcataggacaatagtggagggaaggtcagcaggtaaacaagtgaacaaaggtctctggttttcctaggcagaggaccctgcggccttccgcagcgtttgtgtccctgggtacttgagattagggagtggtgatgactcttaaccagcatgctgccttcaagcatctgtttaacaaagcacatcttgcaccgcccttaatccatttaactctgagtggacacagcacatgtttcagagagcacagggttgggggtaaggtcacagatcaacaggatcccaaggcagaagaatttttcttagtacagaacaaaatgaaaagtctcccatgtctacttctttctacacagacacggcaaccatccgatttctcaatcttttccccacctttccccgctttctattccacaaaaccgccattgtcatcatggcccgttctcaatgagctgttgggcacacctcccagacggggtggtggccgggcagaggggctcctcacttcccagtaggggcggccgggcagaggcacccctcacctcccggacggggcggctggccgggcagggggctgacccccccacctccctcccggacggggcggctggccgggcggagacgctcctcacttcccagactgggtggctgccgggcggaggggttcctcacttttcagacggggcggctgccgggcggagaggctcctcacttctcaaacggggcggctgccgggcggagggtctcctcacttatcagacggggcggccgggcagagacactcctcacctcccagacggggtggcggccgggcagaggcgctcctcacatcccagacagggcggcggggcagagacgctcctcacttcctagatgggatggcggccgggaagaggcgctcctcacttcctagatgggatggcggccgggcagagacgctcctcactttccagactgggcagccaggcagaggggctcctcacatcccagacgatgggcggccaggcagagacgctcctcacttcccagacggggtggcggccgggcagaggctgcaatctcggcactttgggaggccaaggcaggcggctgggaggtggaggttgtagcgagccgagatcacgccactgcactccagcctgggcgccattgagcactgagtgaaccagactctgtctgcaatcccggcacctcgggaggccgaggctggcggatcactcgcggttaggagctggagaccagcccggccaacacagcgaaaccccgtctccaccaaaaaaatacaaaaaccagtcaggcgtggcggcgcgcgcctgcaattgcaggcactccgcaggctgaggccggagaatcaggcagggaggttgcagtgagccgagatggcagcagtatagtccagcttcggctcggcatgagagggagactgtggaaagagagggagagggagaccatggggagagggagagggagagggagagggagaggaccgtctgctttaaaaatgggaaatatcagtatttgaggcaatgaagtcaaaattgacctaatgagatgttgatacgattcttttcctgaagctttaatacatttacatttttatttttggaaactcactttcattctgtacatttatactgtacctattttgtgttgtcagatgtacgtgtgtgagttactgattttcttcctcacacatggagacacttggcagccaatcagcccaccaggaaataggtctgaagtactctcttagaattcagaagcacaagtggtgcccctgacagcagcctaagtgtgagtttctgaagtcagagccaaatagggttctgtgcagcctgaagattatatatgaatgtttttaactttgggtttttttttttttttttttttttttttgagatggagtctccctctgttgcccaggctggagtgcagtggcgtgatctcggctcagcacaacctccgcctcccagattcaagcaattctcctgcctcagccccccgagtagctgggactacaggtgtgcgccaccacacccagctaattttttaaaaatatttttagtagagatggggtttcaccatgttggccaggctgatctcgaactcctgacttcatgatccgcccacctcagcctcccaaagtgctgggatttgggcgtgagccaccgtgcctggcctaactttggttttaatattattttgccttggcttcaggaaatgaccaagagatgcctgattaagattattttggaatcattataatgggatggagcttcgagtagcattggacagggagtcaaggaaccagggttcctactcaagctatgccactgacttgctggctttgtgatctttagcaagtaactgtaattttctgagcattgctttctccatctgtaaataaggaattttgattacacatgcatctaaaaattattccatggcaccccattgcaggagatattaatagatacagctgaggaaaagggttctatggtcaaagttgttgggaaatatttcttactatatctcttggagattcacaatgtacattttttttttgagacggagtcttgctctgccatccaggctggagtgcagtggcgcgatctcagctcactgcaacctccgtcttctgagttcaagccattctcctgcctcagcctccccagtagctgggattacaggcgcgcacaccacacccagctagtttttgtatttttagtagagatggggtttcaccatgttggccaggctggtctcgaactcctgacttcaagtgatctgcctgccttagcctcccaaagtgctgggattacaggtgtgagccaccatgcccagtccacaatgtacattcttatatcaaaggctctgagaagtcctgcagtggaaaaaaaatttttttttcattgtattaacagactttggttaatatttaagcatggaatctcacttgtgtgtgtgtgcatgtgtaaaacatctcttggcatcttccagaatacagttatacaggcccatcagcttggcaaacagggatggatgattctttggcttttctgagttaaatgtctcagtgtccttggacaaggaagaagttaagtctcttttcaatcatgttctcagctttttctctcctctcttctcttcccctctcctccaagtattaaaacctagttgaggccaggcgcagtggctcatgcctgtaatcccagcactttgggaagctgagatgggctgatcacgatgtcagaagatcgagaccgtactggctaacatggtgaaaccccatctctacttaaaaaatacaaaaaaattagccgggcgtggtggcgggcgcctgtatagtcccagctactcaggagactgagggaggagaatggcatgaacccaggagggagagcttgcagtgagctgagatcgtgccactgcactccagcctgggtgacagagcaagactccgtctcaaaataataataataataataaaacaaaataaaaaaataaaaccttgttgataactaattgtgggtcttttccttttccctgacacacattctgcaagagaagacagatggcaggcaggaggcagattggagagaggttctcagcatgacttttctcaaatgtgatgctcctcaagagagtctatatttgttatcaaaatgagccacgtgcttgcatgccaccttgaatgctctccattgacatttgcaacttgtttctgtgtaattttgcagcctggttctgctcagttccagcaaggtgactgtcattaggcagatctctttccattacaggtgacagaagctcaactccaactagcttaagcaaaacaaataaacaaaaacctccagggcatttgttggcacatgtgcttgggaagttgagtcctgggtggggctcaagtcctaccatctggtgtttgtccttctctgtttcctgcctcctgcttcctacagctcttggctctgctgctttctgagtgttggcctctctctcctactaccgctcatccttctccccatgacgataaagatggccagtggctgtgtgtccttaaagttagctatccctcagcaagaaagaccacctctcccagcagctgtatgtcaaacatcatcaaggcatgattctcatcggggcttgggttttgtgtacacatctgaaattgatcgtcatggacaggggttcacgttctgtgcttcgtgagatctgagtcctgtgtgggtagcagggccctgatcagcagcctggcattgtaagtggggtaggactattcttcagcagtgggagggaccctgggtggactaaaaccacacttacccactacatgccctgcccactcccttttcctcctggccagggtgccctgagtagccttggcatgacgtgcctcactgtcatctgaccaatgagaatcatttgttcagaaaactaaggtccatagagcaaggcacagacctgtccctgggagctcagtgtcctgttgggaaggccgactcagagacagctttcattcttttgtgttactccgtgctgagctggttggggctcacagcggcctctttggacaggcagcagccttgcctcatcttaacctgtattgccaggaacccagcagccttcccacatgaatcaagttcatgtttgttatctcaaagtgctccccaccagcctttaattttgggggcctgctcaggtgctggactctgtcctccttgctttctgttcgttagtttttatcttgttaattcctttctgagtcaggtattaccagcctcttttacagatggggaaactgaggctcagggtagagaaagcctttgctgaggcccccccgcaggtgagtggcagatcaaggatgttgacctaaagttggtgctatgggcctaatgtttttgtgcccacacaattcatttgttgaagccctaacccccagtgtgaggtggggcctctgggaggtgagtcggttaagatgaggtcatgaggatggggcctccatgatgggattagtgcctttagaagaagaagaagagagaccagagctcgctctctctaccacatgaggacgcagtaagaaggtggcctgcactgaggaaccaaatgggccagcacctagatattggacttcctaacttttagactcacgggcaatgaattcctgctgtttcagccacccagtctatggcagcctgagctgatcagtacagtcggagttctcaacctccattggagtgagtgcctgggctccactgtactaaaagcaagtagtcctcctctggaagggcgtatgcatatttccaggcattttggagcctccagggaaaccctgggccctgcaggttcttgtccagaaccactggccacacgccctctcagccgcactcaatgccaggagacctctatggctgctcaggagtgggtccctgcctggggctgaagtccgggccctgggatctgcgttgggtcctgctgtcatggactgagctgcctcggttccctctttgggccccactaacagagaggttctctgaggacccccatcccttcagctgaacctaaggctaccaggagacagagggcatctgtggcctcccccagaaggctgtcctgaggttgtgcccattgtcttggggagtttactggaggaagctgcaggcctggactgtgcagtctgatttctttacctattttaggaacgatgctggctggatgggcgcgaaggctcacacctgtaatcgcagcactttgggaggccgaggtgggcagatcacctgaggtcaggagttcgagaccagcctggccaacatggtgaaacccagtatctataaaaacacaagcattagccaggcatgatggtgctcatgcttgtaatcccagctactcgggaggctgagacgggagaacgcttgaacccaggaggtggaggttgcagtgagcagtgagccgagatggcgccgctgcactccagcctgggcaacagagctagactccgtctcaaaaaaaaaaagaaatgatgctggttgttatcaagaagagcccttcccaaacacccagctaccttccaatgggcttttccttcccttcataacttgggtgttttcaagggtgaggaagtttaagtagtgaagccggtggggctggccaagggaacccgctgtctaatcctgtggctggaggaggaagcggggaaggtggattcttcatggagtcaaggaggctttcactgctttttcttattgcttctgctgatttcccactaggcttggatttggccatttgctggggttgggtgggtgggggggaagagttttttttttttttttatggagacagggtcttgctctgttgcccaggctggagtgcagtgctgtgatcacagcccactgcagccttgaactcctgggctcaagtgattcttctgcctcagcctcctgagtagctagcactgcaggcgtgtgccaccatgcccagttaattaaaaaattatttttgtagggctgggagcggtgactcatgcctgtaatcccagcactttgggaggccgaggtgcgcggatcacctgaggtcgggagttctaaccagcctgaccaacatggagaaaccccatctctactaaaaatacaaaaattagccaggcatggtggcgggcgcctgtaatctcagctactcaggatgctgaggaaggagaattgcttgaacctgcgaggcggaggttgcagcgagccgagatcacaccattgcactccagcctgggcaacaagagcgaaactctgtctcaaaaaaaaaaaattctttttgcagtgacagggtctgcctgtgttgcccaggctggtctcaaactccctgctttaagcgatcttcccaccttggcctcccaaagtgtgggattacaggtgtgagccaccgtgcctagctgtgttttgttgtctggcgctgctttagatgacccctgctgctgtcagattgcccgtctgggagctggggtcatacttgtggggtcataacagggccttgggcagcagactcctcaccgtggccaggcaagggattcccaccctgggttgggcagccctctccacaggatggcaaggggctggaggctcagcggacgggccctgttttagggattgaggacatggcaggtagataggcaataaaagcaccgaaccagccttaggttctatagcaaggaggtccagcaccgctcgtggacccaaactgtcctccaggaaaggcgggaggcagcttaggtgacctctgcacgtgttttcaaagctgtggttttggttgggagtttcatgctggctcagccacacaaacaatgacatggaacagggaggcgctcccatgtcagaagatgggtcctctccaccccagctcctccacactccccaccccccacagcccagccaggtccaaaaccctacatgctgcctcataggaaatggggtcccctgaggagaaggacaaaagcagacaattcctgaggacaagaggaagaggaggacggagtctcccttgtttgtgctgattcccagtgagcatcctctctggagcccactggggtttgggacttgcagggtgtgtcactaaatggcaaggaacaaggtagagacggctggcactcactgtctctgttgtggacactggcctcacccacagctccatgcacacgcctagatgcagaaattttctgtattggttgtttatccatcaccaacttctaaagcagcagatgggaaaatggaatgaacaaagtcaactttagaacaagctttgtgttaaattgagtacacataattcgattattttaaaaacaaagcccaagcagtgtttttctgtttttttgcatgcagtgttttccggtgtaaagagaattcactgccggagaagccccagcttagcttccttctgcccctgggcagccccgttggtttcagcagatggtcctgatgtctgaggacctgccacagtttgcgccagtccttccttttgctacttttgttgcccaagacgaggtgtgatttagtggttaaatgccagaatgctgggctggctggatttgaaccttacctcctttgagattcaattaggatgtgacctccgacagcttaatttccctgagcctctgtgttttcatctgtaaaatgggtacgataatagggttgttgagatttggcaggtgataaatgctgaccaagtgtttgctgttgcagtagttgttatggcagttgtcgtcactgtccccaatgtcatcactatcattctcgtcatctcaggacactgaggaaaggctgagctagtaatgaatagggttggactggtgctgcctctttagtgcctaagaaacgctaccctggccctgtctccaggccttgatctcaaggtgggattcatccatcatccaccacggcccaggagccagctgtcctcacttctggggtgacttgtgagtagataacaaagggggtgccctcaccctgcagcggagtccccatgggccttggggcccagagggagatggtatctgtttcccatgggcttcctgtcacaggcagatgacatctgctctctgctcagggtagatttgggggcctctgccactggctgactggaactctcttacctcattctagactcttccaggcagctttctgtttgttctctaacagaaacatagaaacaaaccagcatcttttctaaacaaagagggacttttcacaggaagtttgatgacctgacgcgttccccctgcttgttgaagcacgagcctcttctctgacagttagggtgacttgctggagaacaaacaatagacaatagttgtggcctacttcccgtgagaagcaagaatggtacaggtggatgttgggagcccccaaacccatggaaggggtttcctgaggacgtcctatagtccctgaacatgcagccgagggttcctggggtagcagcacccgtgtggttagccctgtaatgggctcacattatgaggcttccgtgggtaggccctgttcagagagctttgcgtgctctcatcctggggagtcagggttaggtttagggtcaagactgatataatggccaggcacagtggttcacgcctgtaatcttagcactttgggaggccaaagcgggtggatcacctgaggtcaggagtttgagaccagcctggccaacatggtaaaaccctgtctctactaaaaatacaaaaaaattagccgggcatggtggtgtgctcctgtaatcccagctacttgggaggctgaggcaggagaattgcttgaacccagaaggcggaggttgcagtgagctgagatcgcaccactgcactccagcctgcaagatggagtgagactccatcttaaaaaaaaaaaaaaaaaaaaaaagttgctgagttggctctccaagcctctttctcagagccaccttggagggggccagccagctccaaagcctggggtgttggcctttgggagggagggggccttgtgccagtcccccacactttgtctgctcctccagcctccttggagtaccttgaatgtaccttcctattgctgttccctctgcccagagtcccgtgctctcctctccacattccttcactgctcattggcattcagggttgggcataaatattaccttcttgggggcctgttatttgcatcctaactagcagggctcctttgcagcccactgccagccctgccattcttcatcacagtcctctgttcatctctttgccacttgtcaccaaaatgtgtaattgtaccttcattgatgtccagtcagccttctgtatctgcaactttcacatctgtggatacaactgaccgcagattgaaaatactcagaaataaaaggatgcttgggtctgtactgaacatgtacaaacattttccttgtcattattccctaaacaatacgttatagcaactgtatacacatagcacttacattgtattaggtattagaagtaatctagagatgatgtaaagtgtataggaggatatgcatgggctttatacaaatactacaccattttatatcagggacttgagcatccatggactttgccatctgaggggggcaccagaaccaatcccctaagaaaccaggggacaattgttcacctccatgacaggcccataagctgctctgtgcaggtgcaggtctgtcatgcggcccacagccctctctgcagaagaccctcaaatgctgggggaatgcacaaattagctggggggcagtctctaggagattttcagcagtttctcctgagaggtgtgaagctgagagttaagtagggttttgtaggtgtaacaataggcattttccttccagcagctcaaactgcagtgtgcttggcacgttagtgcaaaggaaaaaaactcacttcattcttaagaaagctctggaaatttcatctgtgtttgagtgagttggcatgctgggcccctggcggaacacaaatgtggaatttgaactctaccctacctcagagagcaaggctgaagcgataggatgaaatgcatttaaatgtcatgagtgttattattagtcgtaatcttatctttgttaataataataacaggacccgcctagaagtgactgaatagcagaccgggctttcgtaagtaagctcacactgtcagatagcaccaggacctggggtggcgccggcgccgttagggagggagtgttcaccggaaacctgcccgggccacacgtgtacagccacatcctccacgccctttgggcgctggtcattcagagaggccctctcagacacgcctggcctctttagaggctctctcatcccctcgagctgccaacacaatcaagggtctgcaggtttgggaactccaaggcagtttctctttaccaagttctctgcatagccttttgccttctattgtttgctgtcccagagactggctgaaacaatgtgtttcctacagattttgtttgcctgcattgacttctttgtttagctctagtaaacagacatttagcatatacagatctgcacacttgacaaagaggaatttggagccctggacggggtggctgcactgagtcaccagctccttgaacctgaagaccttggatggtccggagctcgtaaatgactcaccccatcagtgctgggctggtgtgtgcggggttttgtcgccacctttggcaatggaagaggggaacgtggggcctttgactcgtcagggaaaaacaggtgtgtgagcactaggttggtgacgaggtttagcagcaggtggactctggagcgtgactctggagttgccagtcccagctccagcactttgattagctgtgtgacgttggggaagttgcttgcctaatatgtgtgtgtttcctcatctgtgaagacagcactaacctcgtaggtactcgggaggctgaaggagttcatctgtggaaatcatttggcatgatgcctactcttattccttgtctgtggggccctgttttgtgggcttgccacagtctcatgactctgctgggaagagccttcctgcgggcccccttgagctaggaatagaacctggatttctggccctgtaggctgacgcggccctcctagatgtagtggtgatgccccgttcagcagagatggttccaaatgttctgaacttctgccttgtatgggaccctgtgccggctgaatcgcatggtagctcagggcatagatgctaaatgggacggtcctgggtttgcaccctggcctctgctctcaccagctgtgtgagcttggatgtgttacttgttactcagagcttttctcatgtgtaaagctgagtgcatgaggccgggcgtggtggctcacgcctgtaatcccagcactttaggaggctgaggtgggcggatcacctgaggtcaggagttcaagaccagactggccaacatggtgaaaccctgtctctacaaaaatacaaaaattagccaggcatgatggcgggtgactataatcccagctactcaggaggctgaggtaggagaatcacctaaacctgggaggcggaggttgcagtgagccgagatcatgcagttgcactccagcctggatgacagagcaagattctatctcaaaaaaaaaaaaaaaaaagaaagaaagaaagaaacaagaaactgagtggatgagatctctatttcatggggtcgttgcgagcattaagtgtgctagtgtttgtgaagagcttgggcggggcctagcacagagccctgcatagtagaggttttgccctgacccatgagctgagcattggaaataccacagaatctggagtggggagcagaggaggtgtcatggtccttaaggcctgacctgtcagatattcacagttgtctgtgtcacttgttctcgcattgatagacctggagggacagggaggccagcccgttgtggaggggactccgcaggctgagggttgattctggctctgagcaggcttcaagcagaagctggctagccccttggcagggaggtggcagtccctctctgacgccttccaagtcctccccagtccttctaggattcttttacggaaccaaagataatagtcccctttgataccacatacaagccagtcgtattccatgcctcggaatatgaacaaaaccagaccggcgatggcttaagcctcattgagaggcccatttggatagcaggagattacatggggtcatgagtagacagaatgtggatttccagaaggtgcctcggcagctccactgtaggcataaagcaggtgattttgagatgtgtccactggcacctgttctgaggctggtggtgtcgggggttgtggtcatcacaggttgcattaaaagggggctttgatggggtcttttccagatggagctgctttgtgggattctgctgccctgccttgggatagcaggtcagcagagggtgagctcaggagctgcaggctacgtgtgacgtttaaaacatattctacataaactcatccatgatctattcatggtgtaatggatgtctggggcagggtgctagcttcagacgctccagcccaggctttctcaagccctcccaaggtgctgagacatttggcaccctcaggccacaagtgtggatgggccgcggctttgacccacaggggaactcatctccccaagctttgtccccatgggtcacctactttgcaaccctagtttcgtgatttggttaatggtgtttaagtggctgagccatgtatctggggtttttcagtgccgtcactattatttcttgttgagatttttgcacagtctccttccctcaatcctatgtgttcttttttttgatggagtctcgctctgtcaccaaggctggagtgcagtggtgcagtctcagctcactgcaacctccatctcctgggttcaaatgattctcctgcctcagcctcccaagtagctgggactacaggcacatgccaccacacctggctaatttttgtatttttagtagagacagggtttcaccatgttggccaggctgatctcaaactctggacttcagtgctcggattataggcgtcaactaccgcgcctggcctatgtattcttttaaacttcagctcattagagctgggtttgtgtcataagtgagagagccctgaggtgcttggtttgaagcaaagcttggttagccatcagcatctgattggagactggtcccaacccacccatgccgctgaggaggggacatgggtgctggccagcaccgagattagaacactgacccggtgacatgggagactgtggtttccctcatggtacagaaacataaaccatacttgtttttgagatgtctgaccctgacaagactgggaaatagagctagcgactgataagtgttcaggggtggggctgcatgtgggcattgtaggaaaagcgcactggcgagaggcgtacagagggatcccaggcgttagcttccattcccagcttctgtagggcacttacctgtgcttccttcagaaggtgaccaaccagtgaactctgcatgttaccttggccttgtatagggtggctgggtcgtcagaaacctgggaggctctggacagttgactttacttggctgttctttggtgtttgttccattcagtgatgctgctgtgcctcttgaggtgcaggtgcaggctgggtatttctccctctagactgttgcccacagctggaggcaaagggagtccattcatttttgcctgttgaatgaagttagagttttcggtttctctgtccccttagctgaggggctttcacatcctttaagagagctggcgccctctgggtggaacactgatcgggaagtcagcacccaggggttccagccttggttccacctctcactgggtggcctggggcacttgtggcctgtaagtacctattgttatgagagagttgctgtgcaaacaaagacccttttagtttaaaccttcttggagacagcaattttgcaaagcagtaagaacctgggatttgaattatggtttagccacaagctagcttcctaagcactcagcttcctcacctgtaaaatgagctcatgatagacccagcctctctgggtttggggaagattgagagcatgcaggcccaggagcatggttcctggcacatgggctcagcttcgtaggtggtggctcctctattactaccctcatgagtgtgatggttttattaccaccagagtgaagttcctgactgtgaggtttcagacgggataagcgcctggagtaaagtgtcagggcacatggttgatcagtatcttgggtttctcctctccaagcagtgacctggacttgacctactagaaatgggatcaggtctccagagagaggaaccaccttggctctttgacctcggtcaggcttggataccgggcctccaggtgaaagcctcaggtgctgttatcacttcctgagacagccagtcctctcacttctgtgtttcctttattacactttactatgaaggagaattgatacagaggaagaaaaacatacagtgaaccctttatttcctatgataaatgatgatttttggaactggggtccagtctgaattctctaaggcatgcttgtgcgtgtgcacgctctctctctctctctctctctctcgcacacacacacacacacacacacacacacacacagagtaatggttttaaagtcatgacatactgtgcttttggctgctgctgtttctgactgatgaccccaatgagactccaaaaaattagatgggtgcgtttggaaggcattcagaaattactcattggaagaaaaatgcagcgtttggaggaaggggagggctgagcatgtgtaaaaatgagtgttatgcgcttagtgttccgaattcaacatcagtgaggaaagggagggccgcaggagtttggggaccgtctcgctaagcaatactgcaaacacagacagtgacccgattttccatagctgtgctagctcctcaggaggttttgagaatccccctcatttgggtttgaaggaggtctcagtgtccttcctcctctgtttgccagattaaagtttcatacctcagagctgggatacgctgggttttgattgtaaaggcatgcagctcagactctgttgtaaatggtgagtttttcttttttttattacactttaagttttagggtacatgtgcacaatgtgcaggttagttacatatgtatacatgtgccatgctggtgtgctgcacccattaactcgtcatttagcattagatatatctcctaatgctatccctcccccctcctcccaccccacaacagtccccttcctgtgtctatgtgttctcattgttcaattcccacctatgaatgagaacacgtggtgtttggttttttgtccttgctatagtttactgagaatgatgatttccaatttcatccatgtccctacaaaggacatgaactcatcattttttatggctgcatagtgttccatggtgtatatgtgccacattttcttaatccagtctatcattgttggacatttgggttggttccaagtctttgctattgtgaatagtgccgcaataaacatacgtgtgcatgtgtctttatagcagcatgatttatagtcttttgggtatatacccagtaatgggatggctgggtcaaatggtatttctagttctagatcccttaggaattgccacactgacgttttaaaagtgaaatcagagagtgtttttggttttcttgaagctgcctttgacattttagcaacacagctgggagggtaaggtagaaaactccaagaagttggaattcaactgtcaaagtcaaagcggggatggacttttgggagtcctgccacagcgggacctgaactcaagtcttaacttctcctctagggctcttgtgtgaaagaggaatagcttcctgcagttcacaagggtcgtaccatgatcaattattattacgttacacatcacttctgtaccaatttatattggcacatgaagttaatatatccctatatccatgcattgcctttgtgatttgggaaaatccgatgccttggccaaacctctgaatcatgtgaccacgttttagcctaatttggtgaacaaatctttaacctccatgtcttcaagtgcagcatcagtgggtcatggatccagaaggttggctgattgggattctcttgctgggtgctgccgcaccttgtgtgtcgggtgccgacaccttgatcatttcggccagacccccaagagagcccacagaccaccatgctgggtggaggcacccaacacctggctgactgcgtgaacttcttgcttcccagtggctctccaaactagttgtggaggacgcgaaggggtttcctgatgtcaaaataaaaataacgatgtctgtagtttcccaggaggaataattgttgatgttgaggcatgatctctgcatgcattctgtacctgctccagggtgccagtggaggctacacccctctccccctcttctgctctctgcgacacccctgccacaacagaccttgactctccaggctgggacccaggaatccgtactctttcaaaaccactttattgagtgtaattgacagacagtaagccacacatatttaaagaatatgatttgagaagttaggatatatccatacccgtgtgaatctacataccacaaacaagttatccatcactgctgaaagtttactcatgcccctttataatcctgccctgtcatcccttcctgtcccctgaaccctaagcagccactgttcttgctttctgtcgctctggattcgcttgtattttctggatttgcttgtattttctggatttgtctatagatggaatcatatagcaagtaccctttctcatgtgcctttacttactcagcatgaagattttgagattcatctacactgttggcgtatcagtagttcattcctttttcttattgagtagtgacccactgtatcgatagaccacagtttgtttacccactcaactgtttgcgcaggtgggttgtttctagtctctctatggacagagatttccttttctcttgagtaaatacttaggaacatctggatcatatggtaggtataggtttaacttttccagaaattgacaacctgttttccaaagtggttattctttgggacaaggaatcgttgtttttagataagcttccccaattctcctgtggcctctcccttcccgagacggtctaatggccctgagcgatggctcctatgtgcccgtctccacctgttctctcagggctagcttggccttggcacctcactgcaggccgcccctctgcttggggtgctggacaagcagaaggggaacactcaagttctttctctccataactgccttcgggaagccatggcagatgcgttgactctctgtagggctggcaagctgtgtggcgagtcccttatccaatgtcgctgtgtcccacagggaggtcttaaagaggcagccgacttttgtggcctccttgtgaaagcttcgatgcctcagggatcatttctgagctgactgctagttggacttgggcccactgaagagacagcctgggatcggatgtccagaagagacagatctgagcacgtctctttcctctccctcctcttttcttcttagcccttccacctatcactcattcattgccccttcctaggttctgtattcatttgctgggggctttaacaatgagacgttattttctcccagtctggaggctggaagttcaaggcctaggtgccagcaggattggggtccctggagccctccctccttggctaggagatggccgcccccttgctctgagcccacatggtccttcctgtatgcacctgcaccccggtgtctttctgtgtcctgacctcttcttttttcttcaagacggagtctcgctctgttgcccaggctggagtgcagtggtgcagtcttggctcactgcaacctctcactcctgggttcaagcaattctcccacctctgtctcccgagtagctgggattacaggcgtgtgccaccatgccaagctaattttttgtattttttttagtagagacggggtttcaccatgttagccaggatggtctcgatctcctgacctcgtgatccacccgccttggcctcccaaagtgctgggattacaggcgtgagccactgcgcctggcccctgacctcttttataaagatatcagtcacactgggctggggcccagcctaatgaatggcctcatttttgcatgatctcctctttaaaggccttatcctcaaatttctccaaatacagtcatgttctgaggtgctgggggttagaacttcaacacaggaatttgggggcatacaattctgcttatcacaggtgctgagccctgagtgcagtgcttatgatagaaagatgagctggatagttcttccccttgtgcagctcagcatcctgggggagagaaagtgggaagatccagttttctgatgaaagaagatggaaggaggagggctcggtgctactaggggggtgggagtggatggttaagaccaacttgactccagtgacagcagcaagggctcctcattcctgttgatggtgtgtccttcaaaacgtgccgtggttctcaaggagtgagtggcggtggcctgcagccctctggcactttgtggccgaggccagctccaacgctgcagggcaagaagagccacgctgcagggcaagaagagccacgcagcagcactgatgtgcgtgccagtaactgcctggtgttctagtgagtgctctccctcgaggagcctactccattctctaggggatcatgtgaaaagtagagcagctttgggaaagtgtgaagtctctgttgtgtctctggagaagttatcgcctggtttgcacatgctggagggtggggtggtggtggaggaggagggcgcatgatgcctacaacctggctacactggctcttttcatccttgaattcctgcctcaggaaccctacaaacccagtgcccagagtattgcactggggccagaatgggaagagccctgaatacaagagaactgtggtattggggctatacctataagcatcaggaagtcccctgctctgtgcccagggagttggaggccttagtacccttatctctggaggcttctccctggccgtgcagaacagctgcaggaaagggggaaagcaacttaacaaaaattggtccagggacaaattatgcttagtaatggattatcccaaacatgctttgtctgagtgtcctgaggccatggtgacaaaaagttagtgccgtaacacacacggaatcaattctctgagcctgtgcactgtcacacttgttgcctcaagctcacaaatggagtttttcttgttggttttaatacctgcaggaacgtgaatgtcggctctccagccagcaaggccagcgcccacccatccatccctctgccatcctccataggtggttctgatggctctggtcagctgtcattcgtcctcccatctctcagcctttgtaggatagttgatacctgttttattcttttattgttattttaggggtctcagcatggaaatatattggtgtataagtacctgttccagtccttgttttcacttctcttgggactatacctagaattggaattgctagatgctatggtaattccgtgtttaattttttgaggcactgccaaattatttttctcccagaatgctttggaggcaatgacttcctgtttccttccttccttccttccctccctccctccttttcttttttttttttttttgagacagagtctcactctgtcacccaggccagagtgccgtggcccaatcccagctcactgcaacctctgcctcccgggttcaagcaattctccttcctcaccctcctgagtagctgggattacaggcgtgcgccaccacgcccagctaatttttgtatttttagtagagacggggtttcatcattttagtcaggctggtctcagactgctgacctcatgatccacacgccttggcctcccaaagtactgggattacaggcatgaaccaccacgcccatctgatttcccgttttctgcagggtaaagcctcagggccggcccattgctttcaggacttttctcactctgtccccagcacaaggatcttctccatctagatggatttgccaccatgtgctgcctccatgcttgggctgggtcattctgctcacatggacacctcttcaccttcctctcagggactctgcacatgctgccttcactgcctccttgggaaaaaattgctcctcccggctgctcccaaagcagttcttgtgggtctggccagggacccccctaaccctactttactaactaccctgggttggcagtctctgccccgagctctcctgttcctctcccctgctcttgagctcccattaggtgtcgagcacccagaagtggtgatggctcgttcattttggccatgtctgtgcacggctcacccctggtgcttgtatgcggatgcttgtgaccacacagcctgtatttgagccactgttctgtaatcagcctctcctgtggtggcatcttcttcacagggagggatctggccgacctcgggtcttagcacggctgagcctttgaagctggcaggttgccctgggttcccggggtggtggttggccgcctcttctcttgggcccctgcccatttggaagcgtgcccttgagcactgccatccccgagccaggccatcaagtcatccgatcccccgaggtggctgagaagctggctgaatgtccctgctgtgaaccagtgatggagaaccaggctgctacttagctttgtagatggattcggtaaagactaaatctcttatttctaagacgtgatctcattgcacagacaacagcctgagtggcctgtcacccaagcagaaatcctggagacatctgttgagcctatcctgtttctcattgccattggtgacctccctcctgggcatctgtcccttgccctcccctccttggtctgcgtctcttgctctgctggccactgtcgctttctgtgtgatctccccatgccagtgtgccctgctgtgatttgccttttcacacagcacctcttccttgagttcggacccaagctgcactctccaaaccactgacttcacttgctcctccccccactcacattttggggccctaaattactttagtatcgtgagtgagcactgggctgtctctttcacagtctagatttgcacaaacctttctctgagcctggaccattctcccaggtcttcaccaggccagttcctcctggagctccagactgcagcagagctgtctcttgctgggatgggagacacttctctggccccagtgctgctgttccccctgctagttttccccctttccttggcagcccgtctcaccaggctgtcttgtaacagtctgttttccttgtctgtctccctcaccaacctgatgtgtctgcactgctgtgtcctcagctcctagaccagggtcgggttccggctggggcaggagaggcgtgtgctgcggccctggatgggctcatgggcagatggactatcgagcagatggatcaaggccccctgtgggtccaggtttctccccagagcctgaagggttggccccggtggtctgtgacagcttcctgctctggtggtcagcagctgggcacagaactacctggagtggaggtgagatcccaggagttgtcaggagagtccagggttggcgggggccccagaggcttccgggaggcttctagaagctcttgagcgctttctcctgcccaacatgaatgtcttgtcttaaaggtgaggccttgtgagaaagcaggactaggtgaggccggaggagtgacagtcgcccagttgatgctgtggagttctccaggctgctggcccatccagtccctcctctaggccctgagttactgtgtcactggggcctggtcctgctgcagagttggggcacatctcagggcctttcagagctgataaggggcctggcctgctttcagttttttggttttgttttgaggcttccagttcattaaaacaattaaaatgccctaagaaagctataaatattaatattatggtattttaaactggtaacctttgtcaggatggtgttttttttttaaaccaaaaacaacatagcaatataattagtctagtcacaaggtaatgctaggatttataggaaatattaattcatagtgtgctcagtctgggtggacctgtgatgggacgggagtgtcctccagccctgcagctcaacatggtcacatttggagatgagatgaagtatttgactttgaggcttctgtgaaaatgaatccacaccccattcccacctcgtcccctaacctgcacccctccaagccctgcaagtccttcttctaggctgggaaatgaggacataggagtgaggctgcagggaaggagtgagacatacacgttcctgaggccttgagttccaggcttcaggaacgcctgcccgtgcccgggctctgtattccctggccagtgctgatggtgtctctggcaaaaatgcaagtacccttggaggctaggccttggggtggagctagctcagacacctgccctctgggaacattgccttcttctgctttctaatgctgatggcttccctgagatcccagagtcatcaagggtcaccctgcagatgggaccatgagccccactccccaaaatgtggcttgctcaaggtcacataggtagtagcaaagctgagacgtgagcctggcccttcaaagcctaaattggggataactctggcaagagaatgtttcaaggttcatctttgtgtccccagagcctggcatgtcatagggagatagaaagtatctgttgaatgagcaagagcagccaacatggatcgagagccaggaactgtggtaactgcacatctgtctgatctcattgattcctccccagctctgggcagtgtacttcggtactcggatcccctgtgggcagatgaggaggaagctgggtacaggtaggaaatgaaacctgcccaacatcaaacaaccagtcaaggaagctgaggtttgggcccagatggtgtatgtcagagccactgtctaggccagcgctgtccagtggaaataaacgtgagcctcttatgaagtagaaaaaattctagtagccacctttagaaaagtaaaagaggaacaactgatattattttaataatattttaataatatattttatttaatccagtatctgcaaatggttatcattttagtatatcattaatataaaaatccttttcttttttgtagaaatgttgcctgggctggtctcaaacagttctctcaccttgacctcccaaagtgctgggattacaaatgtgagccactgagcccggctatttaatccgatatgtacaaatgatcattttagtacaccatcaatatgaaaattattaacaagatattttacattcctttttctatgctaagcagttacaatccagtttatcttacctcagagcacctctgaactcccaccagccacatctcaagtgctcctcagcttctgtgtccaggggctttggcgcagaacaggctgctgtggcctctcagtcgtcagtgggtgaatattgggagttgttagccatttggaggtgtgggaagcatgaggaggtgatgaaagggcctaacagacagaggtggagggtcaggcctgagcctgtgtactgggctgccagtgacaccacgtgtctctcccaagtgtgagtgctggatgcaaggctgccgtcctggcaaagggatgtctcactggggcctctcgtggaaatggaggggaggtcctgggcagggctctgcagagcacaggcatccgagctccccatcctgggctgcctggaggacttgccagtctgcgtggggatctggctctgagctctgttgcttttggccaagggctgttgcaacactcccggagcccagaacaggtacgatgtgttcctcatgaaaggttatgaggtttcagacataacagaggttctgaggatgcaaagagaggaggtctcagggctcatgtctagagtgaagtcatcagacctatacatcatgggttcacgttggctggcatctctaagcgcacctcaggctgggggcaaccagtactaggggcgacaaggacagactttggtggaggtagggggagcactaagggactcctgttttctcaaatgggtctctaatgaaagaggttaaagaaactgtcacttaaagcatttcctgggttggtcctgagtacagtgggagggtgggtggtaagaagaaacctccctgggccaggctccccaaggctcgattcctgggttgggggcagagattggaggaatctgtggccagccctggcccagacagtttctgaaaaagcaaatcagggtttgtaacagttaagtctgtcccggggaagtgttccattgcaccttgatttatgccactggaaacattttatactgaggactgtccattggccaaacaagccttggggccaaaggcacagcagggaagatggttgctgtgtgaaccatcagctctactctgcttgtggggaccatgggcgcagttcttaaaagcccgcactgggtgatgcagaaatggggcggtgacacggtaaaaggagcggtggcaggcaaaaacttttaacaacaacagtaaaacctgttttataaaagccatatccgtggaggtaggaattgggagcagggagccgctgagtgctggggctgggacctggccagagtagggagggatgaaggacccctgtgatcaaggtcaagtcctcacctcatgacttcctggcagaacgtccttgggcaaggctcagcttccctgtctgcaaaatggggctcataacccctcctttccttgcaagctcatattagatgctgcatgtggaagtacagagcaaagtaccccacaaatccagggggttattctttctattaaccccactgtgaatgttttactttcatttttattaaccccactgtgaatgttttactttcatttttatgtattctgtagcctttaggtgtcatgttactttatcaggattttaaaaacttttcattatgaagcgtttcaaatgtactcaaaaaatagagaggatagtgtaatgaacaccctgtaccctgcagccaccactacaactcttaactatttcatcagggcaatttgagctcactgttacagtaatccctttcattaattgagttcccaaagtgctttaagtcctttgaagtaaaatcttcactgcacaagttggctcaaaatctgcccccttgtttgggaaaaagagtgtttttgtatgttaggtttttttgactcattcttgccacagtctgtgattggatttttcagtaccatctaattgttggttgtacaatatagagacagtcacacgtgggggtctggagggccccagggcccccctcagccttccttaagctaccagggcaagttcaattctctcaggagtttgggggcctctgttgactctgcttttcaatttgctataatttgaagggaaaaggttgttctggagtggctggcaggaataatgaagggctgggaagtttgttgtctccggtcagcccgcctcccctgttgcagcccgccatgcaggcaccccttggaagcggtcactttggggctggtcacccattcccttgcctggaggcagaggttttggtggaaaaggtggggaggtgaggggtcaggggatgaaggccgattgtttttatctgtttgggatcaaaggctcagtgtgtataacaagcttctggtaaaactctttttcttgtccgtaagatggcattggtgatgactctgggcagttgtgaggatgaaatgtaaggtccaggagatgtcctgtctgtcttgttcactaatgtgtcccctgtgtctagaacagtgttcgcacagagcacatgctcaataaatttatattgaagaataggagggaagggagggaggaaagaaggaagaaaggaagggagggagggagagaggaagggagagaaggaaggaagaatggagaaggcagggagggaaggaagcaagggagggaaggagagaagaagggagggagagacaggaggaaaggagggagagaacagggagagagggaagaaaggaagggagggagagagggagggaggaagggagagaggaggaagggaaggaggaagggagggagagaagaaagagggaagaaaggaagggagggagagagggagggaggaagggagagaggaggaagggaaggaggaagggagggagagagggagggaggaaggaagggaagaaggaagggaggaaagaagggagaaggtaaggagggagggaaggaagaaaaaagggaagagaggaagaagggagtgaaaagctacatctgtccgtccattattaataattcatcacaaatctttcatttcaggataaggaaatgtcattaggccctcaaggaaaaaaatgcctgttttcactctgggcttagaattcttttctcttcttttttttcttgtagaaattatatttccatctctggggcttagctcaactgatatctcacctcttaaattgttttggccttcctctggcaaagtccagccccccacccactcccacactgctgtccacacctcacaaagcagagaggaggacggctatgactgcaccgtatccagcgccggggctatgtggtcatgggatgtgtgtgcaaggctggcacagtcatctcccccataccatagaggacgctgaggctttcaggtgaagtgagttgcccaggtagacacagccaggaagcaggcttagatccaaacacttgtctgatcccaaagccctgctcattccccgtcctccctgctggccctgggttcatcctaaccctttgcttttagttccccctctctggactggacggtcctcacaggtagaacggcctgtgcctgtgtcctctgctcttagggttagcccagagcggggaggccgtgggtgtgcagtaatcaaactgggcacatcctctggggctgcacctcatgttagagacagtggtgtgggctctgttcccctccccaccctttctgcctgcagagcctccctggagtttatgagtcctgatggaggtggggaaggccgtggcttaccgtcgacacacatcagtacccggcaggagtggcagaaggtctgtggacagggcataggggtgcagggggaggagaaagtggaggggctccaagcacccgaacataagctccatggcagccaggaccttgtctgtcttgcttgttgtagttctagtgtctggttcagggtctagcaaatagtaggtgcttaacaagtaggtatcgactgggtggcctccgagccctgcttccctgtttccccaaagctttattgtgggttctttagctactgctgagatgcagataggccaagctgagggaccatcccgtgtctgtgaccctgccctggagtggaccacatctctgctgtacctcactgtgtcactgctgcagcaacatggtgggctcttggctggctggaacgtgaccccacaccctgcgtctggttggacaagcatccctcagcatggactggcttaggtgtgtgtggggagtgggggtggttgattcccagggcagcaggccggctgctcttcctcctccctgctgttcctcacccacccggcctcagccactccattcctggatgcccatgtcccagtggcggctggctggtcatccagaggcgaatgcggaacatggtgtctgagctactaacctcccaccttgggtatgcccttgaacttttctgtaagccaggctttccaacccccaacagcactcaggtcacattcccagagagcctgcacaagagggctgagtctgtttatttttcaagatttcaaaaaacatgccttttccccctctgaccttaagcaaaacttttttttccctccaacacttgtatttttaacttcatgagaaaatatggtaaaagggagcagattttattttcagaaactgtgatttttcaagatttttttttatttaaaaaagaaaggctttgggggatggggagaataaagatttttgttttgttttgttttgggtgctaagggggcccagagccacttctctgtggcccctgctcaaactcctccagagattctggcatgttgaggctgcagctcttttggttattgtgatcaaggatttctgggcacctttccttccccttttgaagacttaggactggaccagctaagggctgtaaacaagcatttccctcccttggcaggaagtgcttaatgtctttgcttttgggaaccggtgttctgggcaggctaggaggccgcacctgacctgcctgtggctctcttcccactgtgggggtcagaagatggtggctgcctatgtgcatgtcacagatcctcacttccagctggtggatgtaggatctgaggcccagagagggttggtgacttggccatagtcacacagccacctggatagagatgagtggtgagtggtgaacccggagaaacatggcttcttgcctccttggtctttgtgcacgggcctcccgcttcccgagtctctcctggcccagcagtggtttgctgaaggctgttttattttaggcaccggctgagctacctctgatcttgttgggttagcctaggtgtggttctttggtttttcagtttgtataaccatgttctttgttcagctcctatcagggttagggaggtcaaacacctatgtgtcaggatacgcctgacacacactatttaaaactcacactgttttaaatgtatagtatttaaaactttatggtcagctgtacttaccggctgagtacagaactaggaaagctggtggctacttgcaaggagcagctgcttagtagcggaggttgagtaataaggaccccagttgctgaacagctcctggaagactatctgttcccggctgggcgtgatggctcaagcctgtaatcccagcactttgggaggccaaggcgggtggattgcctgagctcaggagttcgagactaccctgggtaacatggtgaaaccctgtctctactaaaaatacaaaaattagccaggcatgttggcgggtgcctgtagtcccggtgactcgagaggctgaggcaggagaatcgcttgaacctgagaggcggaggttacaatgagctgagatcatgccgctgcattccagcctgagtgacagagcgagattccgtctcaaaaaaaaaaaaaaaaacaaaaaacaactctgtccccttctccctgtggccgtcacctctaacctctacggctgttattctggttcagtctcatttcttctctcggacttttgcaatagcccctaaaatgctgtcctcctggttttgctgacatcgtgacgattttaaagctgcatctgaccatttccttttcacaaagtggttctcacttctgcctctagaaggcaggcactgtcttcccttcccaggtaccccgcaatccagccattcccaaggactcacacagcccttggaaacctttctgcttagaatgttgtcctgtcctcttctgcttggtggctacctacttgtccttccgagtccctctgagacatcccacctccggggagccttctagattccttgggctgggtttccccttctgtgtgtgtgtagccttctgctcacatcggtcctgcaacagccctgtgttgagacataatcatctcttccttgtttgtctcatcttctgggctgggctcctctaaggaggggctgctttccatccttgtgttcctggcagcaaagccactgcctgtccaagtcagagacaggagcatgattattcagtgaatgagcccaggatggagtgaggaggattgtgggagaacaggagggtcagacagattgttctgtagtggtggctttgcagaggggcaagacttctgcaagtcagtccttgagggatgagcggacattagattggtaggtgaatttgggatgggggatgtgctagaggccccagagccagccgcagggtatggggtgatctggctggttgtacatttttctccatgatcttcatgtttcgtgtagactgatcccttctactttctgaaagctgccattggaggtgaagcagggctcctttggatttgcggtatcaccaattcggcaggagatgcagtgaagctacacccagctagacccatttagctacacccagggttgggcgttcagcctggcatccttggaaaaacaggtctgggtgcaggctccctgtggccactggcaggatcctttgttcagtctggagctgggtgtgatggtgtgaccacggctgcctcgggcgctggtgggtgcagagctgcttcctggagccaggaaggaactgctgctgctgcctcctcctcctcctcttcctcctcctcctcttcctcctcctcctcttcctcctcctcctcttcctcctcctcctcttcctcctcctcctcctcttcctcctcctcttcttcctcctcttcctccttctcttcttcctcctcctcttcctcctcatcctcctccttctcttcttcctcctcatcctcttcctgatcctcctccttatcctcatcctcctccttcttctcttcttcctcttcatcctcttcctcatcctcctccttatcctcatcctcctccttcttctcttcctcctcatcctgctccttatcctcattctcctctttatcctcattctcttccttcttctccttttcctcctcatcctcctcctccttctgctcatcttcttcctcctcctcctcttcttcttcctccttcttttcctcctctttttcctccttctcctcctcttcctccttctcctcctcttcctccttcttctcctcctcttcctccttctcctcctcttcctccttcttctcctcctcttcctccttctcctcctcctcttcctccttctcctcctcttcctcctccttctcctcttcctccttctcctcttcctccctctcctcatcttcctccttctcctcctcttcctcctcctcttcctcctcctcctcttcctcctcctcctcttcctccttctcctattcctcctcctcctcttcctccttctcctcctattcctccttcccctcctcttcctcttcctcctccttctcctcctcttcctctttctcctcctcttcctccttctcctcctattcctccttctcctcctcatcctcctttcttcctcttccttcacaaacacatggtgcctcggcttcacagggatagcccccatgttcatctgctcattgcttctgggttgctgccttgggcaggtggctattttggggtctttcagataatttaaaaaaacccaataccctaaacctccccaaacctaattctcaccctcagggcctaagtacatttgaaattgcacacaaacttaaggttgctgtgtgctagatgggatgcggtgagggacaaggctctccaatcatagtttttcctaggtgtctgtgagggattggttccaggacctcctgaggataccaaaatctgcagatgcacaagtccctgacagaaaatggtgtcatatttgcatataacctatacacagcctctggtatattttaactcatctctagatataatgtaaatgctatgtaaatagttgctatactgtattgtttagggaataatggcaacagaaaaagtccatacatattcagtacagatacagtttttttttttttctgaatgttttcaatccatggttgattaaatccacaaatgcagagcccgtggatatgggaggccaactgcgtgttgactttatgttttacaaagcaccctctaatcattgaatactgggaaacttcaagctctgggccaggcactgcactcagcatttggtggcttcatctcctgtcatattctggagccgtatgaacaagaattttcccatcttataaataaaagagcgaagacctgaagaagttatgtataagctgttgtttaaggttatgcagccaggaagtggcttactctctttgaatcttaccccattcttgtgaaacaggtggaggacatatttttatctcccatttaacagacaagagacttgaggtggctggatgccgtggctcacacctgtgattccagcactttgggaggctgaggtgggtggatcacttgaggtcaggagtttgagaccagtgggtgcttttctctggcgacgcccagtctgtttcattagctaacagatgctaagctctaccatgggatagttgtaaaaccttgaatgcaaagcttgaatacaattgaggagcagagatggggtatacagcaagcactctgtgtattaagtgattgttgttcctcgtctgtcttttgacctcccagtgcacagccatgggtctgtcactctggtgacctttggccgtgggcattgggaggatagtttatgttgactgcggattgccaggtaccaagtatcaggcaaattggcttctttgtacattcctccttccggatagaccttgggcctcctcgtcactgcccaggagatttgctgggaatctaggagggagtggatgatggcctggatgcctgggtggtgctgcctctgccccgaggcagcagtcagtgccagggtggggctgggtgggtgctgccatcgcctcggggtggtacccgagtctggagtaggaacaatactctattgttacgttaaacctgaaatagacgccttcagatggagggggtgagtatgaatctattacgatctaataatgacaagagcactctgtgtcttttcagatgcttgacaatcacctgctaatcccgggggtctgggagctgagcattttcaacctccacccccacctctgctttgtggagttggggaaaaacagagacccaggagctgtgaaatgagggaggctcagcttctccacttactttcatggtgtgaggagacgcatgtgtatttgcctctgacccctcctgcagggaggaaagcgtacctggatctgggtgagaggcatgtgtggtgatgagaacatttcacagacccaagttcaaatctctgctctgccactcgagcatatttcagaacctgtcctagtctcaatttcttggtaaggtgagactataaccacttttaatgggtccacaaggcctgatccaacccagcaggtgctcttgcgggtgaggaccacatctcggttggttagacgtgtccccccagccctctgccaggacctaggagttggggtgaggggctgggttgcagggaaatgttgaatcccaaaagcagatttcccaggcaggcactgtcctgacccaacctgccgccagccacctgtcaagctggacctctgggcttttctctccaaatgctcttgttctcaggaaagggccaagactcaccccaggcacaagataagtaggaatcaggtgtgagccagtggtcaggagatttgggtctagactctgtgtggccagggtcattgctcaggttcgcagggctaaggaggagggaggcagggggagacatataatttctagaacttctgaggttctaggacaggggccagcaaactgtgacccttaggccagttctatttttacaaataaagttctttagttcttttggaacagagccatgcctattttttacatattgcctatggctgttttgctctccaatggcagaacagggtagtcttgacagagaccatgtggtctgcaaagacaaagcctctttatagaaaaagtctgggcagggcatggtggctggctgggtgcagtggctcaggcctgtaatcccagcactttgggaggctgaggtgggtggatcatgaggtcaggagatcgagaccatcctggctaacatggtgaaactctgtctctactaaaaatacaaaaaattagccgggcgtggtggcatgcacctgtagtcccagctactcaggaggctgaggcaggagaatcgcttgaacctgggaggcggaggttgcagtgagccgagatcgcaccaccgcactccagcctgggcgacagagcgagactcagtctcaaaaaaaaaaaaaaaaaaaaaaaagtcaaccagtccctccatcagatcacaggcatcttaagggcagagaacatatcctgtttgtggggccctagactcaacactggtcaggacacagttggcgctcaatagatattagctgaataaataagtggaaaacccatcaggcattgctggtgggaatgtaaactagtacagccactatggaaaaccatgtggaggtccattaaagaagtaaaagtagaactaccatttgatccagcaatcccactcctgggtatctacccagaggaaaataagtcattatatggaaaagatagttgcacacgcatatttatagcagcaaaatcatggaaccatcccaaatgcctgtcaatcaatgagtagataaagaaactgagatatatatatatatgatggaatactactcagccataaaaaggcatgaattaatggcatttgcagcgacctggatgagattggagactattactctaagtgaagtaactcaggaatggaaaaccaaacatcgtatgttctcactgatatgtgggagctgagatatgaggacacgaaggcataagaatgatacgatggacttcagggacttgtggggaagggtggggggtggtggggcataaaatagtaaggtgcagcgtatactgcttgggtgatgggtgcgccagaatctcacaaatcaccactaaagaacttactcataccacctgtaccccaataacttatgggaaaaatattttaaaaataataataaaaaaagaaaacccatcaggatgatttgggcttcaagaaataaggcttgattacaaatggtttaaacaatagcaaatgtttatcatcccacattagaagaagtctggagctaggtggccccaggacgagcttggcagctcagcagtgccatcaaggacccaggctcttcttatttttctccaccagcatcctcgacatattggcttggttctcgggcttgtcccttcatgtcacaaaatggctgcgacagttccaggcgtcacgtctagtcccatttagatgctcagctgaagaaggtacttttggaaaagaacctttcctaaagctccccagcagacaccctccatcagttctactagccagaaccagatcacatagcaaatgccctaactgcaaggtaggctggacaagtgaatatttggctttttctgactctgtagttgaggtggactctgtccacaggagtaaagggagaggaaccactggctggtgaacaggcactgttcaatgtctgccacaaagttctgctgcagatggaagaagagatgtttagttgtggctggggagggcaggcaggggtggcagaaaaggtttcttggaggaggtcctggaacaactggtcaaagtgaaggctgctgtggaggacgtcatggtgcatcattaattctggttgctggtaggaaatggttcccatggctgacagactctgatgagcgtctctcatggctttggcatattatggagtttttcctcctaaaatcagttttgcggccctcatagaacaacccttgaggggggttgtatatataatctttattttctagacaagtcaattaaagctgccagaagtgaggtgactcgtccacaagcagcacgttctgtggacagagcctaggactgactgagtccaagcgcagggccccacccccagtgctcttgtgcagaaagacatactggtcaccctgtgggcagccacctgacctgtgagaacttggattctgtcctggtatctggtggccacagctgaagctggcagctcccctcacaccaagataggagccttctgggagctggccagccaggagagcagcctcagtgaggagcttccaaagggatttggtgtcattaagggctccctccttcgggacactgcatggagactggaggaaggagtcgggagttgtatgggcccagaccctgccatggggttggtttggaaatagaagctaccagagagatctcattctttcttgggtgtaatttcaaagtcatggtgagaaaatgaaatgtgatgaagctgtagtgttggcctagaacaggatctggcatttagaaagtttggcgaatgttagtgcagttgttcccattatcactatcaccataattgtcatcaccacctctgttgtatgggagccctgacagcctgcagatgggtgaagagtctggcctccccactgtacagaggtcagatgtctctcccatcctccaccaggctgctctggcaaaggactttgctatggtttgaatgtccctgccaatactcagttaaaatgtgattgccattgcgatgatactatgaagtagaactggttaagaggtgattaggccatgagggctctgccattatgaatggattaatgttgtcaactcaggagcgggtttgttatgacaagaataggttgttataacaacctactcctgtttggccccctcttgctctcttgctcttgccccctcttgcccttctgccttccaccacagagtgatgtagcgcgaaggcccttgccagatgctgaagtcatgctcttggacttcccagcctccagaaccatgaaataaataaacctctgttgtttataaattacccagtctcaggtattctgttatagcaacacaaaacagactaagcagacttctgggttgaactcaatggaaacttcttgttctaaccttatgatctctgagcagcatttgaaattgactcactgtctttgcttgaaattcatttattgctggggctcaggaccctaccctcactgggacctcactttgtctttctagctatgtttcttcctgaaatattgacagccctggactcaggcctcagcattctgggggaagtgcctctactcagagttaacatttattgagcacttactgcatgcatgtgctatgctcagcactgtacatatcttgtttaatcctcatgatgcagctctctgaggtcagtactatttggtcatttattcactcattcaccaagatttttgggctcctactatatacaaggcacaattccaagtgcctaataaggcagatgtgttcctacctctggggagctgacacctagtgggaattattcaggttaacaggaaacagagtggagacctgaggcttcttacccagtcacagccctggtgggcagaggagccaactctagtgccgtgctcttgaatgctttgtttctggtcccaccgatggccgtgaatccctcacttccagtgcacatatctctcttgatgccattgactctgccagggtgttctcggcatctcaaacttagcattttcgataggttttattgctagtgttgtttttgttctctctgaatgtgctctgccttttcaccctgcatccacaaatggcctgggagcctgtctcaacaccccctcccttaatctccaaatcctgttatcaagagtggtcagatcagcttcttcagtgcacccccaggaccccattcttactcttcctgccatggttccagccccgcacttcctggacacccttcgttcttttcatgctctggcatgttcagctttgctttctcttcactgagcctttgcacatgctgttccctctgccaggaattccatttaccccccagccacatcccccactcctggccaacttcagcctttgctcaaacactgcctgccacagggcctccctgactctccctgcagactttccccatgctccctgcggtgtgcacattcaaccctccttgagtcacaccttttattaaagtaaaggctggcacatccacttcccaccaccctgggagacggggaccaggccctgtctcctctttcatcttcagtgccaagaatagcaggtattcattgaccagcagaatgaataaatgaatattggagtaggtttctgacagaggcctaggaggcttgaaattatctttcggccaggcgcagtggctcacctctgtaatccaagcactttgggaggccaaggcgggtggatcacctgaggtcaggagtttgagaccagcctggccaacatggcaaaaccccgtctctactaaaaatgcaaaaaattagccgggcggggtggcgggcacctgtaattccaggctgaggcaggaaaatcgcttaaacctgggaggcagaggttgcagtgagccgagatcacgccactgcactccagcctgggtgatggagcaagactccagctcaaaaaaaaaaaaaaagttatctttcataccaggagagacagtaaaatcctgggtttcctttgtggagccttaagttcatctaactcagtagtttccaaacttgcttaaatgtcttagaaacctgttgtgcctcactttagtggttctgggatgggggagttgtccctagggaatcctgcagggtcctgttgaaagagtttgagaactgcagctgtagtgcaaggcctcattttctgcaagaaggaagtgcagagaaggaatgggttgaaggtgcccttgaccatatagtgactgagcctggagtagcgtgctgggctcttggctccccctgcagtgtgtcacagactcttcatttaagcagatgtgtgtgtgtgtgtgtgtgtgtgtgtgtttaatacactttaagttctagggtacatgtgcacaacctgcaggtttgttacatatgtatacatgtgccatgttggtgtgctgcatccgttaactcgtcatttacattaggtatatctcctaatgctagccctcccccttccccaccccacgacaggccccggtgtgtgatgttccctaagcagatgttcttaaggggaagcagccttttcttcctggtgtactcagcttccctggcatcaagcattccctgcaaaaggcttggtggggatttttctttaaacttaaaatgttgttctccctaaagaaaaatgcgctgctgagtggaaaaatctgcatgtctcatgaccctgggtgccgctgtgccacaggtttttatgagttggcaaatatgtttttaaaatggagaggtgtgcaggaagtgagccagcaaggaaggagaatataagtcgtcttttttgcaggatgcaaaattgggtttatttgcagactgatgtgttaccttctaaaggactagccacaacgtttgaccctcaatctaaggtcaacactgctatccattgctcacagaccagagtgcatctcccatgaggcaaaagagcaggtgtgagaagtgggtaagcagtctgtatattgggggtgtggtggatggcataggggataactcagtctaatgaaagacatcaatgtgccattgggaaaggacagaggttgccccctctttcccccagatagtcgcccagcttataaatgcatagatctgggacagagaataaggttcacctaggttccccctaatcacaggcggaactaggactttgggagatgatctcacctgcctttcatttccaagagatcagtagcacttgtattttaagaggtgagtccttctatgaatatcttgaccttgaggtttacaaaggacttccagaccatggggtttgctttttatcaagtcgtactgtttacataaagaagtgcagaacctggctgggcacaatggctcatgcctgtaatcccagcactttgggaggccgaaggtggatcacttgaggtcaggagtttgagaccagcctggccaacatggtaaaaccccgtatcaactaaaatgcaaaaaaaacaaaaaacaaaaaaagctaggcatgatggcgggcgcctgtaatcccggctacttggaaggctgagtcaggagaatcgcttgaacccaggaggcagaggttgcagtgagccgagatcgtgccactgcactccaacctgagcaatagagggagactcagtcccaaaagaaaaaaaaaaaagtgcagaacccatagacatactgctggatggtttttcataaagtgatgaagtgcataccctgtggaaccctagtcaagaagcacgtcatctacaccccaggaccctccgggagccccttccaggccccatctaccttgtggtggttctaacgccatgggttagtcttgcctgcctctgaactctgggtgaaaggagccacgcagccttggcccttttgaggctggctcctttcactcaccattgtctttgagatttgggcctgtggctgtgtgcagttgtgtttggttcattctcgctgctgagtcctattcccctgtctccacacatagtgggtgttcacagcagccccacgaagtacacagggtgtggactgttcctcctgttttataagaaaggaagcccaggcttggtgttacccacagcacagaggtggctctagagcacgccccatccgatggctgctgaggaagtgacttgatctttctaggagcgtcttgtcctctgcccaagaagttgccagcagctttctctttagtcttccagaagcccctggctctccttttgagtcactttgaccacgcctccttaccagtcaaaccgtgggttttctgaattcctggaagtgctcttttagctgcttttctgatccctgaacagcaaacacttatcgtgggtagcattttcctctgccaggccaatggcagacattactaactaattgtgggactcctgttcattgagcctggaccctgtcttgagttccaggattcccggcagccactgccatctttttggagctcattcacttaatgaaatctttctgcttttgtagtgccaggtggtacaagcagagttgcactttctgctgaggagacttgatttcttatgaaaataccaagcaatgaaggaacgctgcatttctaaagcattcgttggcttcctggactttttcccttgcaggtggggtggcagggagtgggtgatggggcagtggctattctggacacagaaatccacattcctttaaggtgtcatttactgcttccagaatcccactttcaaggagacttgaagctagtaaaatgaataactgggcttcttcccagcctgtggaggcctcacagtggtagcttgttagcagagtcctcagaatatatccaggataaaaatgtgactttgtgcaagtccccagcttgaaacagggttacatcctgcttcctgggtgatgctacctggcagaggagcccaagggcagggggcaggctcctcgtatctgggtgtggtgccctgagctccttgccctgctgtttatttccagagcagaaccttggggctcactggagcagtgaccacctctaatcacaagagctggttgtactttttcttcgcaggctgcatagggtggaggatggggctggggcctctggagagtggcgattcctccctcagccccacatttctacctgctccccagggcaccttgttattacagttcaactggctggggtttgtcaggcctcaagccagcctacctggtggtttcaaaccagacttaatcaaaatgtaaatacttcttggggccagaaagcaggactgtccaggtgtttgatcagaggctgcagagcctgggaaccacaggagagggtgggggcctggcaggctccttccacacagaggcctggggttccctggggcctctctgtcaggggcttctggagcagcttctgtccccacgtgaccaacatcaccctctgccctactgctgtatatgcacgctgtcactggggcaaaggtagtgctggtgatgctggtgacagcacctgctccccttctccatccctgaaggaagacagcttagaggttgatggatcgaatatcttgcattttagagaggcgggacctcaaggctcagagagggtctgtgaccctcgtgaggttgcacagtgggcaggagcgcagagaggtgcactcgtggagggtgagccatgtgtccggtattgttctaggatcagcagtgaccagggcatatgcagagtctgccccgggggcaggatggtgaattgagagtaaaacgctagttggacgagatcatgttatatctgtaaacagacgatctatacatgtgtaaactaataacgtctgatagtgatgagtactctgtagtggatgaggtgtagcaggattagataagagaatgagatagattcagtggaggtggaggtgttaccttagatggggcctggggagcctccaagtgtgggtgtgtggaggtcatattagttgagacctagttgtcagaaaagggatggtcaggcaggggcacagccagcagggcgaaggctgtgcgatgagcatgagccgcaagggtctccatgggccgggaggagctcagagtgtctggagtggagtgtgggcctggggcatagtggttgtgggggagtcacgggaggcatttggacttgattctaaacctgttgggaagtcattagaggatttcaaatgagagaattccatgagttgctttgggtttgcataactctggctgctgggtggagatagtttgaaaggggcaagaacggaggtgggaggggaggaggctggtccaggtgaggatgctggcctggtccagtggcagccctggggccatagggagggggacaggtatggatttcactgcagagcccagacttggggatggatccagtgtggcatggaaggtgggggagggaaagtgaaggaccccagccgtcccttgggtttggggctcaactagggctcctttgatcactcatctcccactgcatggtgtccctacagccagactcagggtccttgcctaccctaaagcgccagggtggtgctggccctgcgtcttcaggatcatctggggagggctgactcacctgcctttctggatccagaaggcggagggtgtggtgttacctggtgctggggatgttggaaaactcagaacctgggctttatcttgactgtgtttaatgactcagcacaaatctagagacatgaccaagaggcagctttgagcagccctggctgaaggaccagagcagtgggatgatgtggcctgtggaggaaggaaacctccacctggaaccttgaggggaaagcagggcaacagcagtatgctaactgtgtgagctgctttttttttttttttttttttttttgacagggtcttgctctgttgcccaggctggagtgcagtggcatgatctcagctcactgcaacctccgcctcctagggttcaagcaattctccctgcctcagcctcctgagtagctgggattacaggcgtgtgccatcgcgcctggctaatttgctgctgtctgttgagtgctcactgcacatgggcttctgtgcatttccccgtcattcctcacaaccctaggcggcaacattgacattcttcttcccattttgtggatgcagaaactgaggctcaaagagcttttggcctaaggtcatccacctagcgagcagctgagctcacccacaggcccctgagtcccgatttagggagtctataaccagcacccaacactgtcgccagtgcaccacgctgcctgctcaccagccatccaccaagggctggctctgtgcctgtctctgtctaggggtagggcatgagaaccgaccccatgcagtccccacccagagatgcttgccctgtgcacgcagatgcggaccagcagggcatttgcagaaaggcagttgttcgcttaatgagaggtgtttgggcaactccctccttctgtccctccctcccttgctcttttcttcctccttttcttcccttccttcttccctacctgtttttctttcatctctcccttccctctctcctctcccaccccctcccttctcttctttccatctctccctgcagtttttcttttgctgacacctgtttctgaaaaatcttgggtgtctggctgtggggagctgcaggaaagcccagatgaggtctcctgagcttcaccttgtggttggcagcgaggacttgacctagagcctctgaccttccacctccctgggctctgagctccagagtcccgtggtcctccaaggctgtgggaacccgtggtcccctcccttgcctttcctctcttcgctgacagaacaaggggccggcagaggacatgtcaggtgtgtctcagagacctgggggaagatgggctcaacatgacctgcttctggggtgacacctctgctcactcacttattcaagcattcactcgttcacagacatgtcagaggtctgctgtgtgccaggcacatgtcctaggcactgatgagcaaaatggacgtggtctctgtcctcttgggtggaagccccataaaggcataagtgaaaatttgctgacaaattttgatagctgctttttcaaagccagacactgactgaggagtggtgggagagagctgtgtgggtatgacttggattgattgattggggatgatcagggaaggacaagaccctaagacctgaggacttggccgggtgaagtaggggcagcaataaagtgccactccccgggagacacgtgtaagtgcccagagcaacgtcatttgagaggtaaaaacctggaagacctaacctacgtgtctctcaacaggagagtggatggaggaattattttgacaaaacctgtgggtatgcaggtttaaagaaattttgttcccattctgtaagcttgaaatgtttcattgcaaaaaagtgattctggaaatgtgtatctagcagaggaaatgacatatgcaaaggccctgaggcagaaaataactcccagtgaggaagcaggtgacggcctgaccactgtacttccggtatctctgctctcagccacccctgagaccatggaaaggctccgtgttgagcccttggaaggcctccctgggagtcctgggtgtcagctggaggactgtgtgatggtgagggagttgaaccactggggcagtgcccgcctgggctggatttgggggaggggggagccttttggatgagtcagtcctctctggttggaaacagcagagtctagttgaggctctgccaaggacccgtggtgattcttgtcgccttttgtggagaaatttgcccgctaacaggccatctgtgtgaggtgagtcactgtttcccccgttttgttgattgcagacacctctgtgtgagtctgttcagcctgaactgcacacaccgataaacttcagtgcctggatgagcaagcttcctgtgtgcttcagcttggggcgcatgtgcgcttcttctaggattttctgaaacttggtcaggggctcctggatcatgattgcagattgagagccactgagccattccaggtcctgttttctgatgtgaaatggaagcccagagtggggatgtgtccaaacccacactgagatcacacagcgagggaaggaagccggggtcctggctgacacttgcggggcagagcaccttctcttggccccgaatatggattttggtgtccctagtcaagatttgttctgctgacttctcctggggaaagaggtgtcacgtctgcctgagcccctgagcctggtgggtggggtgtgaggatctggccggggccgctgcacctgcaggtgtttcctgcagacattctgctggggagcacttcccctcttctccctccaggtgactcactgggtgcagtgtcctctagcgtctactgggtgcagggcactggggagacatgggggatgcttctttgggctcgtctgtactaggtatggttatagggtactgggggttgcctaaaaaaatgctgtgtgaccttgatggctcactttttctccctgggcctctgtgtctccagccgtcagtgaggagcaggcgtgggtgatcagcaaggttcctctcagctctgatgtcattcattctgagttaggtggagagtaggggataattgcagcccttattcactgaactttcttaactatgctaaatgctttacgtgcatcagctcattgatgcctatatctatgtggttacagaggagccagttgaagcacagagaggttgagtaaatttcctggagtcacacagctagtaaattacatacctgggtttaaacccaggcagtctggccctggagcatgcagtcttaatcactgcatgattaaggctgaatcatggtcccctaaagatgtcgtatccgaatccctgcaacttgtgaatatgttacctacctgataaaagggccttttcagatgtgattaagttaaggctgttgagatggagaggttatccagggatatcaggtgggcctgattagagggagagtggactgtgcctgtgaaaaggagttcagagtgatgcagcttgagaaagacctgaccagcgactgctggttttgaaggtggaggaagggccatgaattgagccaaggaatagaggtggcctgtagattctcccctggagtctccagaaggcacactgccctgccgacacctggatttagcccggtgaatctgattccagacttctgacttctagaactgtaggataatacatttgtgtctatagcactccatttgtgccgttaataacttgttactgaagcaagaggaaactcatgcagccatgctctactctggtctcctggtggcgagccctcctttctgcatacacactggattttgaattctgaggggtaacaacctcatcttgccaacagagccctccttggccatttcacaattcaagaagcattttctaggaagccttttaaagccccactgccttgccccagcttgctctgttgtgtcacaggaatgaggtggggagaggacagagggaaagggtcatggggaacctggggccccagcctataccctgcctctatgaggctccatctgagcacccacctctccaggcatcgtccttggtcccctgggagtgggcacccatggcgggtctgcactgtatgcccagtgcgcctttgtaggccgaacctgcagggtcagagctgggtctaaggctgctccccaggtccttgcaggaacataagtgcccgggtttatctttgggcactagagctgtgcccacagcagctcctgttcagatctggatcagggtcaggcccccatcactgattgcgcaccccaggcacgcctcaccctgccccggcctcagcttcctgatctacaaaatgggtgtcatgctgcagccctgccgaaattgtgtgctcatggtagaagtgactgggaagaactctgcgtgtggcaagggctctcgctgctgcttcggtacagtcatctgtagggtcatctgtgacgtatgggccaggcgtgtgccccctcagaatcctctctgggtcccctgactcctccccaggagcagcccactccatggagcttcccttggccccaagtgcttgaagggaaaggtgaacacagtcgggatgacaaagttaggaggcgtgtgtttttcttcccggtgacgttgggccggtcagcccgcgtcttcgtagcttcaatggcttctcctgtgccacgcggtgggggagctttcttacgcctcgttctgaggattagagacaatggctgcacaggcactgtggctgccatgctcaggcctgccctcgctcctgacccccaggccagctgcttcctggttccagggggccaggaggaggatcttagtgttagcctgagatcctgggcaggtccagttctgaggcaggggagccctgtatggatttgggggaatgctggcaggatggcctgccggcccttttctccccacttcccagacggagctgaagggaaaggactcttccctgagggaggcagatcttcccagggcctgtctgggagctccctccagtgaggaggctggtgctgaggctgggagggctggtgcccagggcccgggctcttgagcctagatggaaactggggccaccttcggagttcttgccacatccctgcagggctggtgcgtgagggaccgtgtggtctctaagaagagagggttcagcccaagggtcacctccttcaggaagccttccctgattccacaggcagggttgattgtgcctcccctgtgccccctcagcccctcttcctctagtattgtcacctggcatgggtcagtgccgcccacgagcctgtgagctcttgtagggcaggggccacgtgccaagcaccaagtaggtcctcgatatgagtctgcacagtggatggaagaactctgggggaggcagagccgagctcagtaaggccttggtgggagggaagcatgctgggaatgcagggtccaatgggagtgttgagggaggttgaatcaaggacaaggaagggtcctttcaacccccaggtcctgtgaccctatgtgagatcaagagtcagggcagagtaatggcgacagctcacatttactgagtgctaaccacaatctcactttggccctagcagccttcttaagagggtggtgtttccccattttacgcttgaacaatctgaagctcagagagggtaagcagcttgcccagggtcacagagctatggacagagaccagatgtgaaccctcatctctgtgttggaatcctctctacaggtgcctctgtgctgtgctggtttttgcttctgtggcttcagactttgggggaacgttcttaggacccagctcttgcctgtcccttgagccagcatcatccttgtggactgggagttaagaactaggcattcttaggctcaaatcccagctcagcctctcagcagctgtgtgcccagacccctgtcctctctgggcttgtttcctcctctgcaaaacaaatctactttactgtagggtcatgaggcccagagactgtggaggtggagcatggaggccacagcctggttcgtcctagtgtctccgtggcgcaggcttcccagaccatgtgtgtacacggtcatgtccacatggtaattaatgtacctgagtgctgagcaggttttgattggccaggatctctacagcatttgtttagcttctttgaaataggggatgcaaaaattctggggagagcggaagtaattagtactcacaggaaaatgcaaatatttttatgagtatcctatgaaaaattgtatttttcctgagcaagtagtcctgtttatttctccaacagaattgccacagttgcagcagtggctgacctacgactgccaggagcatttctcaggtgtccacttatctcccttcccctggctttctcttccccttcaacccagagaaaacattatgaggcaaaagtgaccaaatttgggccttgctgagagaaggggattactcttgtagtgaaaagtccatttttgtggccagacttttctcaactgtgaaaaccagtgtgggcaaaaacatcgtgagcacaaaaatacattaaaaaattattttgcttggaaagaactttttttttccagttctgctacttcttgggaaaagacatttttaagaagatcaatagtgttgcaagaggactaggggtctgctttctcctaagagatgtagagggatagagggaaaaggagggaagccccaggcagggcggggttggggagttgggatacagagcaagagggcttaacatgggatgagtgcccacctcgtgcctcacacagtgcgagggcttcaagcacattttcgaatcgacccttataaagggcatttggttattaagccaattgggaaactgtggttcagagaggttggggaagtggcctgtggttattcagcttgtggacagaagagtcagcagcccagccctccccgtctgatgagaaccccttctctttccacactgccctagaagaagggactcttgatccagggctgggtcaacagacagagtgagatgggaagaggcacacccaggggaggggctgtgtgtaccttccgccttgctgggaaggtggttgtattccctttttcagagcagaaaatggaggctcagagattatggtgtgcagtgtggcttatttgttgttgtttctaagtccatttggaaatgatctcttcccttccggtcctgcctcgcccatctgtttatccatccatccattcatcagagattgatggagcttttgctatgtccaagcactgttctaggtgtctgagagacaggagggaaccaaacagggatacccactcacatgaagtctgcattccaacgggagatgagacagagcctggcaggaagcaatgagcagaataactcagaaggccacgcagaacgcttgctgcagggtgatgtgtgcctgggaattagaaattaacagtaaaagaaaggcagaggggtcctgagatgggggcagtgggtgggggcaggttgtagaattaaaaagggcgagtagaggcctagcttggtgacttacacctgtaatcccagcaatttgggaggccaaggcaggtggatcacttgagctcaggagtttgagatcagcctggcaacatggcaaaaccccatctctactaaaaatacaaaaattagctgggcgtggtggtgcacacctgtagtcccagctactcaggaggctgaggtgggagaattgcttgaacccagtgagtggaggttgcagtgaactgagattgctctaccactgcactccagcctgggtgacagagcaagactgtctccaaaaaaaaaaaagagtgagtagaggattttccttcctagtgacagaaatgttttaaatgttttggaattaaacggaggtggtggaagctcaacactgtgagtgtactgaatgctactgaattgttcatttttttttttttttttttgagacggagtctcactctgtcgcccaggctggagtagagtggcgcgatctcagctccactgcaagctccacctcccgggttcacgccattctcctgcctcagcctcctgagtagctgggactacatccacccgctgctaatttttgtttttgtatttttagtagagatggggtttcaccgtgttagccaggatggtctcgatctcctgacctcgtgtggtgatccgcccgcctcggcctcccaaagtgctgggattacaggcgtgagcctctgcagccagcctaaattattcactttaaaatggttaatattcagtgaatttcatttcaataaatgattattttttaatggcgatcagggtcagcctcatggagaacgtgagagctgtgcaaaagctgcaaggaggccaaacctgttaacccaaggctgttttctcccaaggagcaggaggagggttccaggcagagggagcagctggagcagccagagcagcgagaatgagaccagctgcacctcgagagcccaatccggccactgcctgtttttgtaaatgaagttttatgggaatacagccatgctcatttgtctacatactgtctctgtgacccagagaccctatctggccctttgcagaaaaaatcctcaggcaggaacatgcctggggtgtttgaggagaagagtgtggctggaatggagtgagtagaggtgagagtgggaggaggtgaagtcagggaggcagtaggggccgaatcatggtgcccctgtgagacttcctgcttcctgtggcacccctggcaatgtcgggacagacgctggcatcatgctgatgtggaagctctgggagtatgtgtgtgtatgtagggcatagtagggtagagacatagctgaacttagagtcagatgtcagaggacctagtcttgagacctgctgtttgtcccttgccagctctgtgtcctcagttctctcacccacagagcctgatagtagtggtgatggtggtagtgatggtggtaatggtggtgctggtggctgtggtgatggtgatgctgatggtggtggtaatggtggtcgtgacggtgatggtagtggtaatggcagtggtgatggtggtggtggtaatgatgatggtggtggtgatggtggtggtggtggtgatggtggtgatggtaatgatggtagtggtgatggtgatgatggtaatgatggtagtggtgatggtggtggtaatggtagtggtggtggtgatggtgatgatgatggtggtggtaatggtagtggtggtggtgacggtagtgatgatggtggtggtaatggtggtggtgatggtggtggtaatagtggtgatggggatggtggtaatggtggtggtgatgatggtggtggcaatggcagtggtggtggtgatggggagggtggtggtgatgatggtggtaatgagtggtggtggcaatggctacatttagtggcacctatgaggtgctaggtattttgcatatggtgctaatccttaacagagcaatgccaggtgggtagcagtgtctcagtttgcaggagaaaacacggagggacttaaccaaggccacacaggtggtatgtagcaaggcttagatagcagtgcagtgacacccgcttacattgcagtgaagatgtcatgaggcagtggacggttgtgtcctggtgaacagtgcagctgtcagggaggggaggtagcctttgtgggggaggtggcctggtgtcagcaccaccctccctggaagggtttcctgggagggactgtccccagcctctccacctcccctgggtcacaccagagtgctcctctctctcaggccccatgtgctgggaggggccctgtccccatccccatggcgaccagttacccagcctggtgttggttttggttttcctcatttgaggttgtgggatccctctggttgaggctgaggtttttctgctttggaaaccccaactgtgttgtggccgtgaggaggggcctggaggtgctggcacctgcccacagaccgcaggccccagatgccccgggccgccccacgcgcctcacaccatccagccaagacatttcagacactcatagctgagaactgtggcacagggaactttctggggtcaggagaactgtgtctttgctccccagttccgctcctgtagaggacagagccactgggagggctggggtgtatgatgccccggttcgcatctaccccgtggcttttgcccccactttgggtggaatccttgagcatagcaagcccctgactgagcggcaggcggccagcaggcccagaaagggttccagcccctctcgccgcctcctggcctgacagttctggcagctgctccctggcctggctgtgcccacatcagagtgtcagccctttgaatggaacctggggctggatcctgcacaactcggcccattccttaggtctctgaagtggttctcctcatgtgaaaagagccagtccccaccaagtggtgaagctggtggtgccagccgcggaatgcacccttggacagggagaggctctgtgccccccagaccaccccacttccctctcttgcctgccacctggggtcctatgctcagctaggaaagtgcgggatacactcaaaggcagcaggaccatggcgcctaaaagctcctgatgcttcctgccccagggaacagtggacccatgccatccagaggcactgcacaagccccatctcgagagattctgggtcacaggtattttggcagcccttcatgttttcttctaaacctctcaatctggggatagttactgggagcagtctcctcctgacgccactagaccttgacctcgcagctccagcactctggggcagcgtagtaatggaggaaccgagggcaggatgaggactgaggctggattccccatgattctggagattgtgcagaaaggctgtgtagagaaggtgcaccgagtcagggacccaggcaggggctggctgttctcagaaggtgagagccatagagacagaacgagacccttggcctgtatctgccccactccatcccttccctgccttgcccactcagtgggctccccatcgtctgtctcacttatggggatcttcaagaaaactcttgacagaagcggctctgcgccctgtcctggtgtaaccctcctggatctcaggtgaagaaactgaggccagaggggtggtgctttctcctacccccgccccataccaggggcctgtctccctttcacagtggttgccaagtgcatcgggttggagaaagtaccctacaggctgaggtcacctcaatacacttggctggagtcatgttgcttctgaaaaggcttgagtcactcggtgacgcagcccctgatcaggcctgtaattgggatctcgccttgttcgggcctggatgaaaagagacttagaatcagtgagaagccacatgcccacctcatcagtttcagctggaggtgcctctctgggggtggcaaaggtggcagagccctggtggatggaaaataagcatcagtggaggggagggaggaacaggaggcagtagacacaggggtaacccattctcatcagaacagctggccgcctccactttgcccaggccagatctgactctgagaacacccacagcctccccacggtgatattttctggaaatccagccctgctggcagcacagtgggagctgagtcctgaaagcccacctgggtagaaaagaactggatggagtctttagtcctgcagacatcacaggcagaattgtgacactgccttccactctgcagatgagtcatcggccttttgtggctgggaacgcggtagagtgatccttccacatgcagtcactgcgacacctgagaccctcccagactgattcagttgcgttgagagcagcttctccggttttcagggctttccttcctccccctccaaattcatagtcgaaagaccccgcttcatgacatagtttgggtttctaacaaatgtggtcccctgcattagcataatgctgacttttctgaaccacaagccagtttctgctgggaagtcctggggtctctgtaacctgtgcccctcgctaccccatgtccttgtgcctttaaccagcagtgcccccagactattctggaaatgggggtgatagtttctgtggccccattcctgctacgtctggttgtgcctggccccaacccaggggcttctgctctgagctgagagctgggctggccatgccatgtcaccctgccctctccatacaaggaccagacccactgaattgtttcaaactctagagtcacctgtgacatgtggcctggagagaaaagatgagttggccaatcagatttgctccttgagcctttggaatcaggattctgggagatgggtagtgagctgggctgaagggtgctgaaggttcctgaagacatagcagcctcaacagctgcaacacagttctaactacccaggattagtgcagacatcacaaatgaagagcacagtcttcacaagaccaccctcactccaggcacctgccacaagggtgggggtccccaggccactggcacttctgaccacggcaacagattcagggattcccctgaagctctcaggttggataattcgctagactccctcgcagaacccagtgcagcgctacactgacaattacagttctattgttgcaaaaagatacccaaacccttgacagggagaggtgcccagggcaaggcctgagagtcccagatgtgaagctgccatggatgtgccacctcctggcacattggtgtgtgattaccaggaagctcacccaggcctcagtgtctggagtttttactggagcatcatgattttggcatgattgatggaatcactgggcacatggtcgaacccagtgtctggccccccgtccctccctggaagtcagggtgataccacgtggcccaaagcctcaaccttctaatcccatggctggtctctctgacatgcccagcccccctcatgagtcatcttgttagcgtaaactcagatatggcttcaggggcctaccatgaatgaaaaagacactcctattactcagaaaattccaaggacttagagactacctctcaggaaccagggacaaaagccagtcagattctttattatacagtgacaagttggggcctatgcaaagacgtgagagtgtcctgatctgtggagatgccaggagtctgccccagaggagtgtggcccatgggaaaacaggcccccacttattcagggtccagaaagcacggcaggtccactgcggatcctgccttcccatccccagggatgactctcttttctctgggatctgtaaacaataaaggtccaagggtcaccagaaggcaaagaggcattcagtagatgggtgtgtgtgtgtgtgtgtgtgtgtgtgtgtgtgtgtgcccaaaataggtgtgaggcttgaggtgacttctgcccaacttcacagggagatgatcagggcctgggggagagttggggggaagcggcccctgaggctgtctcattggcccggacccctcaaggccgcagctgagcagtgctctccctgcagtctcccttaggctttccggtataggaggggcctcatacggtttgccctgcccctgtgagtggccctattaatggctttaagcctgccaggcatcctgctgtgagaagaatgcctgactcaagtcaggcaggacgcagcgaccttgtcagagtcagagcccaggatcaccagattctggagctgggaggaatatttttcagtcaacttttccaagcgtgtgtgtgtctcttcaggtcctttttagaagacgtagacagggcagaaataacaagtcagagaggaagaaattcctagaaagagtggtcccgtcattccttttctcactgatttccaggcactttctcttgacttacagcagtggttctcaaagtgagagtgcatcagaatcacctgcagagctcattaagttactgatgctggcccatccccagagtgtctgattctgtaggtccagggtggggcccaggaagctgcatttctaactggctcccagcgatgctgatgctgctggtccaaggaccaccgagaaccactgacttaagggcaagaaggaagctccttccaacaaatgcatggaaccttcctcagtttcccccgtggaacctttctctgatcgattgcacatttgtcaccagggaggaaaagaacattagactaagagtcagaacagcagagccctggttcaggttatgatacacactccctgattgaggcaaggttctttcctttctgggactctatttctgaatctgtcaaacgggttcaatactaggacctacgtcacgggggtgatgtgaggattgaactagatgacatgttactggtgcaaattccctgactctgagggtacagcaaaggccatataagcagtccagggtcagttgttttgcacaggtctatcccatccctcccaaggatggtatgtgaacctgttgggcttaaaggaacccagtaagttagaccttagaccgtccacatcaccagtattgcgggctttgtcagtgtcctttggaggagggggctgggctggcagttccactccactgtgccaggtgatcacagggctctgggggctgtaggccgctcactgctcagaatccatcatcgctgcaccccagccgcatcccactgggctgacactgccacagggacaatgccttcctggagctcaggtcgtcccactgccctccccacaagcactgcacctcccccatcctcagcttctcccttctgttctccacaccggttcatttcagcccctgccttgaaaacacaaacaccactctcagaaacagcaaaggcaacaagaataacagcaagccagtttcttcccccaccaagacagcctcttctcccatggcagttttttgggtggaatgataccgttattcttccctgggttagccacaggagcaaaagaaacgctttagtctctcagtagctcactgtgacaagtgcttggcccgtgcttaagaatcagtggctttttattattacttggcttctgccttccatcaggcactcctttccctgataggacatgccctcctcctgcggggcccccaccctcctttgttggccactctccttcctcctgccctgccttccccttaacatacttccccagtctggcaggagggcacctgctggaggacatcgctggcagctggcagccgagggggcccccagggctggagaaagcaggagtgagagtgggattggacaagcaatgccctccctagagtctgtcccttctaaagggccagtggcagcccgagccatgaatcaggggacacgccatcttgctgttgtccgcctttctccaggttttgtcttggactccttccgatccgaggccaccttggtcctctggtgccttccccagagcgggagcccccctgatcggccctgggcctcggtcactgccattttcccttgcctggcggggcaacccttctccatgcaacctctcctacctgcctggctacaaccccagctgtcttgctcatctttgctctttgatgcatggaatgagctggatgaggtcagggaccatgtcctcttccctgactcattacgggtacctggaaggtaaaccctgaacagcagaggatcctttgggaaagcaaataaagccggaggctcctcgggacaggaaatagcggtgagccagtgccagcagaagattgtgctcccgcctgggtgtgtggcttattccctggctccattaattcctctccctgagcctcagctttctcatctgtgaatagggtcagtacctcctgaatgagggccaaatgtacagtgcccaggtcagtgctcagcccagaaggctggcagggagggaggttgtcatttattcctgcaagcattcatgcctttacccagtcagccaagtaacttaatggaagcttgcaattaaacaagaattagctgcacccgcctccttcccgggagcaggtctgacctgagctgggagaggatgtgatccagacagggggctctgccttttcagggcagcatgagaagggacactagagctggagcttgaagaacaagcattcctggcagagaaagccatgcctgtagggtcggagtgggggaacaatgatgtatacagggattggaggggctgccaggtggccaggtggctggatgtaaagcatgacacttgcattcactcagcagatactgtttgggcttctacagtggaccaagaagaaggtgacagagaacaaagaaacccaggtccctgacaccacgggtccgctatcagcacaggggagactgatgacgggcaaggaaacaaataagtgggaagatttcaggtggtgatgagagctgtgggctgggtctgggagtccagcagtcacttggcacgtagaggttgaatgagtccatgaaaatgtgctgcatgcgttgagagaatggatctgtaagctgatgtgcagttcaacacagagacagacagactgaccgaccagtgcttcctacacacttccatggcacgtggagaatgggcctgcttcacaaccgagctcagaggagacctccaggaaggtagaattcaggctaagactggaagtgtgggtgagaaacattcggaaaggtaggaagaaggtgctcctggcagaatgaacagtgagtgtaaaggccctgagagcagaggcagggagggaaataaagcttaggaagacagtcaccgaggccctgaatgggaccaaggagaacgggctgagcctatgggtggtcaggcctgggaactggccattcctgctgctgggacctgagcacgggggaggtgggaggtgatggccccagccccttgtaggcctaacacccctccccagcagtgaggtgggcctagggcagcgggggccgtagggccaggtcacaggaggaatttttacagtggcatggctgggccctgccccctctcaggatacagagaaacaatcaagtcctatgaaataataaacagtgccaatacttcagttatcaaatatgcagcttcacaaccccgcagcagcttgagagccaaacatttgtctagacgtggtgccttctctgaggcaggttttgtttgttgttaagaagtgaaaccttctcccagcccatctgagtcaggaaggttgggtttatttcatggcacttttagaggaactggaagccagatatggggtgagaggccattctggggtctgctgtcatttagggggatcccctgctgagaacatcctcgtattagcttcctgttgctgctgtaacagattgccacaagctaagtggattaaaacaccacacatttagtatcttaccgttctggagatcggaagtctgacgcactctcagtgagttaaagtcaaggcatcagcagggctgtgttccctctgggggctccggggagaatccttcctggcctgcatgccttggctcgtggccccttcccatcttccaagccagccaatggctggtgagtcttcgtcacattgcatcactctgacactggttgctctttctccctcttccacattttaggaccctgttggtgacagtgggcccacctggataatccaggattatgtccctatcattatccataatctcatccacaaacttaatgctcatttgtcatggaacctaacgtattcacaggttctagggattagggcatccctgagggcgttatcctgcccaccacagtccccctgccctattctggaagctgaggaaatagggttgaggaggaaagtgagcccaggccgtagctggagagtctgcaccctcggcttggggctgcctccaagtggcttacctttcccaccgcctccaaccccaccacagctgccccatcactaacagatctcccccaacccctgttcttttcctaaatgttggtaaaatggtcattaagtaaagcagcattttttccacatccctacccttgacttactttttcttttgagatggggtcttgctctgcacccaggctagagtgcagtggcatgatcatagctcactgcagccttgaacttctgggcccaagcaatcctcctgtgcgccaccacgcccagctacttattttatttttatttttaatagagacggagtcttgctatgttgcctaagctggtctaaactcctgggctcaagcaatccccccatcttggcctcccaaagtgctgggattacaggcatgagccaccacatcttgtcccaacccttgacattttagagccaaccatgctttgttccaggggtctgtcctgtgcacagcgcaatatttaaccacatccttggcctgcacccactagctgccagtagcacctctccacccagtggtgacaattaaaaatgtctccagacattgccaaatgttccctgggaggccgtcgctggggttgggaaccactgaggtaacgcgttggatgtgtctgtcttccctgctagcgacactgtgtccggcacctgcagagggcctgccgcttagtatgtgctcaacacatattggttgaacgaatcagtgaacctatgttaactttcttaatgaataaatctataagtgtgcatgtataaaatagactcctgggttccatagactggctgcctgagagtcacctggggatccttttaagaagtcacattcctggggtccaatcacagaggattggggtacagcctagcaatctgtattgtcaagagtgcttcatcagttcccccaaaacttaaacatatataccatataatccagcaatttccctcctgagtatatacccaaaagaatggaaagcagggacttgaacagatacttgtttgcaaatatccatagcagcgttatacgtaatagctaaaaggtagaaacagcccatgtgtctatccacaaatgaatgataaacaaaaagttgtatacccatacaacagaatattattcagccttcaaaacaaatgaagttctgacacatgctccaacatgggcgaagctcgaggacattacgctaagtgaaagaacagacacaaaagaacatgtatgattcccttatacgaggtatctagagtagtcacaatcacagacatggagtgtaggagagaggttgccgggagctaggaggaaggagggaatgggagttaatgtttaatgggttcagagtttcagtttgggatgatgaaagagtcctggagatggaaggtggtgatggttccacagcaatgggaacgtccttaatgcagctgactcgttcacctaaataatggttaaactggtacattttatgttatgcatattttgccatatgcaaaaaatggtgcttcatgcctgccaggtctgagaatcagtagtgtgcgagaggaatggggagcaggggatggacccgtcgagttctaacgaccctcccaggccttgcagctgctgggatggggacatcagactctgctgagctagggtttaggctgatttcttgagagggtggccctatctgggcgtgcacagaagaacctctaggctgcctgaatgagggctgcggctagatgaggattggcttgtctggaggccacatgtgctgtcccccgggcagctgctgcccagctccggctgattcttgccatgtggggtgcctggctgtgggagagacgtccaaggtctggatttcgatgtgaaatctcctcatttttatttatttcaatagttttgggggaacaggtggtgtttggttgcatggaatgttctttagtggtgatttctgagattttggtgcacacgtcatctgagcgaggtacactgtagctagtgtgtagtcttttatccctcacctccctcctccccttcccccaagtcccctgagtccattatatcattcttgtgcctttgtgtcctcatctgagctcctgggaatctcctaatttttcaatgttggcaactggttcagtgaacaagcaagcagacaaacaagccacctaagggtcacactggtgaccctgcgggcctccggtctggcttgcagcttttctgggagctcacaggctgggtccccagctagatccttgctcctgctcccgtcatggctgccgcgtcactcctgaagtctgacaccagctttctctttgatcctctgagaatttctcttgtattcagggcacccaaaatggtggtttacagagagaatagcaagagccagggcccagggtctggattctgctcaggctggggtcttggctctgccaattatgagccacggggccacaggtgacttgctacctttcccccatgccttgatttcctcatctgtcaactgggtatatcatagttcctgccggccaggtgcagtggctcatgcctgtaatcccagcactttgggaggccaaggcaggcggatcacttgaggtcaggagtttgagaccggcctggccaacatggtgaaaccctgtctctactgaaaatatgaaaaattagccgggtgcggtggtgcacatctgtattcccagctactcgggaggctgaggcaggaggatcgcttgaacccgggagaggcagaggttgcagtgaaccgagatcgtgccattgcactccatcctgggtgacagagtgagactctgtctcaaaaaaagaaaaaaaaaagttcctgccttgtagagtaagggtgaagcctgcaggtgaggggcttggccccgggcagggccagtgcatggctgagcagtatgcgcgtgtatgtttatatgtacatgaaatgtgtgtgcacttgtgtgtgtggcccccgttggcagaaagagtgagcgtggcatgggtgatttcttcctcaaagagtcattctgaggattaaacaagataatgtacaggtggagcctcaccacggcaggtgccgcctcaccacggcaggtgcccaatacgcattccttctgtccctcggagtgtgaggccttggccgtctgtggagatttgagaggaggacactgggctagttggagaggagggagttgggttgaagatgcaatgagaggagaggagagagactcctccccatcagcactctctcctgcttcctggagcaggagcagagttctggtcccattctcagaggcaggtgcactggctaatcagggctatgaccttgctttccaggatagcttggatgacagttaagaatccccagttctgtgcctacttttaaacacatgctaccttgttttccctcctttcagctttgggaggaaggccttactgtctccacttcatggatgaggactcagagagggcgggtgcttgtccaggcttgcctaggcagcaggggatggccacagggccagagcaaggtggaggacaggttgggctggctgggagagggctggagctgagtgccactgggctcccctgggttgctggtgtgcagaaggggccttgtcctgcccagctggttcctgggagggtgacagagtggaggggctgcatacccacccggagcaagcagacgagctacataaaatcctgataaccaaggggcacaaagggctccatgacctgtggtgagtcatggacagatggtggctaagcgccactgtaagggtggagagtgggtgacggcaccttggtccccaggagccctctggccacatggcacagcagtgccttcaggtccaaggcccagatgctggtgggctcagggacactgaggcccagagcttcaccccatcgctgtttgcgcctgtgcaccctgacacctgtccatcatcccttggaccaggagtgcaaggatgacgggaacacctgtgtgcgcctcatgtggttctgcacgttacacgtgactgttcattacatgtgttcattactagtgcacattcattgtgcgtgtgcatgttcatcatgtccacgtgctcagtactcgtgtgcactggggaggatgtgaggcagggcgggcccctcaggagtccctccttccttccagcctcggagactctggggtttgtgaggagcaagaagaaggcggtacttgacaagtggaaactgaagttcttgtcccccaacatctagcctccagctggggaaggagactctccacagaaagcaagaggacaaaacgagggccatgaggggccatgggcacctgcctgtgcctctgccccacagggatgccccaagctaaaggggatgttcagacgtggcaggcctggcccctgctgtgggaaggctgtggtctagtctaggggaacagccgtgggggatgcctggtgtgggtggggtgcaggggagccctaggcctcactgctagggggccggggtcaggcaggactgtgcgggatactggggctcacagcccacctgggaggaagagtgtgtgtgtttgtgtgtgtcttgggctgggggtgtgtcactggcttggcctacagcccgtccctctgtctctcagcccaggaggctggtgggcaggctcactgcggggacgccgcaggctctggagcctcagccaggcatctttttccccatctctgcagggggcggaggaaagcgcaaagggaaaagcaagaagtggaaagaaatcctgaagttccctcacattagccagtgtgaagacctccgaaggaccataggtaagctgtcctgcctgggggctgtgcggggagtgagtagcaggtgatccgccaagccgtttgtgcattaaggcaaatgggtgagccgccaagctgtctgtgcagtgaggcaaatgccaatcagtggacacagtattgtgcttccaggtaggggctccaggctgacctttttgctaatcaacataaacaggcaaccagtattcattgaatatatggcatgtgccgggcagagtgacctcctcccagttatcctttgaggcaggtgctattatttaatatttcacttcacctttcagatggggaaactgaggcacagagtggttctgtaacggcccaaagtcacacagctgatgggagggtggtggaggtgggccaggcccaacacagagccaccgctcataacttctcccctttcttcctggagcctgtgggtcctgccctcagggggcagcccaggctttgggagctgagagtcaggtggggtgggggatgtggggtgaggtgggggaggtagggctcccctttccacttgctggggatgtcagtgctcctgaggagccactgggctcagtggcacagcttagccccctgtatccagcacacacacaccaggcacctccaagagcagccaaccaagtgggtctgtgcctggtcccacgcaggacacggctgtggtgaggaggcctgggtgcctgggcgagagcgcccaggggacaggcatgatgtgaggccccactccagagtgtttggggtcccggcccttctcccctctgtgccctggggtgggtccttccccatcactgcctgagggctccccatccgcttattattgtcagaggtcatggacgtgctgaacacgtttaagaagactcaagtccactgaaggctgggcacggggtggtgctgcccagaactccataggcccagcttttctggggacttctgcccagggcctcgggtgagctgccccgtgcctgccctggaattcaaggccacatgtagccatttattcagcttttctaaatggcctcttcacggtctgtccccaccagtttccagggccggggggacttacctgccacccccaggcttgctccgtcctggccctgggccactcagtccacactccatgtttataggtgataggaggccatctgtgccccgccccacgacggcagacatgagcaggtgaagcaaggtgggatcctgaagggtcaggaaacgtccttaagacccaccttccatccctaaaatcccaggcacatcagaatccccatggtgttctcgggccgagaatgctgctggcctgagggattgggggctctgggtccaggcagacatgggttcagatcctgccctctctgctggccacatgacaagttactttatcctgctgagcctgtttccccagctgtaacactgtctgtgaacccagtcatagggtggtggagtgggtgagatgagaccatgtgtgtaaagggcttagctggtgccctcgtcgggagaccaggggcccatgcccctctgcacactggcgtgctttccggagttcccacagacaccacggtgccgtggatgccgtgtgcacccttgatgatcagcttttctgctggaggcagtcgaggtcgggtggaagagaagaggggctgtgttcctggggctgtagcttactggggaggatttgaccactgagactttgcagggggccttcagagaggggagccagggagaacccctctggtgactagccatttcctcatgggggaccattttgttcttcatgctaattttggctcagagagaatagggcctgttgtgggactggggaggagaccttagttgccatggttgcaactcacccatgtgtgcccagcaagtaccccctttctggtgagccaagccttctctgtcattttcatcctgggtctgctggctgccagaaagccattcctggatgctgagcccagcttctcccaaaagagggatgttacctcacaacccattcactgtggccccagggaacgtcttgcactcatccacagggccacagggctgctcggagagacctttctggggtgttgagttggaggtgagagcttacaacaggaggaaagcatctccaaggggagcaatgtgagaagcgggcacctgcgcacagccacgctcacctggcagggcggtgcttcccggccctggctaaactgtctgcaggtggtgatgccaggagtgctatggggcacagccagatgtgaaggccacttcctcagagaagcctcttttgactcctgaatttaaatgagctccagaccagagtctctcagagcacctgtcctcttctgccagagcacccttcctcagggctctttggggaggaactggattgttaaaattcaccactgcgtagttggtgcctgcctcacaggaggggcacaatagatgttagttggatgaacgagggaaggaaagaataaatgaggtgtaagtgaccactcaacttatgaagtgtttctaataaatagaagaagagcattgagagccagatactgagcattcatgtatctgccatccagatgagagaaatcttaacattttgctatattttattcatgtgtttctcaaaaatataaaagatgaaaatatgaaatataggatttatggttccagacaagagggagtagatgcggtgtttcctgtccttcccgctaaggacagtcaaaaaccctggacattatgtataaaacaaacataagattttgaaagccgggagagaagaaggcagactggctggggacctcgagccatgagggacgacacagcagtgagcttcctgggtttcttttttatatcccagagtggatactagacaaacttgcaacccacaatgccagtgggtgcagactaaaaagctccttccctcaagaccagcctgaccaacatggagaagccccatctctactagaaatacaaaattagctgggcgtggtggcgcatgcctgtaatcccagctactcgggaggctgaggcaggagaatcacttgaacctgggaggcagaggttgcagtgagccaagattgcgccattgcactgcagcttggggaactagagtgaaactctgtctcaaaaaacaaaaacaaaaacaaaaaaaacctccttccccctgcagaaaagcttttgctggcatagctggttactgtagaactgtcccgtttctgctatggttcacacgccagcaacgcagacacctactttttttttttttttttttttttgagatggagtcttgctctgttgctcaggctggagtgcagtggcgtgatcttggctcactgtaacctctgcctcctgggttcaagcaattcttgtgcctcagactcccaagtagctgggattacaggtacctgccatcacgcccagctaatttttgtatttttagtagagacagggttttgccatgttggccaggctggtttcaaactcctggcctcaagtgatcagcccatcttggtctctcaaagtgttgggattacaggtgtgagccactgcgccgcctttttctccttcatgtaacctatgtcttagcatgggctgctttaacaaatacccacagactaggtggcttaaacaacagacatttatctctcattgttctggaggtggggaagtccaagatgaaaatgccagcagatctgatgtcctcatcagtttttcctggtttacagttggctgtcttcttgtatccttgcatggtggggcgggggagggagggagggagagagagagagagagagagagagagagagctcttgtctctttttataagagcactaatcctattcatgatggttccaccctcatgaccaaatcacctcccaaaggcgttacctccaaataacgtcacgctgggggttaggtttcaacatgtgtgttgcagggaggatgcggacattcagtccatagtctaggactaggttcagtgccaacctattcctagattcaaagagccagtgcaccctggctttccacctctcccctgagacacagcttctcatactttgagattaactagccctgccaaggcctggtgtccctcccagccccctcctcccaaattaagactcttagatctaggatgggtgtgatggctcatgcctgtaatcccagcactttgggaggctgaagcaggcagattacctgaagtcaggagttagagaccagcctggccaacacggggaaaccctacctctactaaaaacacaaaaattagccaggcatggtggtgggtgcctgtaatcccagctactcaggaggctgaggcaggaaaatcgcttcaacttgggaggcggaggttgatttcctcactctaggcctcctccccataagcttccaggcattgccctgggagcacctgagtgtccctcagcttccagtctgcctggccccacctcattcacttccactgtgggggacctgggagcacaggatttggctctgagcttttttctgtccatggaccacccccccgccgcgaccatgggccccagccctgtctgtccttctaggtccataaactggcctcttggcagggcccactcccctgggatggtgtgaggaacgtgcgtgctggcgtgtggaaatggattcttctgttctgccggagggtattgaaaaggctctgtgtgtgagtgccgtgggagagaggcccgggaagggcaggaaggctgacgtgagccgtggggctgcagctcgtggccacggggccagggtctgggccttcccactgtttacagtccgtcgctgaggtgtttgcccagtctctgctggggtcctgctggaaggctttttaaaataaaattctcatttctttcctagaccaatacacaaaccaaacagtggccaataccgcatttatttttcttgtggacacatgagctcactttctgaagttctttgggaggatgtcctgggacaggctttgtgccaaggggacagggcccctttagggtgtgaggtggtgccatgagaaggctcttgatcagagctgagggcagaacccatgaggaccccaggatgccgccatgtctggatggccccgaacggtggtctgttaaagccctggccttctgccttcagccctgccctggacagtcatagaccatctctacctagcagccagggtgatttttgaaaaatgaaaactggaccctgtgaaatcattctcctgctgaaaccaacccaacagctctccattccactcagtaaaacccagactccttactgtggcttgtaagcactttgccctaaggtgaagcctgtagaccccttatcagaagaatgcttttatagataaaatagaatacatagggttacagaggaaactgatcctttttaaatatacttactacatacttctaaaatttatgatacagaaatatatgtgcttctttgttaatactttataaggtctaactgtgggtctaatagctattgtaattttgatttttttttttttttttgcctcagagtttgactctgtcgctcaggctagagtgcagtggcgtgatcttggttcagtgcaacctctgcttcctgggctcaagctatcctcccacctcagcctcctgagtagctgggactacaaacgtgcactaccatgcccagctaatttttgtattttttgtagagacgggattttgccatgttgcccaggctggtctcaaactcctgagctcaagtgatcctccctcctcagcctcctgaaatgctgggattacaggcgtgagccactgcacccggccagctattgtaattttgaacttgtcatgaacctgagtgagcttttcagatatctgcaacaactgataggaatggatctttgatttctgccggtgacaagtccccggcactgctgacatcattgtaggttgttgtctacattcataattgaaggaagtgcaaattttcagttagaggttggtgaaaagaaagatgacatttttctccaccccagtccatggactctctaaatcctatccatggtccttttggcagtgccctgcctgtgctgccctatgtgagctggccctcaccttcatcttggatccttccctcctcctccattcacaagctggtctcccttttgtcctttgaataacacacgcttgtctccagcccagagcctttgcacctgttctctctacccggaatgttcttcctcacactttttcttccaggggactttaaggtctcagtccaaatatcatctccatagagaagccttctaaaaaggaaccataccctccttctaattgcatcctttcccatagtgctgtttatttaatgttcttacccataactccgtctgaagccatcttttcgtttacttgtgtattttctgtctcccacactgtactagatgttctatgttaattgcaactgtgtcttgcctgtttcactatgagaacagtgtctggcacataataggggttcattaatactgggtgaatgaaggaatgaatgaggtgaaatatttgaaattagagctcttctaaaaaaattggtgacatgtgtttgctgtacccatttaaccttagccagtagtttacacttaaagtaattaaagtctggccttaggaggcactgtaggtagcatctgctgtaacccacccctccccctgcccaccatcctcaccatctggatgaggcagctcagcatggtacatgactcagccacagtctcacagccactaagtggggaggggaagctggtggctcctggggcaggttggtttcctctgaagctgtagtcggagtcatgatcacagtgatgtcaggttttcacagaatccttagctcaggggactggagagcatcttgtccaccacccattggtggtggagtaaacaggcttcaaggggagagtgacccgcccaggagagccaggtccctggtctggagtgacaccttgcaactccccatgagcatattgctgcataaacgtgtgggcagggccccagccagtactcaaggcagggagactacttaggtgctcaaaggggtggacgtttctgtctctcttgtatcttgtaagtgtgtgcagcgagttcctctgcttattcaatgcatgtttagtgagcactgaaaacatgctgtccacgggggagctgagcggatcgctgatctcctggagctcatccaccaaggagcatgggagaccaactgaaattaagatgagatgacaaatcaagaaagttccacagggtatggagcaggttgctgagctgcagaaccaaggcaaagatctatccccacttccctggaggaagtggcgtccctcctggcttaaaggatctctctgcgagctccctgagggcctggaccacaggctctccatctgggcgtctccattgctgtagcagcatgagtgggtggatggatgttgccttctcttcaacctggaagccaggactgtgagtggcagccatgagcactgagacagattcctaggccaggtgcagcggtgcaggcctgagcattgagacagattcctaggccagctgcagcggcgcaagcctggaaccccagtgctttgaggggcggaggcaggaggattgctcaaacccaggagtccgaggatacagtgagctatgaatgtgctgctgcaccgctccagcctaggtgacagagcgagaccctctaaaaaaaagaaaaagagagagagagattccttgccacccatctctctgcttccagtgtgagccccacgtatgaactaacggattttcaacagaactggcacagggcagacagaccatgagaggaagaaggggttctctaacgtctgctcagtgaaacatcaaatagtgactttattagttaatgggataattgttcatgggagatcattagagagcccaaatcaaagaatttcttaggatgtccgaaacttggaaggctggaatgtcatcacgaagataaaagattgttgaggtctgcaaatatttctcagtgacgcagaaaggtctgttgggcaaaagtgtggcatttttatttatttagctcaggctcattgcgtactttattctttcattaaaaaaagtctgagggggcttgagtgaaagagttgattattccactgtttggcaatatttctgtaggaactgtccaaaagctatataataaatcaaggccccctccccaccccccaacaggactgacatttatgaggaggctgttcacagaaagtagctgctgcgtctggcgtgccacagcagtgccccgaaccctcacagacagacaggggagatcgaattgccttgtgggagagcctcttgccaaagccttaactgtttccaggagcagaagtcccaggctgtgggggattcctagaggaaaatgtagaatcttttaacatgggggaaaaaaaatcatcttcatagtgtgaagatttccttgaagtagtctagtacttggttattcacccaacattgcctgcctgcctgctttgccctgcctgccttgcctctctctctctctctctctctctctctctctctctctctctctctccccctctccctctccccccacctcctctttctttctttcctcctttccttctttatctttctctgatatttattttttgagacagaatcccactatgttgcctaggcagggctcaagtaatgttcctatatcaaccttctgagtagctgagactgcaggtgtgagccactctgcccaactgccatgttcccttttttgtttttttgagatggagtctcactctgtcccccaggctggagtgcagtggtgtaatcttggctcattgcaacctctgcctcccagattcaagcaattcttctgcctcagtctcccaagtagctgggactacaggtacctgccaccacgcctagctaattttgtgtttttagtagagacagggtttcaccatgttggccaggctggtctcgaactcctgacctcatgtgatccacctgccttggcctccccaagtgctgggattacaggcgtgagccactgcgcccagcctgcgcatgttctttaaaccagacactggctaacagatacttgttaagctcctcctctgtgctaggcattgctgcagtcaccggacttgtgtcacaggccacccttgtccagcagcgagggctcctggaaggatctctgtcactgtcatcaagatgaagtggtggtgctgctgctgccagccctgtgactttgagcaagtagcttactttctctagtttgcagtttatttgtgtataaactggagacactaacaccaacctggtagagcctctgggaaggccagcagagtgttgcacacaggccatcattgtcatcagcatcgtcattgtcatcgtcatcctcacggcgatagtggtttgagggcagaggttgaggaccctttgagagggttttggagtttcccagagaagctgaatcggctacacatgatggatgaggccagctgtttttgtgctgaggtgaagtgggttcagtgtcccagagactgttgccttggagtcatcggaatcctcctcttcctagagcactgcctccagcttcctcttcttggaagcctgccctgattcctgcagtcctcagccttccttcctccccacggctccacagtttgcccagggaagctggaagcatcacactctgcccaggcccctgctctggcccagtgtgtttccttgaaaggacgtgtgtcatctagaagcctgcagccccgagtcctaacaatggttacccccagggaaggcgtgaaggtcagaggggacactggctttatctgtaagattgttttttttttaaaaaaagaatgaattggcatgttctttgtctaattaaaaatcaaatgaataaagaccaaataccctgcctgattccacagtggggcagagggaatggtgacactgtttccccctttccttgttagctttgtgccccctgatgagtctggggcccctgagaggatgatcagaatctcacacgtcttggtgacccagtccccttcaggcctgcctggctggcacgtgagctcttgatttcatcgtcagggaaaccaagtctctgcagacgtcattgctgtccttggggtgataagggcgcgtcatgtctgtcgttctgccacctagccgtgctgtgataaggcacagcatctgcttgtccttggagggcgaaataaatttagatgtgtcgggtttggaacatcaggtgacctgtccgcagctggagctctcaggagggaagggtggccccgctgtctttgcggtgttagtctcacctccccactacggccggaagctccttgaaagagaaggcacgagctcaggcacatgcaagatgcccagcgatactgtccgtgggtttcttgtttggacagtcttagaatggagtggtggcagggattttacagatcacctggagttgtggttttcaaagactgctctgcagggagagtgtgtgatctagaccaggcttttacccaattgggctttattttaccttttatatttgggcttccgtgtcagatttcattctagggctaaatttgagtttgaaacgcactgttctaggccaggtctcccatttccagataagtgaactgagtcccagagaaacaaggtcttgccagggtcttcccatgatttgactccaaggcaggctctctcccctactgcgttagtttttcctgaggttgccatagtgaaataccagagaccaggtggcttaagcagcagcagtttattgtctcacagttctggaggctggaagtccaagatcagggtgtcagcaggtttggttcgttctgaaggctgggagggagaagctgtttcaggcctctcccgtggcttctgtgggtttgctgtcattatttggtgttctgtggctgtagactcatcagccctatccctgtcttcaccttcactcggtcttctacctgtgtgaatgtctgtctctaagtttcccccccacttttttctctttttttttgagacagagttttgctcttgttgcccaggctggagtgcaatggcacgatctcagctcactgcaacctccacctcccgggttcaagcaattctcctgcctcagcctctcgagtagctgggattacaggcacccgccactgtgcccggctaattttttttatatttttagtagagacggggtttcaccaggttgccaggctggttttgaactcctgatctcaggagatcctcctgccttggcctcccatagtattgggagtacaggcgtgagccaccacacctggccaagtttcccctttttcatgaggacaccactcatattggattagggcccaccctaatgacctcattttaacttgattatctctgtagcaacgctctttccaaataaggtcacgttctgaggtaatggggattaggacttcagtgtatcttctttaggggatccagttgaacccataacatattcacgtgctcatgtggtctggtggagttaaaggtagaggggtcagggatcctgattcccaccgggtctgagggtggacactccttctctcctgagcctggtggggagttaaccactgcagtcccaggctgctcacttccccagtggaccacaggaatgtctgtgggaggagcaattgttttccaggccatgttgcagctttttcaatctccctgtttgttattggttaagtcatagtaattggtaaattattttgctaaaaaacacagaaaattataaggaaagaaagtcaccgctaattttacatctcagacagagccatagttaacgccttcatgtaatttcttctagcttttttccccatacatatacatgtggttttgtttcttacctcttttcttaacatagtatcaaaaatgttttcccttgtcattaaaatcttcataaatgtgatgtacatttttccatttgatgcatatttagtgagtgtcaggcatggtggatacatcagtgagcaaagtgcaaaacttcccatctcatgggctgccctcctgcaggtgaaatgacatactgggccattgggagctcacctagtaccctcaacccagcatccacccaggcccccggtctctcccaacctatggcttacttcctgttggtgaattcttcctttaagcgatcttgaaaataagcccttgcttattttcaaatgaataaatgtgaacccagaataaatgtgatttgtaaagttctcataactatcacatgtatatattctactatttgggttttttccacctagtttttgccattacaattaatgttcaaatgaacatctttgtacttcattgtgacattttgatctatggctcaaagtaagaaagtccactgtctttttgaaggccagaacacagcagcctgtacagtgctgtttgcttcctctggaatgttcttttcatttccagctttgcacttgcatccacagacaccattaacctgaaatgtgatggggatggacaaagtggatgatgtttggcgagcggcctctgcctggcttgcctgcctcggttcactgcagtcagcaggtgtgagaaggatttttctgtctattttaaggcccctcactgaaaatgggaaaaacaagctcgtttgtgcgggggacctcaagccaacacaagagcccagccaccctgcagcagcctgagcgtgacagcgttctgccccataaagagatgctaggaaaacacttttaatggtctctgcctagactctgtttacggaatttatttgccagagctcaggccattcagcagtaccttggcagcagggcccagcaaagctgcaactcctgtctcccctccacgtctgcctgggtgtattaaacccccttgttctgaacaccccagagctagtacccgaaaggcaggagtggggggttgcagggaagaaaagccatgggttgtaggatatttggggccaatataaacttccaaattcaaaaacaaaaactagctaggctcggtggctcactcctataatcccagcactttgggaggcagaggcatgtggatcgcttgagctcagagttcaagatcagcctgggcaacatggcgaaacctagtctctactaaaaatacaaaaaattagtcaggcttggcagtgtgagcctgtagttccagctacttgggaggttgaggcaggagaaattgcatgagccagggaggcagaggttgcagtgagctgtgatcacaccattgcactccaacctgggcgatgggagtgaaactctgtctctattaaacaaaaacaaaaccaacaaccaaagaacaacacaaaattaccctccaaagagctaggggcatgagctactgttggctgctagctgtggccgtttccagccagcagtagaaaggaagatgtaaaatcctgaagcattttgagtactgctttgttttttttctttcctgtttgacgattgatgctgaaccatctttaaagtgtggtttttttgtttgtttgtttgttttgttttgttttgttttttgagacagagtctcactccgtcacccattctggagtgcagtgatgcagtctcactcactgcaacccccgcctcctgggttcaaatgattctcatgcctcagcctcccaagtagctgggattacaggtgtgcgccaccacgcccagctaaattttgtatttttaatagagacagggctttgccatattggccaggctggtcttgaactcttggcctcaagtaatctgcccacctcagcctcccaaagtggctgggattacaggtgtcagccaccatgcccagccccaaaacttacttttaattccttttctcattacaaaaataatatatgtcaatggttgcaatttccaaaacaattttaaaaggggaaaataaaaactgccaatgagataaggataaacactgttaacactttggtctgttgcccttttgtagtttgttctgcttctagggagagaattgtaccagcctcgactatcatcttccttgcccagacatcagatatcatttaaaatggaaacctgtgggttgtagaatcccccttggactgggaggcagaagacccagtttcttgtgttaccacttggtcctgtggccttgggaaagccacttaaccttgatttgctcgtctttaaaatggggactcagtattcctcaccttagcagatggagtggccaaaggtgtttctggcagagagtgctttgcaaagtgctgtgcaaattgctggccagttttgatgtgggtgtgtgagcctttggttggacaaatggccagagtagttttcctgtcttcttgggggaactgtgaccctttctcgtaaagctgttctgtctctgatcctggtgaacatcaccagcttcctctagctgcccagagctgcccctcccctctgccctgccgtgtggcacctggcccagtgcagtgtccagtccctctccaggtcccgatgcctcggcctccacagtatctcctagtctgcccctctcgccccatctccaccatttccacttgatccttgtccctgcctgaactcctgtgtcagctccttgctccctccaggcgcacctacttccaaccaagctccatgcagcagccaggaggctctttctgaaatgtcagtctgctctcgccaccacctgcttcagtagctttccactgctgtcaggacagagtccagaggtcttgctgaagctgaccaggcccggcctctccgcccttgctgactgcttcagcttcacccctgccgctcatctcctgacttagccattccttcatgtttcttcttttctccaggcctttgcctgggctgttccctctgctggatacacttccctaaccctgcttggtaatcaactcaaccttagtcccctgcttcataggtcacctcctccaggaagccctccctggtgacctcacctagtcagggtttgctccccaccctcatgctgccactggccccactgtggttgtctgatgactcacctttgtcttctgtttggctgtgggctctgtgagagtagagcctgggtctgcctgactgtgttttgccagcacccagcatgagtgtctaccctgtaccaggcacttgtagaatcttgtttagatattttgttctcccctggagatggaaaaacactcaatcttcccaagtgttagactgattgctgatgggtcttatttttctctctgagttcttttaagagtcctggaaatgtggactgagaacagctgtcgcatgtcagttccgaagtagccgcttttatcagaaacggtttagagagagattcctagttgcacctcccgccaagggcagtgaccccacttttctctccccttgcaggcccctatccgacctcaatgggaggcgtgggagagttatggggagtacatcccaccggcacagctgtcatgtcagccctgtctggctgccggagttcgactggtcaggcgagatgggcacaggcacggctctgctaaaggccttggctgagcccagcttggggcagagcaagccactgagaatggctttgccagaagactccgtcatcaggcttgggtgtccacagccttggagtgctgaacagctggaacatcctgaggcatgtggcgggtcagttgggacaaagccattgagctgctaaaccaaaccggtgctgctggattgggacggagacagcagtgaggaacatgagctccagtgtcagagggacctggttttcatccaggctctattccttactggttgtgactttgagcaagtgattagatttccctgaacctcagtttccttatctgcaaaatgggaactggagtgttgcaaggattgagtgaagatctgcatggggagggctgcgtagggtctggcctgcagcaagtgctcatgcagcatctgctttcccgtcttcctcttcatcctcacagccgttcatcatcgtggttgtcatcaaccgtcccgtgcggtgcagagctttgcttcttggttctgcctgcttggtggttgccaggtcccgccagcttaagtttatctgttcgttcattcattcatttatctgttaagcccctcttccttcttccaggccagggagccagggtgctgccaggtggtggggagcggctttcagaagtggctcttggcagcgcaggctgggctacatttatggcctttatgtaacccctttgccctgagccccattcctgcccctcagatctttatttactgactctcggcagacttagaggtcctgaaaggcaccccccaacgccctcatctcattcatccttctgcctccaggcaggagggtcctcagccatggcagacatgtggggtgatagccaatcccagccatgagcccctattcagctttcaccctgggcaagatcctgtggagggtcccagtgtggggctgggggagggatgtgggatcagctgagatccttaggaagctgtctctagttgggaagacagcagaaagccaacacgtgacactgggtgacagccctgtgcaagtgtgcaaggcgggtggctgccaaggtccatcttcagtactaagagcccaagggcggggtggggaagggggacagagacatctgtgtggcagggaaggtgccaagtgaacagatgagagagagagagagagagagaacacttttgggtcagcaggttcagcgttatccaaccagcaaacatttcctggatgcttactgtgggccaggcaccaggctatgtgctttgcagacacacactcgtccaatcactacaaagccctgtggggcaggtgctgccttccccacccctattttagggatgacgatgcagagactcagagaggttggtaagttgctcacaggcacagatctctgaaggaagtggagcctggattcacacctgggcctgagtcgaggccatgctggctgtggatttcctccatattggccatggcttccccgtggacgtggaacaatatgggcatgtttgggagaggaggtgtattctgctttggtgggctctatgcagaggtcatgaggcagaaggtcaggggaggctgggttgggcccgggacaccagccatgcctcctgtctgaaaggtgaggtccttgccccgcagatagtagggatccattgaatgttcatctctgatagccgctgtctgcagtcatcctcagggagagagcagagagcaaagggaagccatggacagagcaggcgggcttccaggctatatgagatgcagttcctccttctccaaattcttattaacccactgtgtacggcgtttctcaagtatccagcccaggacttgggatgtaccataaacagcctccacttctgatgacggtagcgctaaggctcaggtaatgccacaggaggcaggagcggctggagcttctctctcctgcagtgtcaggccagagcaggtttttcttttttctttttcttttttttttggcggggggtaacagatccttttttattttttatttttttggcctatgcagcagttattttattttattttttttcagtatttttattttatatttatttttgattatactttaagttctagggtacatgtgcacaacgtgtgggtttgttacatacgtatacatgtgccatgttggtgtgctgcacccattaactcgtcatttacattaggtatatctcctaatgctatccctccccgcttcccccaccccacgacaggtcctggtgtgtgatgttccccatcctgtgtccaagtgatctcattgttcaattcccacctatgagtgagaacatgcggtgtttggttttctgtccttgcgatagttcagagtaggtttttctttgtgacgcccggtcgcaggatgtctttcagcaccacctgtcagagctctccaagccggcagctgttcccgctgcccacctgtcccttccctgctctttttggggatggtttctcgctcccctgctgtctgtcctctctttcccctccccctgcagggccttttggaaggtggcagatgggcatgaatgtcacactggctgtctctttgcctgtgctgtgcgtggggccgtctagcccgagagatcagctcaggcatattccaggtgcggcttatgttggtgagaagttctcataacctgagctgatgggggtcagaatgtgcgtgtggggtgcagagggagcttcccacccctggcagtcccctgccctcctcccttggccagccagccacaagacccacccttccttccttccttccttccttccttccttccttccttccttccttccttccttccttccttttcctccctccctccctccctcgctccttcctttctttttctttttttctgagatggaatctcgctctgtctcccaggctggagtgcagtggcgccatctcggctcactgcaacctccacctcctgggttcaagcaattctcctgcctcagcctcccgagtagctgagactacaggcgcccacaaccacgcctggctacttttttgtatttttagtagagacgggatttcaccgtgttagccaggatggtctcgatctcctgacctcatgatccgcccgcctcggcctcccaaagtgctgggattacaggcgtgagccaccgcgcccggccacagactcactttcttggggtttggcaggtcagcaggttttgtgctcatttggctttagcatgagaggagtggttcccagccccgcaatccagctgcagtgttaacttcccactcatctgttacctggatccctgtttcccacaggggcttcctagcctcaccgggtagaaacttcagaattcgcccatgggttggatctgtcccctcttctccatccttggtacttgtcttcctgcatggactggtgcagtagcctcttctttggtcctctgtttctagctggtatcttttttcttccttcccatttattatgactttcttgcttgctgttcttaacactcagaagattcttgacttctctgaagtcgtgaaacttgacactcctagcagatatcaagggtctgtccactgcctatggttccttcaccatatacttcccctccaccccaccctgccagcagacttcaggcccttggggaaacccagcagcagcatggtgggtaatagcgtgttttccaagttatggtgtcaaatctctgctcttctatttaggagctgtttgactttttttttttttttaaacctctctgaactgcataaacagaaaaaaacagattttcttcttgcttctaggtctttggtacagctgcatcctctgtcctctccacctggccaagctttacctccaatgtcagtggatccctgtcccaaataaccacccaccccctcccccaaggccctagagcattccacatgtgtccccaccaaacattcccaaggaacccttgccatggggagcaggactaggcttcaggtgtctgttttcctagaaggtgcgtgtgcctcctccacctttgtaagcctaacccctgttacaatgcctgggctctgcgggagcccagaagtgtgtacaaaaccagtgagcaagcaagggaatcagtgaggaaggggaaggaggaatgaatgatgaggcagcatcgccgcagcggggccgaggagaggtcccccggagcatgcccgtgcagccctaggggtagctcctccctggagcaggtatagctcaccccctagcctggcagccctgtcttcacacctccacagtctacagggtttcggcatttgcttcagttatttactgaccatgatctcctaggtcagatttatcatttactgggtcaggaaagaaaaagccccatggggccaggtttatagagattaaatccactcatgccgaagctggcttcctgcttgggggatgctgcagtgatgcctcaggcctgttcctggagcccgtcagtgccggctgctctgggagtggcctgaggtctctctgggacatgtgggctggagctgcaagctgggtgccttctgccagctgcacgtgccacctggctggccatcagaatgccatcagagagggctggctggctggctcctgggcctcccaggaagaccatacagggactggagtcctccctgctcaccgggtcccccaggctccggcagaggcaacgggaggaaccagttgatcagaaagctgagcagattgagctggcctttcttgttagtttcctccaacagtggtcccctctgagggcagagctggacaggcctcctctcgggcccgtgtggagggtattgcatagaatctttctcctaggaactgacggaagtaagtcttacggagattagactgatttgctgtgttttgagttcattttctccacccaggcatcaagatatggttacgatttctgggaaccatttccttagactgctcagtcctgagggctgaggtgtggccggcacctggtttatctgagagggcctgggctcatgcactctgttgcctctcggccttccacaagagtctgcagggattctctcttattgatgggacacagattgtcctcagccaggccttcatgaaacaccacagtatttcatgtatgtgtgtgtgtgcagtgtgtgtgtgtgcacatgcaagtttgtatgtgtccgtgtatgtttgcaagtgtgcatgtgtgtgtatacatgcaagtttgtatgtgtccgtatatttgtgagtgtgcatgtgtgtgcgtgtgtgtacatgcaagtttgtgcccatgtgtgtttgcgagtgtgcatgtgtgtgcgtgtgtatacatgcaagtttgtatgtgtccgtgcatgtttgcaagtatgtgcgtgtttgtgtgtgcatgcacgtgcacgtgtgtgtgtgcacgcccatcaccagactgtaagtatcctgaaggcaaggtgttggctgtcttaggtcccttccacctcaacagatatcaagggaaatgactctgacctggagacaaggccgggacggcaatggggtgttgtggagagtgtcccaggctggaaccagatggcctgaattctaccacagtccccacttaccagccctgggccttaagccaggcctggttcccggcccccgcacatcgtgcatgagaagcatggcccttgctggaccagtaggcgtgtctgccttgcttcagatagtcatctctgaattaaggaagagctctcctgggacctgagtcttccctggggggcagggacagcttggtaggcagagaagggagcctcacctgccatggttgcagtggggtgaatgccgaggctgccaccacttgtccctttctcctccagtgaccaccccccaacctttccttctccacaaaggaggggcagagtgacctcccataagtgggcttctctcatccgccattgttgttctagcccttctgtctccctcaaggacagggccgtgtctcagtcgccagtgccccagtgtgtagcacagtggctgcacaccgtaggtgcttgctatgtgtgttggcttaatgaggagtccaggggcctggctttgagtttctttctactgctggccacccacatgcatccctctttcttcaaactgctgggaagcccatagctcagtttgatgtcaaaagcaaagctctctttcatctgatgtcatcgggggagctcatttgattttcccctccctcttttgctgtttgtttcctgttctttgtcttttatggaacaattgaacatgtgcctttattggaagatgctgtggatcgttttgggaagtaagcaggcaatgaataagtcagtgcgttagaaacgaaggggagaagaagctccctgctcggcctaggaagcaggcaggtctgagccttgttcctcctctctggagaatggacatatgggcacctgccctgtagaccttgaggaatgagaacagaatgggttctggtggtccagtgtgctgggcagcaatgggcatgtccttcttccagggctctagaaggtgggtctactcaggcaggacgatgctatgtggctcagggaatgggctgtgctacaaccagcctggaagaggccagggcttgctgggcgggcacagctggcagctccccattctggaggaaccagccaagagcatgctgaggcgggccaccagtgagtgctttggggggaccaggtgtcccaagtttgagcaccaggaggccagcgctgttgctttgctcttctccatccttgtccaaaaaaggagttcgctccattaagaggtataaataggagtgctgggggtggccagacgacagggccgctctgctcatatcctcgaccaccacaggagggccgctcttgaagtcctggccagcagcaggagacatctttttaagatgttggcaagaaatgagagttaggcaatcttccgtcaccctccgccctcctcccacccaccgtggccatcataacacagaatttcaaagaatgagctcccagtggggagaggttaaacactgtggatttgttgtttcagggaagaactcgtggccagtgacctgctggagaagaggcaggaggaaggaaggtgccgtggtcagcatgggagggaggcagggaggggctgagaggcaggatttgcagtcggtcaagcctgggtttcctcagcttcattgtcacaaaaaagcagagagggaggacagccgctgaaggcagaggcatggctttgagaggtggccgtagtgatgctgtgtccagctctgtgtctgactctgcccagtggttctggaaggaaagcagtaccttggaagcaggcatgggttcagttccttgcccctccacttactcattagatgtccttgggcaagccctcacgcctttggaggcagttacccgcctgtactgtgggacaaataaataacgcctccccagggggtctccatgggcaccagccaagacctgtgtgggaggggagggcctgtgcactcagggcctggggccttcgggtggggaacatggctcaccaggcctcgagatggtcttgaggggtgggcattgggtctgcctctctgtaggcctggtgacagccctttctggggtcattagcctgcagccagcttttttcccagctaagtctgaatggtgaaagccggatctcccatccaggactgattcagtggccaccacttcctacgcttgaggaaggaagaggaggaaggcctcctatcatcctcagaaccaccacctgcctttggtggttgctcatacgtgggcacctgccatggctattgctgcgagtgtgcctgtcttcactccctgtggaaggtgtgggctgctgtgcagcttgcaaagcgcttttcacactccctgagcccaagttttcattcttgttttacggaccaggctctgagaaattgcctcggtcacccacttataggcaaagcctgagccacgacagcttaaccacaggtgtgaccagctcatggccagaatgtgccacaggatggggtaaggatgcaggctgggacggggctggaggcccagcccatgactgccagatgggcctgttgccagtgccggctgccatctctgatgggaccctccagctccagcccctttcacatgtgggtcctggagtctctggtcccaagcagctaccgcctacacctgtcttattttttcagtgcggcatttagccatgggagggagaggtggtgggagaagtaagttaccttcaagtctgagttggcatgaacttgccaaataaaacatttaatgtattgccaagaaacattttgcttgcttacttcttagcagaccaagtgcacaattttccatcaaaacttttccattgctcaaaagtgtctctgacaccgaggctggatcctgcagcatctttgtcacagctcacattttatttggaatctggtgttttcagaatgtcaccacctcttgctttgcgtttcccgatggaaacatttcacaagaatcttttcagctgtcgaagtggtgcaaccctctttcagaaggttttatttgtccagcgcagagaagaaccccttttttgtgaagtccctgccacgtttcactggtcagttcagatcttgccaggctgccatggagtggatcaaatcccattacagcaaaagctgtttgagtttcatggacacgtttgtggaaacaattgcagactcctctgttgacagtctacttccagtgtgtaatgtttgatagaacatgcacgcagcacagcagaagaatttggacagccctcagaatgtgctggaatggaatttggctgggcctgctgtccaggtctctgatggggctgtgggagaatgtttgcccacccattaggcagatattcaatgggctccgtctgtgttgcagatactgggctaatcacagagataagtgcaacccaggccccaccctcagggagcctagtcagtagggaatggaagagacatctgcattttgttcctaaatatgtcagaatcatgttaggaagtggatggaatgtgttatgcatttattttaatgtatgtcattaaaaaaatccagccactgcaacagtaattccactatgttattacttagaaagactaagttggaaaaagacaggaggggcagttaattacaacctaagttaaagaaagatattgagtaaatactgtaatggtggtaactctttgatatggtttggctctgtgtccccacccaagtctcgtcttgaatcgtagctcccataattcccacatgttgtgggagggacctgatgggagatagttgaatcatgggggtggtttctccattactgttcttgtggtagtgaataagcctcaccagatctgatggttttataagggaaaacccctttcacttggctctcattctctcttgccggccgccatgtaagatgtgcctttcctcttctgccatgattgtgaggcttccctggccatgtggaactgtgagtccattaaacctctttttccttataaattacccagtctcgggtatgtctttatcaagcagagtgaggatggactaagacactattataggtggtaggtaaaaaccatgacagcagctcatgaatgactggtatctggaaaaaataagttcaggtgtattttgtgttgattggttgccaggggctttacctctgttctcatccagtccttgggaaccctggataatggtagtgtcagatggtagtcccaactgacagctgataaaagctcataaagttcaaagaagtgaaatgattcatccaaggtcacatgactagtaagtgagggaacttgaatttggatccaggtctgtcaactcctgatcctgaactcttagccactatgctatatggcaattgatcaaattaaaaagtgatccttccctctgcagagtgtaatccaggaaagcttcctaggggaggtggcctcaactgagtggtaggctttagcaagggaagtttgggtggtaaggtagaatgtcccatgggtcagatacccataattattggctggatggtttgaattatagtgacttaaacactttttcctcatataaataaaatcttgagttaggccatgcgttggctcttctgtgtcatcagggtcctaggctgcttttatctctcgattccactaggtgtctcatgatccaagatggcagatagagctccagccacaatattcttgttccaaagaagtagaaaaagataagagggaaagggtaaaagtacatatctcccaatgtgtgagccccttgaaggagcttttctggaagggaaagctaacaagttattcttgcatctcattggctggccctggttattagggaggctgcccactgtgtgctcagcatatgtgaatggaggacaaacatcctgccctcaaggtgcttacagcagatcgaactgcttctcgttgaagctgtaaaggagactgcagttgagtgggtaagaaaaagcctcctctaaccagacttgcctctggagtggccccaataagctcctgggtctgttttggtttcttcaacacatttatttggtgtttaattggaggggaaagttgcagcgattatgtcacctgcccaaggcagcccctgcccaccatctcatcaacccttctgaaaagacaagagtcactcttggtacaaaccagtctcattccaccacctgccatcctctggtgcaattagagcaagagcccactttccacccgaatcctggattggtgtcatttaagctcagcagagccccgtatggtggtgaccaggcccaagttctgtgcagcttacgggcaagagtaggacctgggcactgtgggccacccgggctccgtcctccctctctctcccctgaggacctgggtttgcttttcacttcttatctcaggagggtatgctggccagttgccagaaatatcaaaagtttggagagttctttaaaatcagtggagccttctgggttgccaatgttgttccggggactggttcagagatcaaatcttgttcatgtgaagaagccctctctgctgggatttgggttcatgtgggtatgaaatgcccttttcactttttgggaattgggatgctagaccatggaaagaatgttcgggctgaaatgggagccaggggtgggatacagcccctgtttctccatttgcttgctcaggagacttactccacctggttggaggcagagatggggagagatggcttctgatgtcctcagccaggcatctgcctttgttctgtaattacctccaagtaaatagtcttggaaggaagtttagagagatgtttcatagggtgttagaaatcaaactgctattaatatactaattacagtaggctcaatacttaccattgaaacaggtcctggagagcctctccttggcaacactgttagacattctgttcttgaaatagaaagtccatattctttggtgaaagctctaaatccaggctttccctatgaacagccagcccttttctttggattcagtaggttcagctgcggcctctggcagcaaaggctgggtggagtgaggtggggagaatttgacgcactcagaaagcagtcagctcagcagaggtgtccaaaggtgctggggccccagaggtcccagaccagctacctgacaatgtcattgtacatctaagcattatttttagcaatgacatcactgctactggttttatttttagattgatgctgcaggtgctgtttggaaatgtcttttttccccacatcacttttgtcctggaagtacccagtatatgagggaaacaaaatggcagccaccccaccaagggcaatccattttttctttcttttttttttttttttttttgaggtgacttatactttattagtgtgacttcattcatttttctgtagaaatattactatgttgattttggggatgtttgatatatatgacatatatagattatatttctaaaatctgataagttctgaattctgaaatacatgtgatctcaagggtttctttatttaaaaaaatgtctataaggtagataacatgatgttttgctatatatgtacttagtgaaatgattgctacagtcaagcaaattaatacatgcatcacctctcatagttacctttgtccgtggagtggggcagaaaggttaagagtacctaaaatctactctcttagcagatttccagtgtacagtacgatattattaactatagttctcatattctcatagtgtacattagatctctagacttatcctacataactgcaactttgtgccctacatctccttttttttttttttttttttttttgagacaaggtcttgctctgtcactcaggctggagtgcagtggcgcaatcatgcctcactgcagcctcgaccttccaggctcaattgaccctcccacctcagcctcctgagtatctggggctacaggtgtacaccgccatgcctggctaatttttgtattttttgtagagacggggttttgccatgttgcccagattggtctcaaactcctaggctcaagtgatcctcccaccttggccttccaaagtgctgggattgcagctgcacccagcccatctcctccatttttaaggctgaataatattccattgtacagttgatccttgaagagcacaggtttgaactgtgtaggtccacctttatgaggatttttttcaaccaaacatggattgaaaatacagtattcaagggatacaaaaccctgagtattggaaaggctgacttttcatatactcaggttctgtagggccaactatgggagttgagaatgcatggattttggtatccatcggggactggctctaggactccccgagaatgccaaaatccatgaatgctcgagtccctgatataaaatagtatatttgcatataaccaatgtaattctcctgtatactttaaatcatctctagattacttctaatacctagttcaatgtaaatgctatataaatagttgttatactgtattgtttagggaataatgacaaaaaaatacaaagtctgtacatgttcagtgcagacacaacaatccatttcctgtcaaatatttttgatccatagttagttgaatccacagatgcagaatccatggataaggaatgccaacagtatatcacaatttcattattttttcatctgttgatgaacacttagattgtttctatatattggctagtataaataatactgctagtataaataatgctgcaatgaacatatgagtacaggtatctctacgaggtgcttattttatttcctttgggtatatatccaaagagggcttgctgggtcatgtggtagttctgttttccaatgtggaaaatattaaaaggtataacccacataaataaaagctcctggctaggtgtggtggctcacgcctgttatcccagcactttgggaggccaaggtgggtggatcatgaggtcaggagtttgagaccagcctgaccaacatggcgaaacccctgtctctattaaaaatacaaaaattagccaagtgtggtggcatgcacctgtaatctcagctactcaggaggctgaggcaggagaattgcttgaatctgggaggcagaggttgcaatgagctgagattgagccactgcactccaacagcttgggtgacagagcaagactctatcacaacaacaacaacaacaacaacaaaactcctttgggatctataataatttgtagaggtatcaaggtgtcctgagtccataaagtttcagagtcactgcagtagagggaagaaaaggacaacagaaacagtgaaacttaaatagcatttcctgagccctgagaaacaaccgatgctatatagttattttttcactctaagataactcaagatagaaacttttaaatctagagagctgataaagtaagataataatacattctgcaggcctaagaaccctgatctggaggatcaagactgggtcatgcatacattgcattagacagcgacacctaatgaacaacaatggtattacaacccagctctatgaaaccagggactagcaagagtaaatgctgtattcagactaaaggacatagataagagcacattctgtcaggcagagtatttcattatttgatattcttagacaaaacaaattctcagggtgtggagggcaatttacaaaatatataatgacagttcatttgcttagaccttcttccttagttaagttgaatgttagtggtccatcagggaatctggagcatagagtagaatcacaatcaccttggacttataagaaataattcaaagactttatagaatcagtctctagtcccagaattttatgtttttaccatgttcgtggctcatgctttcttgatttctggcatcctgtctgatttctgagtttgggctagctagagtcttgtttgtctatcttcttgatgcccaataagatcagcccctttactgtgcctggatttctatatccagcattacctaaatccaactttacacaggctttgggctcttccagttcctcttctgccctttaaccccatgtgtgccccagaaccatccacaaggagatgccaagaatagagaagatgaacaacaacaacaacaaaacagaactgcagcccttctgtatgcttcagtctctagcaggctcagcccaagccactaccgatcccttttctcacaagttttcaatgcaatctacaggaggctttgtattctcatataggaacccttctcaaaactgataaaacgataaaggctttgctttactaaaatttgctgtgccagccctctctttagcaactgaccagtgctgagctatctcatgctacctctatggcattgtcaaagaaggcagggaatgtctttgcccaccaaagaacagcatgtgtgtgaggcccatgctagggaagaaaaaattcttaacaaagtgaggtgtgaaggtggctgggggccaactggaccctggagcccaagcgaagtgaagtgatgccagatgccttgccctatcaaagtaatgaaagtgatctggaaatggtgttttttctcattttaatgacagagcagggctgggtaaggaataactgtaagtgcagatgaagcttgtttatgctccaaagataaagtcacaaatggggggtagggtgggctgtggccttcccttgctctaggcaaattccctcagcactagagaaggtgccttccaaagggcctgtgttgtgtctgcagttctgttcccagggaagtggaagctgaggcacctgtggtaaagcccctcatgggagcgggggtcagggagatgtttggaaaggctgtggctgataatgagacgcgggtaaccctggtggatatcgttccatcctggtgcgtgccttcctggttgcctcctgctgcctgctcctggggagtggagtgggggaagcattagtctggattgttgttggcttggttgccttccagaggcctgcatccaggtgccagggaaattctgactgaagtccattcaacaatagcaatagcggctcacactcaggcctgctggccccaccattgacagctttgcatgagcttctttccatgcaagagggctgtccccaggttcactccccacttcttgttctgctgcctgcattcttggccacgtagttaagtctccctccctttgtgccccctttatgtctctggtcttctccaacattagccatgccattggcagggtgggggtgggtggtggggcacgcttcctgactcggatgccttgaccccacagggactgagttttggacaaggtgcagcggcagcctcccaagccaggggtgggcagcgtctgctgagcagatcctggtcctctcggggtggctgcatcaatcacacccaaaggggagaggcctcagtatggaaagtatgtgagccttggatggaatcacggatggcccgaaatggcttggccccttgtttctaaggccccggctggtttccccattgtgcagtggggagggagaaaggggccagcttgcctgagttcctggagcacgagtgagagtccctgagccacaggtaggtgagggcaagggtggcagtgttttggggtgtccacgcagcatgcatggctggtcctagctcggatgttgtctgacagtcacccatgaggaacaggagtccctcccattactcagccaagggcacagagtgattatgcccggggtgtagcaaatgctctgcaaatagtagctgctctgaccatgtgatttgactggcattgcccagatgctgagtggtggtgccaggattggacctgtatccatctcatgcctccacccaggccctccacccggcagcctggccgccttctcctggtcctggtccccttgcccccaggaattgaggcgtgcatggtgcatttccatctcccaaatcatggtcctgtctgtgccctcatctgctcctcttccacaggcctctcagggaggcaggcagggcagagtcagcagccccattttagagaccaggaaactaaggcccagggattcctcagaggtcaccaagcttgtaaatggcagcactgagcctcaagccttgctctttggatcatccactttgtattagtctgctcaggctgctatgacaaaataccacagagtgggcggcttagacaacaggtatttctttcctcacagttctgggggccacagttcaagatccaggtgcctcagggctggcttctgcccttgctggtttgtagatccactgtcttcctgttatgtccttgcccggcctttcctctgagctctctggtgtctcttcctctcctcctaaggacaccagccctatcagttagggccccaccctgaagaattcatttaaccttaattacctccccaaagccccacccccaaatatagtcacattgggggttagggcttcaacatatgaatttggggacaacacagttcagttcataacacaccctgagccccctccactgtttggagtcccctaggtcacaccaggggggttgctggtgctgtgcatcagaggagccatttggagagactgtgccagaggccaggggtggggctggggcaatccaggaaggcttcctggaggagatgtgtgtacacacgagagggcttgggggcagtacatgcccttacgggggcctatttcagggaaccccacatgtaatccacaccagtaactcagatgagctgtagctgttttccaggagccactttctctccatggttatggcaagaggggagcctccgggtcctgcgtggcccagcaaggcagctgtgggttgatgcagcaaagcaggttgtgtttccaggtcattcgtgtggaagggaatgggatcccaggtgggcagggccaggcaacaaaggccagaaatcgagctgagcacccacgaagccttcctcagagcaaagacctgcagaggggaccactgcatgtggcagctgccccagatgctgtggccctggctgctgtgggagggtaatttttgttaagatgaactaagttgggactgcatctcacacagtggcctttgtataaattcgcttgccttcctcatccggtatctgtcccctctttggttcacaccctggatgcaggtgttcgggggaatgtgcattgccacacttagaacattcaagtttctgccatccctgtgtttctggagtgacagtgatgttcccgggggggaggtgtgggttcatgcagcaagtcccatgcagagtccggggcaaattcaggtcctgagtgaggtcgtagtgggtacctggctagcaggctgaagggaggttgaggagattgaggaggctgagggggcttgaggaggctggggaggctgaggaggcggagggaggctgaggaggctgaggaggtggagggaagctgagggaggtagagggaggtggagggagactgagggaggtggagggaggttgaggagatagggggaggctgaggaggccgagggaatctgagggaggcagggagggaggctgaagagtctgagggggtgaaggaagttgagggaggctgaggctgaaggaggctgaaggactctgctctttgggtagaacttcctgtttctcatgtttcctctctgtagaccacagtgcccagccctgccccaaagcagagccagagcttgtgtccatttcttgggtgtgtagtgtgcctttggcttctctttagttgtgccttggaatggcacacggggctgggtgggattctggaggcgcttagtgggtggcttctcagagctcaggccacagcccttgtgagtgggaagagtctgtgtgagtgggaggagcctgtgtgagtgggaggagtctgtgtgagtgggaggagcctgtgcgagagggaggagccttgtgagtgggaggagcctgtgtgagtgggaagagcctgtgtgagtggaaggagcctgtgtgagtgggaaaagtctgtatgagtgggaggagcctgtgtgagaggcaggagcctgtgtgagtgggaagagacttgtgagtgggaggagactgtgtgagtgggaggagcccctctcgcagctccatggtcaagtgtttgaggctaagttaggagaagatggtctgtccgtcctcttcctccctcctccctcctcctcttccacacccggcccggggccctttgctctgggtcatgctctgttcccaggccctgtggggatgctgggaaccctgggaacacagctcccttcctgcccgaggccctgagcgttctgagcctgtggccgctgcttctctggtgggaaacggtggtttcctcttgagggaagtgttagtcgctgcctttccctccctctgattcccaaggatgagtctctttgggacagcaggtgcctctgggaaggtctcctggctaggtgggctctggctccctgggagtactgtgggctttggagccaaaaagacctggacgcagatcccagctcctccgctgatgcactgtgaccttgggcaatgcacagaccttaaactggctgtgccctggttttctgtccagcaggaccgggcagtgctgtccactctacagtggaatgaaggcagagaatggcgcatcagaggtgcggctcatggcaggtgctaaacacttgggagtgtctgggcgcctggtgcgggaacatgagcagaagccccaccccacttggatgtctggtggtcttcgctgctttctgactgcctagatggggaggcctcgaggccatcatgattcaaccattctcttactcagcaagccctgaccaccattcattcattcatccattcacttccgagaacctgccgcgtagtaggccttgttctctgcactggggcacacaaccatggataagacagaccaggacttgtgctccaattctatgttgaaggtgagggaagaagttaattaagcaatcagccaagcggatttcaaaggacagctgtgctgcacgccactgaggagacgtgagaggaatcctggctaggggcctatgctgggtgcccggcagtgggggaggcgcagagggggttcagaattgaaaggctgggtgcggtggttcatgcctgtaatcccaggactttgggaggctgaggcgggcagatcacttgaggtcaggagttcgagaccagcctggccaacatggcgaaaccctgtctttactaaaaatacaaaaattagccaggcgtagtggcgtgcacctgtaattacagctgctcgggaggctgaggcaggagaattgcctgaacctgggaggtggaggttgcagtgagccgaggtcgcaccactgcactccagcctgggtgacagagcgagactctatctcaaaaaaaaaaaaaaaaaaaaaaaaaaaaaagaattgaaaggcagccttgaccttaggaagtgtgctcaccagctgcaagctgtcccacctccatactcagtgattattggaggtgatgctactacaagaaggaataatattttaaagaataaagtcagttcttaggaagccggtagtaaccctgtaacaatctggtgtttaatcatttagataaagccatagcctggggtcaaagattggctggaggtgtgcctggagcattaagctcatgctcaccaccaaacttcctgtcccttgtaagtaagtcagtgtcatcccaggtgctggcatggccagtttaggatcaccctttgcctgtgcctttggggaaccccaggacacttgagtctgaatggcctgatgtggctaggacaagggcagtcttgcgcaactcttccatcttgggaaaacaaatgtgattcctaatgtgttgcctcgagttcctggaaccagggtgtttgttttatgtaatagacagcagagaccattctgttgacttcagagccttcctgcatctaaactataactcttcataaaatgtcctttcaatgtggtttatccaggatatcgcagggaaggaagactaaatagtgtctcacagggaagaagaacattctgcatttcaggtcaccaccttgagatacgaacacgtgcttttgagatttggggaccttaattcctctgggaaactcctctctttgctgagtgctggggctgcccaagaagcatgggacccttggagccttattatagccccatgggtcagactgaagatcaggtgggtacattgtgtttgaagcaacatctgtatctcccaagccacggcaaaggagcatctgaaactcatccagatttagtagatgagactaagctggtgaacactcagttccatttaaccccttattggcagcctatgctcacactctttcctggttggcaagtgaagaaggtgggtataggggattttggcaaggatgttagtggatagagtattttttgactgggcatggtggctcatgcctgtaatcccagcactttgggaggctgaggcgggtggatcacctgaagtcaggagttcaagaccagcctggccaacatggtgaaaccctgtctctactaaaaatacaaaaaattatctgggagtggtggcagacgcctgtaatcccagctactcgggaggctgaggcaggagaatcgcttgaacccaggaagcagaggttgcggtgagccaagattgcatcactgcactccagcctcggcgacaagagtgaaactgtctcaaaaaaaaaaaaaaacaacaaacagtagtttctgaggacgaaccttgcaccaggagctgtgctaagtgccttgattgatctgtaccttctagataggtcatactattattatttctattctaggaccagggaagtaaatctgagaaaaggtcatgcagctagtacgtggttgtagaaggcagagtataggttcagctgctgtagcaaagacctagactaacattggcctaaacaaggtggaagccggtttgtccctcatggaacagtgctggggttggggtctactagggctgctatggaaactctgtctgcatggtcacccagttcccagtctttttctggccttacaatgttgccctcgttgacatgggccaagatggtgcccactgtgtttacattctagcctctgggaagagggaagctgggaggggaagaaggggcacaccttttctctttaagggtgttactcagaactaacttggatctgttgtttctgttcacattccattggtcaaaatttggtcacctagccacccctagctgcagaggtggcagggaagtctttcttttggagctaaaaatgggagatctattactatagaaaacatgatgaacagctattgggtgacagctagtgtttctgtcccagaggtggagctgggatatgcgtccaggaggactatgcatgggttcacgcctctccctcttcactacctcctcctggaggacatctaggtcagcatcaaggaagaagagtccggagctagaccaagatccttgggcaggggtggcgggtatttctgctgatcctcggattctctgggcctagcacagtgtagggcgcaaagcagggttcagtaaatccatcttaaagaaagggagggagagggagccagccttgcagatccaaccccagcccaatgagctgagcaaacctggatgtgaatctaagggggctgggaactgagacaccaatagccagaaggcagctgggtctggaggggttcccttgggggtggagctctgcaactgctttgggctggaccagaggttcagggtatccttttggctcccagggcttaaccccaagattgaaggacatctgtgagctttgcttccagaatggaaattttttaagaagccacctttgggaggaactgaatctctgtcctggtggtggttgcttgggccatgccatatactttctgaatttggttgcagctgcttgtaggtccgtgtttgtcagctgctgcccccaagtaaggctgtctgcaaggaagggtctctgcctccctcctgctgtaccccagctgcccactttagctggccctgacttatctagtacaaaatgcagttacggtctgacctttcagaaccccgggcccccatgaaggcatccttgaagggctttcaaaggcagcatactgcatatgaggagtttaaagtttgcctgtctctgtgactgtattttctgagcaaagcttttctccatgcaggtgcgcagaaggaaaaataagtaagcataagaggttccagtttggaatttttcaatcatctgaatgttgttcttggcaaggagtaatttaaaacagctgttatgggttacatttttagaccagttagaaataagggtttcaccacaatcatattctttgatcatcctaattatttttttttctttttcccagttatctctcttgtgctgagtaactgaggagctacctatcaggtttagcgtcagttacagacctgtttcaagcctggcagttggagggaagagaaaagcattaacacggagcagcagcgccccaggctgagacagagcttacaaggtctagacagttatgaaatatgtgggactctttaaaaagaaagaaagaaggagagaaacgcacatgttttaggttctccatgcttgtattctgtatttgtatagctgagaaagctttagtttaaaataagtggtatttggcaagcagtggtattgcatgctgacaaattgattgtgctcttttacttagataaaaatgaaaatgcatgaggcatgttgcttttttccccctcttgatgattaaaaaacgtctacttggctctctgcagagacagcccttgaagatttatatgaaacacctgtgtggcatcgatcacaggccttcaggctgacagaagcagctatgcttcatggcggttaaaatgccaggtcctgggagggggtttggaaagacctgaataagggtctgtatgccaggcttgggtgggacccttcggtgagggtctttgaattttaataaaggacctccccacgctgttcataatgatgtagggcttagagcagctaggcaggaggctaagcatgccctggggtgatgaacaagacaaaagccttcccctacccggcctcagtttccccaccaggaagatgaggccatcagactagctttcctttcggttttctacaagctctatgactatgttcccctcaacacaccctttcttaggctctggcgttattgggccataaaggatgaggatgtcagtgcagacaaggcactccgcttcctgtgtagcagttcacagcctgggccagcacagggagaaatttggaaacaagtatgttatgatgcagccatcagctgcagttgatgtgttgggtcatgaattcattcattcattcactggtcaaacgttattgcaccccggctctgtgccaggttctatgctgggtgccaacatgtgcagggaactaagcgacctggtccctgactgctccaagtcgggtccaccccatttgggcttctgtcctgttggcttaaggacttgccctggtgtaggtctcagcacaggaatgtgctgtgaaatgcaattccaacaccctattaaagccaagcatttacttctggaccccggggactttaagacacacccttaaggagcaacggatttgttttgacaaaaggagtgtaaacaggatcctggtgaatagctttctcatggctgctcctgctttcatcaattgcatatttattggtgacctcataagtgtccagactgtcctgggctctacaggggaggcaaagggggtggcggaggagagagagaatttacagcttagttggggaggcaaggccagctctcaggatagccagcgaaggtgtgagacagcacatcagttacatgatcacacatgtggtgcagctcacagaactgaaggaactcagggcaggaggggggcagctactcggctcagcttttctttttgggaagagcaacggaagaaagggcattccagatcattctcctggcccagccactagatgttgaggcccagttgatagccagccccaaagctgccacagctttcccatgtctttctatcctggaggctggagcacccctggacctgaggaaattgattgaccaataggtcattggtacatctaggtgacaggggtgcctcctccccaccgtggacccctagaggttgccagatggtgccactgatgtgatgtcatccacctctcagggtcccgagtctttgtctgctgctgccatggatcccttaaaagttaaaagatgcagaataattgttctgctgtcagcaagagctgagttcacatcccagctctgcctcttgctagcctgtgaccttgtgccatttccttctcagtgtctcgattttaggcatctaaaatgtgggctgatgatagcacctgttctggaaggctgttgtgaggattgcatgagacatgcatgtagtgtgcctagcattgtgcctggtacgcaggaagcacctcattcatgtcagttgctattgtttccattattgttattataatacatcaggtggcaaagtggaaaggccagtgtctgaaccaaagctcatgtctttctgaaaaccagctctaccaaactctaaagatccgtgtcgaaaatcccgacaccacgagctagaattctgctaagctctagccttccctgtgttagattctgctgaagcaatgtgcctctcccccatctctcatctggagtgtgggcattggtgagctcgtgtgcctgtgaaacacccatctcttcctccttcaggacacgaagcctagcccttcttgagtctggggccaagctgagcaaagatggaaggaggcttggcaagagttgatgtcatttgacatttaatcaccaaagacccagattgggtcccagcgagttaaacccactgcgccctgttcttgggcagacagggttggggtgtggtcacatggttggctgggagaatcggagctgtatctaagactctaagagcacagaataattgctttcaaacatttgtcctctacatcccaagaatgacagccaaagggcagtataacagaaagacaggcttggtctcaaaatgggaatggcctcacagcatggtgttgataaagagtattggatgctctgcaggtgaagtgcttcctgtccctgtgagtgcacacgccagggctggctgagcccttgatggggatcatgttgggaggattaagggtggctgggggtcttgggaccctgagacatcaggactttcaggagaccatcagttgcctccaccttccgaggcattcatttctccagctgcttttggccagcacagccgtgatcctcgctagaccccggccagtggcccaggaagaagccaggcgcctcggcagggccagggcaggaagagccaggtctgcctggaagctgctatttgccttggtccctggcttgcccagccgtttcctggcccggccctccgtggcttttgcttgattagctcatagctccaggggaagccagaccccgggccctggaaggcaagatgggcccccagtcctccctggcaggccagggcagcgtgcaggaaggatgggctgggcattgccatgtgaagtcaacctgaaatgcacttgggagagactgaggcactgagcggaagtaaagactcccagatttcctgaaatgaaagccagggctccttggcgcccctcagagccccaggcctctgcgaaatgctgcctttaaactcatgcttgtgttgctccagccgtattgccacgtcgcaggtgcggggtggtgctgggggcgggggatggcagctgggtgggtttaaagatccccagcagtggtgaaccctccttggggctctgacgctggagaaaggccccatgccctgtgatgtctccattcccaccaggctcacagccccactgtgaagctaccgaaatgggaggcatttaagccccccttgttcatcagccctattttgtaaaaggggaaaccaaggtccagagagaagaatgatgggtcagaggtcatgcagggtcagacgtggagctggacacaaagcccaatctcctagccccagtcccatgcaccgatgtgctttctcgaaaggggcatgccaggcagggcccctgggctcagaccgcctcacttctgggggctctgggcttactgtgctgcagctctgagcagcaggcagcctggcccagccttgcctccgcccagggacctgagcccagggagccatgctgaccctttcgttgccttggacagaagccaccttaggcacagccctcatcatctacttggttcagggaggccttcacttctggcagagcatcaggagaacgtgggctggagatatatactccccagtttggaagcgtgtggcctccctgtcacagtgatctgtttgttggtttgttcaatcattcattcattttagataaacacctgtgctcctgcctgggccgggcactgatccaggtggtggggataaaatggtgaactggaccttacagttaatgcagtgttggaatcacctagggagctttttaagaaaatactgacgccctggagatttgatgcagtcggtctgggtgtggcctaggagtttcactttctaaaactgcatgtatctggatgaaatttctttacaaggagaaaaaaggttgtagaaagaatgtccttctaagtggatggtgtcccaggtgcttttaggcggagcacaggtgaggaaaggccctgggtgttcaagacacaaacagtggtcatcactgaccaaggctgtcccaggtgccccgtcccggctcactggaaggtcccgccacaggccacgcagggtaaaacaaacccgaagttcttctgagcagctgcgcattccccaggccccgcacggaaaggagagctgtctggcagtcacagttctttgctttccaggctcttcctgatctcagtgattttgcagctgtgcttttaggagagctgttttcccctcatttgtaaaaactcaaaaatatggaaaaatagaaacaaccacaggtcacgcatgggtgtgtttcctttttgccccggctcttaaagcaccagcactgctgatgcgccaggtgccttttctgcggacgcctctttggtgtccccaggctagcacaaaagtggaggttgcagtcagcctgccgggcttccgggcagaggagagggctcagagcacagtgctttggaccttctttccgatatgccaggccccttccagcgactgcctgtccagcatcaggatctacctgccaagtggtcctgccgttccctcagtccacccccacccctgaccctccgtttacccagccagttctttgcccattcccactgcaaggagatatctaaattgtttgccttttttgtccttggtgatagaggtcactgccggactctggcagctccattactgctcatggtgatggtatagtccatgtcctgtccatctcagcccccagcccttccccagactcctggatacctccctgactgcatctgatgggttcaagccagagacctggaccctcatcagagaggcaggggcccgcacaagcacccttccacccacccttttcttccttccacagacccacagcctagagccttctttcctccccactgtccccgccacacttcccctgcctggcagcccaggcccagacaccctgcgattcagtggtttcacatgtggcttctccaagtgccaccaaactttgtgagacttgggcttaataatttcgatcccacagaaacatgtgacaagcacaagacattccgtaaaactagagcccagaacgagagggacgaatggcacaggaagatggcagggcttggtttgggtgtgtttgtgtgacacaccatatgtcattttttattcacacaaaaacatctttcttgaagtaatagaaggccactcagctgttgctaaccacataccaaatgtttcctttttcctctcctgcgccttccaaggggcgggctgggaagctctgctgttatccgtgatgccatctcgcctttcaaacgtcagagagctttttcctcggagcaaacgcccgattgttttttccagctttggcaggaatttttaagagaaagctgttttcgaatcacttctctgtttattgtttcaaacctgaaatacggcagagtagagggctggcagcctctgtctgatcctctctccccatgtccatttcctaaattgcattaggatctatcagggacccccttctctgccacagccccccgtaacctggtattttgggaaaatgaagttaaataaaataaaataaaccttcagttggtggagagatggttccaggcatccctttggacacccccctccttccacccccccgccccactccagcctcacaacctttacaatcaacatgtggtttcatttccaagagccccagtgttagcatttccatttcctcaggaagccgcgttccgtccttgctcttacttctgaaattgaacgtgtgttttccttggcccgagctctaggagtgcctggggcaacaatgcacacagtcccaagcaggtttcagtggggtggacagccctccccgcacccgggctgcagcttctccccgctccccgtccccagggatggccgcccactctcccctagcccggtgggagggcctggctgtgctcgggccccgtggccatccgagggaagctgggccgccctcactgcctgtgtcctcgccacctcctattgggaaactctggttgccctccaagagtccacatactgcaggctcttaattaagaaagtatgttcccatttcatgtcactcgaaaagaatgaaaacagtgacagcatttatttatcttaactatcaatatcattcctgtttctcagtccgctgggggtatgagtcttgaaggaattgactgggttatgagatttgaacctcgggcatgtgctggtgggacacatgtggcctgcttccgagaaggagccttgaaggaagagcaagcaggctggcatggccctgccctgccctgccctcccggagctcagggccgaagggctcggtgacagtggggaactcctgcctgctttggtgctaatggagagtcaaggttcctttttcaccagctacctcctatctcctttctcagtcatcggagaagtaaaacccatcatttcctgagtctgatagaggagataggatctgtccagtggctgctgtttctgtggcacctactgtgtgctgaggctgggccaggtgctcacatgcgttgttgccaatccccggcagcaaccagctaactctgatggcctcaggtaaagggacttgcccaagaccacacagccatccagagttgctccactgtggagacactattgccatttggagcagaataattatgtgtggcagggagctgtcctgtgcattgtggggtatttagcacatccctggcctccacccactaatcagtagtaacctcacagttgtgataacacaaaatgtctacagacattgccaaaatttcccgctgctgaaaacctctgagctaggggatggaggtaggattcagacccaagcctgtgcttgttcgccaccctgtgctagctctgaagaagtcctcacccaagcaaggcaaccctgcttgcctttaggatccaggcagcgtggtagtgctttggtgtttctgaactatgtactaatcagctatagatataggcattctagaatattcatgaggatccaacttcgtggtggaggctgaggacagaagttctttaatagtactgccccatcttgctgtggtgtcctgacagtgtagcactttactgcaaagcctttgcatataggttttcattttgagtcttccagatactcattatatctgaaggcttattactcagcaccaataaattgcaagggactgaaacccaactcaaactaacttaagggttagaggaagtctgttggtttatgtgactgaaaagtccaggggtaaatctcatagcttcaggtatggctggatccaggtctcaaacatcatcaggacactatttattattctactttctacagttttgatttcattctctgacaggttctttctatatggccacaagatagccaccagcaactccaggcttacatggtcctaagagttaaaggcttcaaataaagaaaaagtaactttccttagagtgccaaaaaatgttcaagtaaagactcagattggtaaggcctgggccctgtgctcatctccgagcttggtgttggcctcacccaaagaattattataggggaagggatgactctccaaagaaaggaatacaagaccttgtgtttctagagcagttcaaagtgtggttcgtggactgattttactggtctgtgataagtacagagatgcttagaaacactcatagcaattcgttgtggctgtagcatccaggtgtgtgatcagtggactcatcttgtggaacaggtgataaagcagttggctgttgtcagactcacgtggaaagttgggaacaatggagatttacaaaagtatcagtccgtgatggattggaaatttaaaaaactggttcttttccatagatagctggaaaagcactgctttaaactggagagtatgttaaaacacagatttctgggccctaccagtggaattctgattcagtcagtaggtgatatggtttggctatgtccccacctaaatctcatgttgaattgtagctcccataattcccacatgtgtgggagggacctgttgggaggtaattgaatcatggggatgggtctttcccatgctgttctcatgatagtgaataagtctcacaagatctaatggttttataaaggggagttcccttgcaaacgctctgtcttgcctgccaccatgtaagacgtcccttgctcttctgtcatgattgtgaggcctccccagtcacgtggaactgtgagtcaagtgaacctctttcctttataaattacccagtcaggtatgtctttattagcagcatgagaacagactaatatagtaggtctgaagtggggtggggggaatgagaatctgcattttcagtaggctcccaggtggaatattttgagagttactgaaatgtgacacagacaggaagttcgcacatgctgttggggaaatgaaaatggtgcggatagacttgctcgacacggggttgccacaaaccttcaattcatataaaaaatgcaatatctgcaaaagacaataaagtgaagtgcaataatacgagtgtgcctgcgtagtctgcggaggctttcactacaacagcgagctgaatcgttgtgaaagagaccatatggccctcaaactactaccatatggctagtagtaaatatctcccactagccctttacagaaaagtttgcctacccttgccttagaaccagggggtgagatgcgagatcaggaatccctattgaggttggatggaaacagtttttggaatcctggttgaaactgacctccaaggttgatcttggaatctggtctaagtccctgtaatcatctgcatttgtgaagctggcatgccaagaaggtttgcaggttgagaaggggcttagaggttattattcgaacccccttattttatggatgaggaaactgagaccaagaaaggggaagtgacttgtccaaggttacacagagaattgatggcagagctgagaccgacccctgcccagtgctcatccactgtggtgtccttggcaacaggcctggggtgtggtatctttagtggcttacaatgagaataggctaagaggcaagcgaggtctctcccaagcacccaaacctcaccaggtgaaggtggtgaggacaggggccccttggcttgctgtgccctctgttggttgacgtaccctctgttggctgacaacttggcaagtgtgagccctgtcctgggaagggcagagttggaagtgagttggctgtgcccaggcccccaagacgtgtgttgcttattgtatgtgcatgtgtcttagcatgtggattttcagccagttacattcattaccaaggaagtgtacttgctggtacagtttggatatttgtccctgcctaagtctcatgttgagatgtaatccctaatgttgaggtggagcctggtgggaggtgtttgggtcatgagggcattgttggtgatagtgagttcttgtgagatctggttgttgcagtgtggcacctccccttcaactctcctctggccatgtgacatgcctgctcctgcttcaccttctaccacgattgtaagcttcctgaggcctcccctgaagcagatgccagtgctatgcttcctgtacagcctgtagaaccatgagccaattaaacgtgttttctaataaattaaccaggctcaggtatttatagcaatgcaagaatggcctaatacacttgctggccactcacttaacactacttgctggttctcgccccttcacgcctcacctcccatccctgagtgacctaccactttctgtctgttttctttaggacagtcttgaagatccactcagtgacatcctatggtggtctcagacctagcccagaattcttgtcctaattcaccttctcccacacttcagcacaccctgcaggtcctcctggcatctcacctggaggtttcacctccccactgtagcttctccttgcccctcctcccagcctcaagccccattctctctggctttgacctttttccctcttcttcacctggactcagcttctccccctgcctgcattgtctgctcattcccatattctagtgtgctctccatggccaccacccctgaaactgacccagcatcatgagaggatgtcttgccccctctgccacgacaccttccaggacacttcccaattgacttatgcagttttgttacatagacattgttatgtggcttctctttccagtgttatccatgaatgtgcctccctctcacactggccagtgagcaaactgctaaggacaaggactaagcaagtgtctggtaccttgctaaagggactgcctgctgggtagacatggttctgtctgagcgcaaggctggaattcagtgtgttgcaggaaggtgtggcaatcccgccttcccaggccagctgtgggcatgccggggaggtggggagtgtcaatcccttgaagaaacaaacaacacatgtcgttttcttgaagccagttcagtccagctgctcaccaaagcaggatcccagccgcaggagctggtagcctccctgcccaaaagctggggcctgagcccacaggccacaatagctcccaaaccaatgacttcctctgtaaatgtctcagacttgccgccaccccatttttgtccccttttctgtggactgcacgtgaatcatttttgctctaaattattgatttaccagtgagacactgaatccattccagactcctggcctgagagtccagccctttcctgtgtgagtccagcttgccttcccagtgtatctcccagcaccctcctgtgtgcataagtaggcctagcccctcccagggtgctctgctccttagtcaagggcacagctcagtgccctgcagcttatgatgggctttctagacccttcccctttcccagtcaccttcctcttccaaatgtcacatcacagagatgatgtcctccattcttggccagctgttaattccaagcctgttgctggatcagtaaccggccagtgggtataagatgtgtcccttcccactgacccacccacatatccccacgtgttgagttcaagaagatacccttaacatcaaaggaaacttctagtatcaaaaagcaggagacctcagaagagagtttgttgagtgaatgaaggacccaaaatagcaaagttagaatggctggatgatttgtggatacttaggggccgaggagctccccataccctactccctaatgccttttttttttttttttttttgagacacagtttcactcttgttgcccaggctggagtacaatggcacgatcttggctcactgcaacctccacctcccaggttcaagccattcttctgcctcagcctcccaagtagctgggattacaggtgcctgccaccacgcctggctaattattttgtatttttagtagagacagggtttcactatgttagccaggctggtcttgaactcctgacctcaggtgatccacccgcctcggcctctcaaagtgatgggattacaggcgtaagccaccgtgcctggccactactcccaaatgtcttacataaagcagcctctttctggcttggaggaaaagatcaatgaggcacatggaaagcaggagttccatgttctagaagagcaagtgcgcatgcgcgtgcgtgtgtgtatgtgcgtgcgtgtgtgtggacagtgtgtgtgtgcctgtgtgtacagcatcccagtgttctcccacccctaaagatagatttggagacagagagaaaagtcttctgcccttgtcctaggtgtttctcctcaccaaccccaacagaccacactttggagaaagattgtgggcaggcccccttccaagctggatttcaacaacattgccagcttctgttgaaacagatccgaaagggtccactccaagcatgtatcgtagaacttctcatgcttccaacttcaatgtcattgactttccagaagcaacctatacctcgggtttgctcttgatacatcaagaactttgatttgcgcctcctcctgtcaccttgatcattcccaaattcgtattcttccttctgtggcctccttatccatttctataggaactgtaaatgttgcactagggatgattttgtttttgtgtgtgtgcttgctcagaaaatgaacccattgatcttgatttgaggtgaagaaagaaatctaaaaagatcattactggtccttttatttctctctaggcttccaacgagtagtttttttgcctgggatcctctctacagctgggagaggctcggaactgaggtgctgacagcttgtgttggaatcgcatggtgtttactgtgctgggagtttataacggccttgtttccatactgacagcaaatgccatatggagagaaaaaaaaatctgtcaaatgaacccttaagggatcacaatatggcacatgaaatctcaaaactgcttttggaaaaggtgggggtagaggggtaccttgcttaaatcacataagcagcatggtgctctctcccataattgaataaaaatggaatttgacacaaggtaatttactttggttctgtgtttgtgctgggaaaaactgattgggaaaggatgcaaagatttgttttcctccccttgggggattgtgttgagtgggaggcaacgggaatgcaggctgtatctgcagggcattgtgctaacaggtgcaggctgcagacctgtcacaggccgctgagaccaggttccctactgtggctgatgatcacactcatctagcttgacattttattactgtcatttgagatcttgtctgttcacccacacacactcctgctgacctctccaatctgagtccaagctccctgcgggctgggaccacatccctaggtacccctccccgtcagaacctggcacacactgaggctaaatgcttgttggagtggctatttgtgaaccatctgtgctgggagcggtggagactgcgcccacggctgaagggcagagtttaggctgcagtccagggctagttggagccacaaaaccatttgagagtgggccaagaggggacttggcaggttgctcatccatgctgatccaaatactcactcgggagagaatgaaacgttttagagtgccttcttcaacatacgctacttagaccgggcgaattcctcccaaaaaaaccttgccctcaggtaggttacccatgaaagaagggggcctggccgcggctctttccgttccaggaggcagacagcggagtgctgaggccgtgtccccgtgtggtgaataaatgcccgggagggcgggctgccttcagggctcctctctccgctcatctccgcttgtgtgcgggctgcgcctccgtgggctctcgctgcgtggggggaaggcggtctcagcagccctcggctgaccagtcatccccaagaaccctgctggcatcccagggaacagacagtgtctttcctggaagttctggcaaaagccctgggaggactccggggcccccacggatcacaggccctgacctgattggctagaactgaggcatggccacccttgaacctgtcattatggccagagagagaggcctctgattggctgtgactaagtgacgtgtccatccgtgaccgtagcactgtggccaggagacagaggccttttgattggctgtgactgagtcacgtgcctgtctccgtagcatgggaggcgtcagctccccttttagattcagaggcttgggttgaattggtgcagactgggagaaaggaggttccctaaaggaaagggagatggaacagaccaaattatcacatccataacgatgagaaatggggtttattaatgtgccagcatctggtctgagtggtttctatgtattgtcttattcattcttcgggacggtcctaggagttaggtctgcttaccgtccgcagtttacagactagacaactgaggggcagtgtcaagcctgttgccccaggttacacaggcagtgagcgatgggctgggattcaaaccaaggcagtttagctccagagcccacactgacactcacagctaccacgagatcctccctcccggcaagccatagctttacatcctgtggataagcattttgagactaagaatcaaagtgtgccagcgcagtggttgtgttcatatccccttgttgcctggcgtatctcaagagaaatcctttctaggggggatggtgtcttagctcctctacaccaggtagactatagtcatcccttccctgcaagttgctgtccttcccaggctctatcgccctcttccctgtttcccacgaactcatccgactgtgtcccgtgcagctgcaacatcgatggcctagtgttccgtgctccagagagcctgagacagcatgtttcagtggttccttcgagtatcttcctggccagagagaacttcttggagaggctttagcatcactgcaggaagaaccaaaagggaaagggcccccatcccaactccagcatgcccttcttgttttcagaggagaacacagaggcccagagagggcaagtgaattgcttgaagtaacacagcaaattgttggctaacaccatggtctctgggcctcttggtgggagtcttgcagtatttcctcttcagaaccctcttggctattgagtgggtaagcgcgggtgacttcctgtctctgtgcctttagtgcctaactggaaaagtcagggttttcataatttgaagcatcctaagactgggcttttctccagttgggcaaaaatgatttttaaaaactgtatccattaggatgctttgaattagaagtaatttctaaaagtgttcaaactgccctaaacaaggagaatgtgttgtctcataaatcagcttttcagatatggtttgagctacaggcatggtttgatccagagattcatgacatcaccagggcaccaactctacttcttctaatttcccagctctcacctccttgatgtgtcaggctcatcctcatcgcggcttttcttgcagtgtcaagaacactgctgcagcacctggcttcacacccactcaccatgacctccagaggaagagagcacctctgctccagtgttcccagggagtctgcagtccactctgattcgactggcttacattacaggcctgccacccttatccagtcactgtaatcagagaatgtgatgtgcttaatggccaccaaggagatggaatcacagtccccagaactgctggcatgtccatacagaaatcagagcattggactgggggtgtggggtggggagtagaggctgggtcatcactggtgccttcttctacactgacgtctctctgagtctgtgaagaccatgaaatgaagaaggcgttctgagagtttgccagtcaccttcctccatccatctagggctctgagcccaggtgtgggaatgacaggaaggccctgcctggccttctcctgggtctcatcacattcttcttttcttgtctccagacagagattactgcagtttatgtgacaagcagccaatcgggaggctgcttttccggcagttttgtgaaaccaggcctgggctggagtgttacattcagttcctggactccgtggtaagttcctgctcctgagggatggtcctgtggtcctctgtgatcagtgattgttttggctcaaaggaaaaaatagatctcatgggttagaagactgaggaataaactcactgcttacaaaactcccactacagactttgattaggaatgcaaaattgtctgaggatctaaacacatgggtgaccttgggtgaccttgggtgggccccctcccctctggaccttagttgctattgctataaagtggagccctatcagctctttgattctggaagcctgggttattatgggaggcagtgcctggggaagttaggcctagctcttggatctcaaggccccttcctccagctgagaacccattttatagaattccaaagcttttgtctgtttgtacaattgtttattgtctgcttccccattagaatgcaagctccctgagggcaggaccctgggcttcctgttcatacctgcctcacacagtgcccagaatctatgggcactcaatacatgtcaaatgaagcacatggctgtcaagccggtctgacaccaatggctccactgggctctggcatggatgacatgcctgacaccatggagtcttccttcacatgtgcttgttattctttgtttaacaaatgctgattgattgcatgggcttttaagacaggttgtgggaatagtcaggagttcctctgcacctgcccggggagcctgggcacctcggttcagccaactgcccttgggtttctatccgaggaaggaggacaagagggaaggaagaggagtggagagcggtcatgaagggtgtgaagtcatccaggcccctcccctccccgccaggtgcaggggccgagaggctgctgtttcctgaagggccctcatgccaccattggctgcagccatcccgacctctatctcagtttgggggacaaccctttagggtttcaagtctctgtatctgcttcaagatctcgatgtgcatctctagacccacaaaccaaattgcccactggacatctccactgaagtcacaaaggcccccttaaagtcagtaagtcccaaatgcactcaggactttctcccaggaccccaaagctaccagccctgagacattacctgttccagtgaccagcaccctatagtcacccgagcctgaaatctttgcactctttgatgccttcccctcctcgtccttccccaacctgatcaggctcatgtgcttggctccttgaccctgcccaggccagctccctcccctctgcaggctctgccttgggcttaggggaggctctgccttgggcttaggggaggctctgccttgggcttcgggcaggctcttggcgcctcttgtgtgagtgattacagtagttttcaatcttagctgggcgttagaaacacctggggagccttaaaaacacaccagagcctgagctgaagcccagaccaattaatttgaatctctggaggtggggcctagtattttaataactttttattatggaaaatttcaagctataaaaagtaaaagtcgacagaatagtgtaatgaacccccaggcacccttcaccccacctttatgaacccacaattatgaactcatggccaatcttctttcatccattcctccatcctttactctgtaacactttgtagcaattttcacatattatctcatctgtgaacttttcattatgtatctctgaataagagctctttaaaaaatagtactatcacagcttaaaaaattctttcctatcatcaaatgttagtattcagatttccagtgttctcatacattttatgtgtatttgtttgaactggtctggctaaggtccacacgttgtgatctgttgatgttttcttgactctaggctcccccataaccatccatccccctttgtaatacatttgttgttcctacagaagagcttcccacagtctgaattttgtattcttatccctaaatgtcatttaacaggctcctctatatttctttcttttttttttgtttttgagatggagtctcgctctgttgcccaggctggagtacagtggtgcgatctcagcagactgcaagctccgcctcccaggttcacaccattctcctgcctcagcctcccgagtagctgggcctacaggcgcccgccactacacccggctaattttttgtatttttagtagagatggggtctcaccgtgttagccaggatggtctcgatctcctgacctcgtgatccacccacctcggcctcccaaagtgctggaaccacaggcgtgagccaccgcgcctggcctggctcctttatatttcttatacgttgctagttggatctagaaacttgaccaaattcggtttccgtttttgcagggtggagtgggattcgacttcctcagtggtttcatgttcttccatcaggggacatacaccatctggttgtctttctttttgaaatggtagcagctattgctagtctgtacctgaatctgttaattaacaagggcttgcaacatggcaacattctaattctgccattccttcttcatttgccaacagaggcacttccttttgatgaccatgtggtgacccagtggtaaagttcatagaggaaatggttgattcttttctcgcattaatgtttctaaaataccaaactggttcactaccatcctccagtagcagtaactatttttaacttgtggttttaaacatgttgcgtgtgtattgttgcactgtagtcattatcctgactgatgctcatcgtctcatcagtggctagtgggggcctctccaggttggcttctgagtccctggctgggctccagcagttatcagtagtctccttgctgtctgatatgacgcagggttctgggctcatcttgtactagatccattgtttctcagaggagctgtgattccttttactgggacatagcagttgcaggccacagtttggcacaagggttattaccactaggccatcgattctagcacctattggcatttttcaaagctcccaggggtttaatgtgtatccagggttgggaagtaatgacatctaggataaagtccaggttccgaggctgacttaccagatcttccagcatcagctcctgcccaccttttcaccgttggccttcccggagtctttcttcagctctgtgttctggcccgaccacccacttctggcgtttctgacttgccaggacagttcaagcctcttggccctagctccctcaggcctccctgcctgaaatcctccccacagtcccatttgcctggcaaatgcctacttgtccttctgtcccctgttctcagaggccctcccgatctccctcttcctctctctcctgctgtgcccctctgctgtgggtgcttgcttctcacatgcacctgagccacactgctgccccgtgctggcagaggtgcatgatgcagagtgcagcctccagagataggatgccaagacaaaatggctctgccaccatctgttggtgagaccatgggcaggtgtttaacccctcgtgtacttcgtgtcttcatctgtaagtggggatatagctgtatctgatgatgggcgaggtgttaggtagagactacatgagttcttaccgctcacaaccatgtctggaatagcactgaggctcagtgaacctagccattgaggggtctgtgtgcctgttcctccactagccagagcctctttgtggcacagacgtggcccatggtctgtgaatcctcagcccacagtgccacacgtaacagttgagtgatgctcagattgggcccagtggaggttggtggcttgcctagagtcaaagagcatgtgaggggcagaggtaggcccagaacccaggtctcctggctcccagtccaggctccttcctctgcatcatgctgcctctgagaccatgagcatcataagccaatgacatggaatgttcgaaggtgagaactgggatggaaaaacaactggagcaggttaaaggaggttgggagtttggatatggggaggctggttgtatcatgaagtaggatggtcagcattggagtctttgaaaaggcgacatttgactgaggaccaggaagtcgttggaggagttagccaagtgaatatgtggtgaaagggtgttacaggcagggaacagccagcacaaaggcctgaaggcacgagtgtccgcagttggaggggagggaggaggggcagagggggtaggagaggaggtgatcatgtaaaactttgtgccatcagagaactttgactttgggtgaaatgggggagccactggagggtttttagcagagcagtggcatggtctgacttggggttttattttattttattttattttatttatgagacagggtctcactctgtcatccaggctggagtgcaggggtgggttcgtagctcattgcagtctcaacctcctggactcaagtgatcttcctaccttggcctcctaagtagctgcaaatacgggtgtgcaccaccatgcccatctgtgacttaggtttttcaagaatccctctggcttccatgttgggagcaggctttgaggggctgaggtgggagcagggagatctgctaggaggctgttgcagcagtccaggtgagagcagctggtggctcaagccatcttagtagcccctggcggtggtgagaagtggttggatttgagacttgtgtggaaggtgtattctctgatggattggggatgagagaagagttaaggaagacttcaaagttttgacctgaacaaatggaaagatggagtaaggatgaggctgcaggagggtcaccttgtggggaaaatcaagagctccgttttaggcacacgcgccttgggatgtccaccagatccttgagtggcgaagctccaggggagatgggtgttcaagccaggcttcatgagaaagatctgggctggaaatggaaaattgggagttgtcaactttttttttttttaatttttatttttgagagtcttactcggtcacccaggctagagtgcagtggtgtgatctcaggtcactgcaacctctgcctcccgagctcaggtgatcctcctgcctcagcctcccaagtagctgggactacaggtacacaccaccacgcccagctaatttttgtattctttgtagagacagagttttgccatgttgccatggctggtctcaaattcctgggctcaagtgatctgcctgctttggcctcccaaagtggtgggattacaggcatgagcctccatgcccagccttggagttgtcaacacatatatagctggtgtttagagagccctgggctggaggagctcaccaaggaaacaaatccacgtggatggagaagcgtgaggacaaaagatgccccggaccaagggctgctccccatttggaaaagaggaggcagcagcagctttgggagccatctagagagttgatgaggcagagcagagtgaggctaagcctaggagtcggtggaattttccagccacgtgttttgttagacacttacagtcagtttgaaaaggggggaaaaaaatccaatggatgcccattttcattctggtcgtgccatcgttccctctctctgggcctgtaccaagagctgttttttggaaaggaaatgtgagtctggctcctgtgtcagcacgtcaaatgctcttcacatctaccctaatgaagctgccactcacgaggggccgacccgctcccttctgcgttttcatctgcatccctgggaattagcgagactttttcatcgcccatcttgacgtcaaatgaccagcctctggaacacctcttttacgcacggagactttattgagttttccagggctggcgtaacttctcgtctaaaatccgttttttcttccatcctgactggaacccagaggagggaggaggtggcggggtccttggtgttgcagtagcgccccgggtgctgcctgactcggccagcgccatccacgccattcccatctctctgttgaatttctaccaagtggagcttttaaaaataacctgtcctcgttggactctgatgtagtccctgggaaaggctcctctcctgcacagtatttttttttttttaatttgagacagagtctcactgtgttgcccaggctggagtgcagtggtgcgatctcagctcactacagcctccgcctcttgggttcaagtgatcctcctgcctcagccttctgagtagcagggattacaggtgcgcaccaccacacccagctaattttgtatttttaatagagatggggtttcgccatgttggctggtctggtcctgaattcctgacctcaagtgatccgcctgcctcagcctctcaaagtgctgggattacagacgtgagccaccgtgcccggccttctgtgcagtcttaatgtccacatttctcaagtcaagtggaaggctgcagctgttttttaatgacggcccaggtgattttctgggcagcagaactgtttgcgcgtcatttactagactgcagggggagtttggcctttggtgttggttatcaagggtcttccaggaacctgagaaagacttttctcctgccactgccacctgtcctctcagcaagaaatggagtcagtgacctaagccatgactaggtctggtctctaaagggcaaagagtttgcccagctggtcaggggattgaagagggtctaggctagtgtcagcccccacagggcaaagagtctgtggcatcttggagactgatggacttctctctaacctgttccctgggagccttgaccacatgctggctcatttgaaaccatcttatctccacacttgggtgagacttaatgggttcaggtctcttctctttgggattgagggatgtttggcagatatggaaccagattcacccagggcacatttatggggtggctcctgtgtgccaggctctgttctagcagttgggagaacacaatgaacaggagaactaagttcctgcccttgtgcagcttgctttctggttaaatgaaagattaaaaaaataaagaagattttttttttctaggaggtggaatctcactctattgcccaggctggagtgcggtggtatgattatagcttaccgtagcctcaaactcttaggcccaaagcgaatcctcccacctcagcctcctgaatagctgggactacaggcgcaggccaccatgcctggctaattaaatttttttttttttagagatggggtctctctgtattgcctaggctggtcttgaacttctggcctcaagtgatgcttccaccttggcttcccaaagtggaatcatgctggattacaggcatgaggcactgtacctggccaaggaaaattttgcagtgaattaagcaacaccagctacaagttaaaatatttgttcagtattagctttgggttttttgttgttgttcttttttgagacagagtctcactcttttgcccaggctgcagtacagtggtgtgacctcagctcactgtaacctccacctcctgggttcaagtgattctcgtgcctcagccatcctagtagctgggattacaggtgtgcgccactatgcccagctaatttttgtatttttggtagagatagtgtttcaccaggttggccaggctggtcttgagctcctgacctcaagtgatctgcctgtcttggcttcccaaagtgctgggattacaggcatgagccactgaggcccacacagtattagttcacctcaaaatatagtggcttgaaacaacagtcaacctttattaggtgatggttttgtgggtcaggaatttgggcatggctttgcgatgtgctgttggctcaaggtctctcatgaggtgagatattaagaagttggctgggctgcagtcatctgaaggcttgaccgtagctggaggatctgcatccacagttattcacatgcctggcaggttggtgctggctgttggcaggagggagcctctccatgggattgcttgagtgtcctcacaacatggctggctttctccagagcaagcaatccaagagaacatggtaggagctgcagtgccctctatgacctagccttagagcatctacaccatttccctaatatcatactggtggcactggttagccctgtttcatatggaaagagactttcctagagcatgagtaatgaggcaaggattattgaaggccaccttggaggcaggcgactacaaatatgaggttacaacaaatgaaatctcatataggaaatgctaagaggcattcctatctgctaagtagcctagactctaggtgatgaaataaaattagtgggctatcacctggctttagatgtgcctgaccatttgaaattttattgtgaaatgatccactctgcctcactgggggctaagtattctgcttctcttgtttatgagaatccagtatttgtctttgtctttctctcactggtgtgatcccccaaaatgggaagagtggagggtgcttatagtttttcaggtgcacatagagacagtcagaacatctaggaagccagaccccgggagcagggctgtcttgaaaaagtgccacttctaaaatgggtttatatagtgcacatctgtgggatcatccagtctcctgggtgccccacccgcattcccaaataacatggctgtcctagaagctgccatgttcttaatgatgtcacccccaagctgcagttgactggagcaggagggggtctgtgagccaaggcaggccaacgagtcctttccctggaattgatggcctcaaggggaagttcttccctgctagagaaagcttaacataaaaaccctgggaactgtggactgccatgtttcctacactggaacaagccagtcagcacccagagatcatgagcaacacacacacacacacacacacacacacacacacacccaacacacagatcatgggggctacagaagtgcttgtgtccctggtctctgggctcttggcccagctgcttttctgatttccccacaatttgtttgttcagctcatcctcagattccaggagccaggagcttacagttttgttgaactaggttaggctgggattgttttcacttagaacaaaaagagtaatggggaaagttaaagacctttcctggtagcctttagatccttggttggatgcagagacagagaaacaattctgagagggaaggaggaaaagcagctggtgggggtgaggatgggtggagctcttaggagaaaagtgatggggcagacaggaagcaggatggcacagcccgtctgtattagtccgttttcaggccgcttttaaagacatacccaagactgggcagtttacaaaagaaagaggtttaacggactcacagttccatgtggctagggatgcctcacagtcatgatggaaggtgaaaggcacgtctcacatggcgggagacaagagaagagagcgtgtgcagcagaactgccctttataaaaccatcagatcgggccaggtgcagtggctcagcctgtaatcctgtaatcccagcactttgggaggccaagatgggcagatcatttgaggttaggagttcgggaccagcctggccaatatggtgaaaccccatctctactaaaaatacaaaaattagctgggcatggtggcgtgcgcctgtagtcccagctacttgggaggctgagacaggagaatcacttgaacccaggaggcagaggttgcagtgagccgagattgcaccactgcattccagcctgggcaacagagtgagactccatctcaaaatctcaaaaaacaaacaaaatatcagatctcgtgagacttattcactatcccgagaacagtaccagaaagacccaccctcatgattcaattacctcccaccaccgggtccttcccacaacacaagaaaattgtgagagatacaattcatgatgagatttgggtggggacacagctaaaccatgtcaccctctgccactggggtgcttatcacttcccctgagatgggcgagcctgtcccctccctctgagagaggcgagcctgtcccctccaccacgtggagagatgcagccccccttccctcctgccttctcttcagtgtttgactctggccaggccacaattcacaagctggtggctgtggtacctcaggaaatctggagttgctcctaccactttcattctccacccaatgtggacaggagtccattcttccctcccttctcaggttccatcccatctattgccctaagttgggccagtgaatccctcttgactgaggcctgagagggccgctcagatgggagccggagccagagactagagaacactttgcccaggcgggcacaagctctggggttgaccaggtacgtctgaccctggggcccctgggggacacccccatcatgcactgctcgccattctcactggggagcagaaaggaagcaaggccagtgcccacccatctgaagcaccgtgcagggcatcagccaggtcctggcagaaaacagatggccggccccatgtgtgaatggaggagtttaatgagggcctatttacaaagcgtgggagggaaatcagtagctgctgatgcaacacccctgagcctccaccaccccgcaacctgcagggccaagggaagggactgacgcgggatcgtgggagaagactgcccacaggagtcgggtctggagaagagggtccgggagcctgcggtgcccaggcggggacggagccagcagaaaaccaccccaccactccacccccacagcagggtgggagagggctagaggggctctggaggggcggcccacgtggtcagcacacacgagaagctggggccgtgggggtggatgcaggtgtttctccagcggggtgcatggtgagcattgtgctgaccaggcgtgtcacttgtccctgcctcaaggactctggaaaagctgaccacatcaataattacagaagctggaggtggcaagacctcatggcatctctgacttcatcttcctgttagggcagaagaaggtctcctgggagaaggaggtgacatctaaagttagtctaaggccaggaggaattcagcccagactgccctttctaaacctagggccggcttctttgaaaacgtggcaggttcttaaaagcatctgaaggaaatgtgtcttcatagccaggacatatttttcctggcagattctgagattgatgatgcaattagggcaggccaagagaatgaagtattagggctataaactaagatgcacatagatgtttccactctttggaaggcacagatgtagaaataattctttgttccttaagctcaatgtaatagtctgcattttgtgttagagcagcatctccccgcaaaggccacccctgtgtttggcataaatcacaatgcagggagaaggctcattcagtggtgtcttccctgttggcacctggcacgtatctggattatggattgtcatgggtgctccctggcaccgtggctgttagacctgagttctgggcagggagagctccaggctggagtgcaatggcacaatctcagcttactgcaacctctgcctcccgagttcaatcgattctcctgcctcagcctcccaagtagctgggattacaggcacctgccaccatgcttggctaattttttgtatttttagtggagacggggtttcactatgttgggcaggctggtctcgaactcctgacgtcaggtgatccgcccgcctcggcctcccaaagtgctgggattacaggtgtgaaccaccgcccctggctaagagagctttaaatgaacagaacagcagaggtgcctgtgtttcggggaggggacaaggcccatctctctctctctggttggaagggactctcttgcagatggaggtcacgagggcactctttgcatacagtttacctttcttttcattgaaatcattggctgctatttcccaagctacatctaattgtaaaattctgggttgttggcacactcttacttgctgcttacgtttgctggttaagctggtttaagctttctcccaccagctgggcaagggtgttctcagggcagtggtttccagggtggccccagccgtgtggagtgtgatctgccttgagctcggcccatccaggggagccaccatggtacctttcctctgtaggtggcctctcaggactcccctcagggggccactgtggagacatggcctgtcactaggtgtcttaatcagtgcgaaaagcccagctggaggccttccatccgttttccacctcccaacacaaatgctcttcaagtggtggcctggcacggactctttgagaaaggccttttgatcccggcaggggaggcctgtccccgcgtgctccctctgccgccctgtggacctgcgtgcccatccaccggcggggcctctgccgggaggcaggtgacctgaaagggatgttatttttttaacgtgggttttagtacccacagcaagagtatttttagctggttattgaggctgattagtgagccccaggcctccatttggttaaatagagccaccttcacagatgtattttcgtacagtgcaaatctagtgttctggatggtatagagttaccccaaatgatggccggccatttgcccagggcctgcgtcctgcagagcagtctagctacattcccacggtgccggaccaacggcgggctgtccaggggcagcaggaccctgggtgcttctcattctggaaaacagcaggcagctggctctagagtgctcagcccctttggagacgccactgctgccccgtcgcttgctagctgtgctgtattggaacctcttagacccttagtttcttcatctgcaaatcgggactaataatacctaccatgtagatataataataataccctgccatgtagggtgagcctggaatcagcactccatatggggtgtgtgtctgtgtgtgggtgtctgtatgtgtgtgtgtaggggtgcgggtgtgtttgtgtggatgggtatctgtgggtgtgtggtgtttgtgtgtgggtgtctgtgtgtaggtgtgtgtgggtatgtgtgtgtgtgtctgggtctgggggggtgcgggtgtgtttgtgtggatgggtatctgtgggtgtgtggttgtgtgtgtgtgtctgtgggtgtgtgtgggtatctgtgtgtgtctgcgtctgtgtggggggtgtgtgtgtgtgtgtgggtatctgtgggtatgtgtgtctgtgtgtgggtttgagtgtgtgtgtgggtgtctgtgtatgggggtgtgtatctgtgtgtgggtacgtgtgggtgtgggtgtgtgggtgtctgtgtgtggatgtatctgtgtgtgtgtgggcgtgtgtgtgggtgtgtatctgtgtgtctgtgtgggcacgtgggtgtgtgtatctgtgtgtctgtgtgtgggcatgtgggtgtgtgggtgtgtgtgggtgtcggtgtgtgtatctgtgtctgtgtgtgggcatgtgtgtgggggtgtgtgggtacgtgtatgggtgtgtgtatctgcttagtgggcacgtgtgtggatgtgtgtgggtgtgtgtatctgcgtgtctgtgggcacgtgtgtgtgggtgtgtgtgggtgtgtatctgtgtgtgggggcacgtgtatgtttgggtgtgtgtgtgtctgtgtgtgggtgtgtgtctgtgtgtgggcacgtgtatgtttgggtgtgtgggtgtgtgtgtgggtgtgtgtgtgggtgtgtgtatctgtgtctgtgggcacgtgtgtgtgggtgtgtgtgggtgtgtatctgtgtgtgtgggggcacgtgtatgtttgggtgtgtgtgtgtctgtgtgtgggtgtgtatctgtgtgtgtgtgggcacgtgtatgtttgggtgtgtgggtgtgtgtgtgggtgtgtgtatctgtgtctgtgggcacgtgtgtgtgcacacatgtgcactcaggtttaggagagcgacagggggcacagaggaagaaaataacaggaaaaagtcaagaagaaagagccaccttaaagcatctcaggaattcatctctcgagtcaaatcatcaagaagtgcccagtccctcaaggctcatcttgatgtggaagaggagttgacctctggggagaggctctgcccacgcggcgcagtgggaatccagaggccagcgcgccagtccagcagctgtgaccttggaccttgggcaagtccctgacttctctgagcctctgtgtccagccctataaaatgaggggtgggattccttacagaaccactgccctatctccctgtgatctaaatgattgtagtgttcatgtttcttcatgggagaaaatcattggatcttggctctccattagaagagagagggcaagacaaggacactcgctcactgtggttggaaacgagcctggctgcctctgtggtcactgcgagtgccgcctgcgtgctccctttggctggcctgggaggaatcggaccctagacactgaggtgtgaagtttccctgagggccggctgggcatctgactgcatggtgggacgcctggggaggagttcgggtccgtctatgctggtgtcatttccttcctcttttgaaatagctgtacttttggacagaggctgacaaatccttgggtggtggattttgaaatggttataaacaatttgcaattagctcttttgtctaaatgagaaagggccgcttactcaggctttttattgactcgaggccctttatccatgtggcgagtgcgtcagatgtgagcgaaggagcccctctgggattcagggaaattaaaaagtctgttttttggagacctcccatctttagagcttgggccccctggcttggctagttatcagagtcctaaattctgtggtgtggttgaggagaagccctgcgcttggaggttcgagtcccagccctgccacctcccgctgcatgaccctatgcaagtcccttcccaccgccggccctcgggatctccacctacagacgaggggttgggatggcagcccctgttctcctgcgtcactgccctggctctttcgaggttcagataagaacatcttaaaaaacctgtgtatgttcactttgtaaactgaaaagctggaaaagaccaggcatccacattattgtttatccttgcaaggtgtaataatcacaatggcggtaactatagcaactgtttattattatttatgatgggccaggccccaggccaagagcttgatcacttccgtctgtataatcagtgtatacctaggtgctggtaccatctgcgttttatagaagggttaagcaaattgtctacgatcacacagcttacaaggtctgagtgacctaaggcagcttctcggcagccttccagtctggtgggctgttatttttctggtagtttcctttgattcatctaagtcagtggtcttcaaccccggctgcccaggtgccagccctcatggcccactggaaagcctggtttcatgggtctagggtggggcctagcatcagtgtttgctcagggctccctgctgattctgatgtgcagtctgcatggagcaccgccatcctgagacccagcatctgtgagagagggcaaagtagtttggactaaacatcggggctccgtggccaggtcttcccccccggtttcctgacctgcaggagaagggggttggtcaggtggcctctaggggatttcctccaggggctgtgaggttctgtaactataagaagctcatgagcaaacctgttattgttcttttttctccttctgttttaggcagaatatgaagttactccagatgaaaaactgggagagaaagggaaggaaattatgaccaagtacctcaccccaaaggtaaggagtcttccaaaccccacagcaggtggcacaggaggccttatgcaaaaataggagcccctaagtctgtgccaggccacatggggagctgttaagtgctgggctggtggctgttgttgacctcctgagatcacagttcccatcctcccccagagagtgcccaagcctggcagggccaagatggggatggtctaggccaggactggagtaggggcgggatgcctgcttcttggggcccagccccttcaagggtcaccatgctgctgtgtgcccacacccaaccatttgtggtagggcagatggaggcctggccaagttcaggagaagtgcccagaaggaagggcttagcagggcagttctgagaggtcagcgtggaggggaagtgttgggggttgactgggagggaaagggggtgcccaacgacatcaaagaatgaagagaattctgaaacatattctggagtattctgaagggtcaggggccaccccgaccccacctcggggccacccactggatagttgaagcatcggggtaccattgtcctcagggtccagcagcctcggttctccaagatctgcttcctcttgactcaccttcacagaagtgtgttctcaacccatttagtgttctagtgtcagtggttctgcccacttggtcaagccacattccctccctgggcctctgtttccctttcttaaaagtggccttcctgtcagactcacctcccggaggtgttgagagcctgagatgggacctgtgtgggaatagctttgcgtgtgtcccatcccccggggccagtggtggcttcaccctgctcaggaccctgtgggccaaccagctccccggaagagtatacctcctggtgcccatcccaggctgccagtggactgaggtcaccacagcctgtggaaggtcttggccatcagtcccctcaacctcctgcacctcttgcaccaaatgtagccctcgttcttctccagcatcagcagttggtagtggccattgcccttgcagggtgagaccagcctcacgcccagaagtgttgccctttgtcacgccccactctggacagcctgctagacggcattcctaatgcgcacacagtcgccatcaccttgttgcctccccttgctgtttctctgctgcatccatcataatccatgcacttctctttctgtgaactgcaaacacccccagcccttttgcacttttcagaaatgacagaatttatgtttataaaacacttctaggcatagaatagggctagtttgctctggacaaggtgtggccctgggtaggcacagctgcccccaccttgggggccttgctatgctccagatatgggcctgttgctgtctgtgaggttctcaggtggacacagacgaggagacgttctcagcagggtccctgttcacccagtcgcagccgatgtcatattggtggggctctggctagatacatttttgatctcctggccaccactcaagatagtgtggacactctgggcataaacacatgccctgagcttaaaggggtgcatgcaccctagagggcataatgatgacagctccctggctgggctcctatggtgtgccacatgcctccgagatgtctctgatgattcgcgtatccacgagattgccctatttacagacaggccactgaggccacagagctgaatagcgtgagaggccactctgctgaaggggtcttcagctaccctctgcagaggcatcttcccacggtggctcagcttggcccagtccagcgcttcatctgtgcccccatagggctacccagtcacatgtgtcccccccaaacaatggcaactagaatgtattgaggactccttgtgtcaggcaccactgtctatagtccttgctgtcactgtgggatgcagattatatttgttccatcttaccgataaggaaggagaggctcaggggagctgtcacatcccaagtcacacaactagtgagtggcggagctagaatttgaacccaagtctgggtgattctagagccctgagtgtttcccctgggtgtagtctcctcacccggcttcactgtcctgccactgtctgtggcctggctctgatctgcagtgagggcggagtgctccctttgcctgaccttgctgtctggataggctcttgtggcttagccaagaacagggtacaggcaggcactggggcagccactgagggctgccaccgggttgccccgtggccaaccttgtccagaagcccctgctggcagcccctgacctgagctctccagacctccctagctctgctcagccttgcctccatctcctggagggatggggcccagacacccccatcagctcagacggttttacaagtgcctcagagcctgccagcattttttcccttaagttctcctcaatttaaaaaatttaagccacaccatatgttacggccagggaggcctccaggggaggtggttgatccatgccttgggtcagctgtttccctacaataaactttgcactgctttcccagttcttcccataacagcttgctctggagcctcatttacctctcacgtgccccagtgccccagatgcagcgaagcaaggtgctggctgaggagctgagcgagtgactgaggccccagcactggctcagaagactttgaccaactgcaaagccactgtccccaagcccagattgtccttgccttgggacccctcctcagtatgtagcttgtgtgtctcagctctgagcagtgcttcccaaaaggtagaccataggagagtggccagtggagaagctctgtgaaaaagaaccctcagtggtcaattacacgtgggcagcactgtaataccatgtctcccccggtagattcactcagcatgtgagcatattcaaggctctgagaagtcctgcaagaaagaaacctctttaactgttaccaaagcatttctcaaagttattgaccataattttttttcaattttccattctgctgagcacactttgggctacagaacacatccaagagcctcacgcccacacctccttctgctccagcatcctttcctgggacctctcctgtggcttcacactggactgtggccacaccatttcctaggctcacctggatgtccataccttgtggcctttgttcaggctgtgccccagaaggccctttatgaaggcgctgtcccctactctgtctttctcgcttctgtatccctgcatgtattgaggacacttgtgtcaggcaccactgtctgcagtcatctccaacatccccagctgcacagagcctcttctgcctcttgtcagagtccgttggcctcacctgggtggtctctgagcacactgttccattgttgtgattctgtgccccatgatggggattctgaggagcccaccttcagagtagggccaacacataagcagattaaccaaatgccccacgatgggagcagtggtggagctgtgctcagggaagtgtggggtcaggtgagctagaggacgcttccaggaggtgatgctgctgaatcagatcttaaaggatgtggaggaggaagctggacacaaaagaaggggaaggaggagcggccttcatgggtgcagtgcagtgggcatttggggctatctggagatacttgtaattggcagaattgtgggggagggaagtgctcctagcatctgatgcgtagaggccatggatgccgttgaacattctagagtgcacatggcagcttcctacccagagttacctgggggcaaaatgtcaatagggctgaggttgagaaaccttggcacagaggtaggaaagcgcacaggatgggcagtgctgtgggggtgggaatggggagggggcccctctgagctgtaggccctgggaagccatgttgaggtggcagcagtgtggagttgccagtgcttcgagtgccacttgtattttaggacgatctccctgaccacatggaggaggaataagggggatgaggaaggactggaggcaagaggccatctggggaacagccccaggtccccaagctgggccagcagccttggggatggggaggaacaaagggccttgcgaaacggcagaaggaggatgcccttgggcttttgtcttgagtctctgggtgtatgggggtgtccccaggaaagacagagcacaggatgagggccgtgggaaggtccacctgctctcggcagaggcaggggaattcattttggatggagacagtggcatctgctctctgtgtccccgccccagcatgacgctggacacatggttctcgatcaatgtgagttggttggaatgaaacactgaggggagctctggaagctgccctccatgggcccgtcagctctcctgtctcatgtctctggggagccacgcttggcgagctcacatcctgaggtgtctgccatcttaaaattgctggaagccaggatagaaagcccctgcctaagcaatgcctatgccttgagctccgttctccctcaccacggaggacgccctacaaacccgtgcctgaagtttttatctcaagaggcaaaccccactccgtagaccctgcctcgaatcctgcatcagtcgcccatacaaggccagctttgctttgggggtgttacagggcaacagccaagggtgggcttggaaggggttgaaagctgttggagagctcacagaagggcagcagagtgctgagaaggacgtgagctttagagtcaggtagacctgggttcaaagccagatgtcacctctttgggctgcatgggtttgggaaagttgcttaacctctcagtgcctcagtttcctcatctgtcaagggtgtgggccatgatgaggatcataaataaaagcagcaagtactgagcatggtagctggggcatcttaagtgcccagcagcagtgcttgtcatctgcctttccccaccttctccgtgccttcaaagtcaggctgttgaatgaggaaatcgttcagatgtcgaactgccagctgtggagtgcgagaggccaaggaagggtcgggagggcctccagctgcagagggctggacagaggcagtgagccagtcaggatgatttatactagctgccacaacaaacaaacccccaaatctcaggggctcctcccagcaaaggttcatttctttctcacgcatcatctggttaggtcatcagctcttctgggtcctccctgggtgactcagggatcctggctgctcctgtggccccaccatctggagtgtgttgtcccatggtcagtgccacagaggaagagagggatgaaggaggcacagaagcttttaagtgcttgacccagaagcaacactcatcacttcctctcgcagtccatggccagtggggaggctgggaaaggcagaggagcatctggaatattaggtgagcacaccagtaaggctccctgcgtacattcccatccctcgagccccaggttaaaaacatcacgtggcaggctcatctctggtgctgattagacagccgtgagcgtggcttgtcttagggattgtctcgggtttgtcagctcacagaagctggccagcgggccacagttggatctgagtgtgtgctgggctctgaagagagctgagcagctcaccttctaccctccagttctacagcccagaagtgatacaggtgacaggtattcaggagaggggagggtcactccgagctgaggtggcccaggaaatgttcccattgtaataataataataagtgaaaacagaattatatttcatccagcattacagatgactttttgaaataccaattttatggccgggtgcagtgtctcacacctgtaatcccagcactttgggaggctgaggcaggcggatcacctgaggtcaggggttcgagaccagcctggccaacatggcgaaaccctgtctccactaaaaatacaaaaaatcagctgggcatggtggcccacacctgtaatcccagctactccagaggctgaggtacaagaatcgcttgaaccagggacggggaggttgcagtgagccaaggtcgtgccactgcactccagcctgggtgacagagcaagactccatttcaaaacaaaaaacaaaacaaaacaaaaataccaatttttttgagatctattggtataattctcataccatagaactaattcttttaaagtacaattctatggttttaaaaagattcaaaatcttataaccatcactgctttctgattccagggcattttatcaccccaagaagaaactgttgtacctgttagcagtcactccctgttcccctttcctcccaggccctgacagccactaatctactttctgtctccaggcctatttcagacatttcatataaatggaatatcatataatatgtggccatctgtgactggcttcttttttttttgagacggagtctcgctctgtcccccaggctggagtgcagtggtgtgatctcggctcactgcaagctccgcctcccgggttcacgccattctcctgcctcagcctcccgagtagctgggactacaggtgcctgccaccacgccctgctaatttttgtatttttagtagagacggggtttcaccgtgttagccaggatggtctcgatctcctgacctcgtgatccacccgcctcagcctcccaaagtgctaggattacagacgtgagccaccgcaccagccgactggtttcttttgtagcataatgtttttaagattcatccacattgtaacatgtatcagcacttcactcctttttatggctgaatgatattccattgtaaagatacaacacatttatttagttatctgctcatcatttgatggacacttgtgttatttctacctttttgttgttgttgttgttgttgagatggagtttcgctcttgttgcccaggctggagtacaatggcgggatctcggctcactgtaacctccaccccccgggttcaagtgatcctcctgccaccgcctcccaagtagctgggattacagatgcccatcaccatgcctggctaatttttgtattgttattagagatggggttttcgccactttggccaggctggtctcgaactcctggcctcaagtgatccaccctccttagttttccaaagtgctgggattacaggcacgagccaccgtgtccaacctgcttctattttttgtttctacatttttgctcttgtggaataataatgctgtgaaaatgcaggtacaagtttttgtgtagacatgtttcattggggtatatacataggagtagaattgctgggtcatgtggtaactctatgtttaaacttttgaggaactgctgggctgttcttcaaagcactgtaccattttaaattcccaccagcagggttccagttttgccaaaacctcatcaacacttgctattttctgtgttttttattttatccatcttagtgggtgtgaagtggtgtcttgatgtgattctgattcatacttccctaataattaataatgttgaacaccctttcttgtgctttttggccacttgtgtaacttctgtgggaaatgtctattcagattctttgttcatttttgaattgggttgtttgtctttaatgtcaagtcataagagttcttcatatgttcaggatacaaggtccttatcagtatatgacttacacatattttctcccattctgtgggttgtcttttcactttcttgatagcgtcctttgaatcacaaaggtttttcgttttgatgacattcagccttcatttttgttacttgtttttaaataacttgttttcattttgtcttacctgtccttgtaagaaggcctcagtttttgaagggaaagggtgtgtatggaaacaaagtaaagaaatcctaatgtacatttagccccatgacccggtcttcctttgaagaacgagagccccactgcctgttggaaagatcagggccagggggccaggcctggtccttcatggacattcagccccttatcccctggttgacatgacaacatcccaggggctttgagcccttccattcctaggactgcacgggcctcttacagacttgctcctggaacttcctggcagctccccaagatgggtattagtgtacccattttacagatcaggtaactgagatttgggaagagaagaggctggtccagaatggggaagcgcctgcgtgacctgctttggcagtgttacttgtaggacattttgctgcggctcattttaattgggccggtgagcaacagtgctgatctccatggttgcagtgccccaccgcaattactaaggtctggcaaggggggtgccagttttgatgtggctttgttagggactatcagtggattctaggggaagctcaaacccagtcctggtcctgctgaaagggcctgcgtgggttcttcccggacaagggggtggacaggtgggttggggcaggcttctggggaactggtatggcgtccttctgtggggtactgggaaggccgttgtgcaggcagctcttagagcgcatttcttgccaaaggtctgcaggcaggatattgttctctgggccctccatagatgcagggctgcctctttgtttcaataaacaatgatagggtaagacagggaagttggttcttgtgaagggggaagttacccatcagcctgtttccacacaaacgaaatctattcgtagtgcttgttgggctctctggaaaacatccacattttataaagtcaagagcttgaatgaaaggaaataataacgactccaaattccctcctctggctccccacccccacccaggcaccagcgtcaggaagccgaacaaacccacgcaggctgggccacggctcctcggcctctggcacaggcagtcagcttcatccttgtccccaggacctcatgcaaccccagtcctgccactttccagctctgcatccttggagcctcagtttccccaactgagtatggggctgataaaaatggcgcctacctgtgcttgtggccatcagtcattctctagcacttgcgtggttttggccatgtttgcagactacccttaacagttacctatacaacgattttctttaaatcaacttatcttttaacttaaaatagatgcgttttaaaaggaaaccttgtaccaggaacatgcctggagaaccagtattgatttgtcatacataaaggtaactggaaaaattaagattaaatccaagctagatactctattgtctgcctgaggttctgagcctgaaggctttgtccttgtcattttaaaggagattagtgaatgtgagagccctgatgacaggacggtagcactgcctgcgactttctacttcatgatggaaggcttgcaggagatccaaagagaatcactttttcaccgagtgattcaatattatctaattgtgtccctgtacttcctaagacctctcatcatctttagaagatgctgggctaactctctgcttcctagctatgatgcgttatggaaatggaaatgctggcttgtttttgttagagacagcatgacctagggcaaagagcactggactgggagtcaggctcattcctgatctcccttcctggggtccatggccctggtcctgcttagagtctgcctgatcatccaaccaattcatgatctccagggcaaccaagggtgtgaaatatgggaagcttgggcaaatggctcccttccaagtacctgtcccattctccctggggcttggggtcccagacactggccctggacccggctcttcatctctactgagattgcccggccctcatttcccagtccccggaacaggtcatcctgttgtcaattaatctagtgagctcagactccaccttcacttgagcagagggtctggctgggcagctgcccctgctgggccatctaccagcatttccagcttcctgtcacagccttgcgtacaggctggagggcggaagaggattgaaaagaaaacttgagaaagggacttccaggagttttctcaagcaacagtagtgagggacaggggttgggcctcttccacttccacttctgggagcagcagagagaggaattcacaaatcaagccacatgtgtgctcatgagctgtcttgggacagctagcatttattgagctactactgtagcctagaacttcatattccatgttttgctaagtcctcatcacagccatataaaataacaagaagtggaggctcactcaggatgggcgcccagggaaatctcaggggctgcccagttctgggccccgcacgcagttttatctgcagattcccagcgtgcaaacagataaaaagatctgtggttgacaaagctgggggctggacttctctttttcctcccttccgcttccccttccccttccccaggctctgactttgaggagaacatttagggttctgtggatcccagtttaagcaccatggagctgagctaaactcctcatttcctagataaagaaactgaggccccgagaggcccagcttggaagaggagactggaatcttccttgtggggctttctataactctgtgctagaaacaaggagaggaggcctcaaaagggatgcttactgacttggttttccttctcccactggggatggccggcagctgggtttcaattcctctgaggtgctttttctttaagccagtaagtgtctaaatgctgagacattcgtaatgtctgtgcaaagcagagaagttggctgttgccggaagttctactagttaagcactaagtcattaactctctgggttttagtggaagaggtgagagaaaatagcattaatttagcacctactgtatgcgacatgctttatagctttagtgcattctatcttcatgactatcctatgtagtagacactattgtccttgttttacccaggcagtcagagttctttagctcataatggtaaaacaggggaattgaaaacagggaggctgggcatggtggctcatgcctgtaatctcaacactttgggaggccaaggcaggaggattacttgaggccaggagtttgagacctacctgggcaacacagcgagacccccatctctacaaagaaaagaaaacttggggggctgggtgtggtggctcacgcctgtaattccagcactttgggaggccaaggcgggcaaatcagctgaggtcgggagttcaagaccagcctgaccaacatggagaaaccccatctctattaaaaatacgaaattaaccgggcgtggtggtggatgcctgtattcccagctactcgggagggtgaagcaggagaatcgctcgaacccaggaggcagaggttgtggtgagcccagattgcatcattgcactccagcctaggcaacaagagtgaaactccatctcaaaaaaaaaaaaaaaaaaaaaaattaattaggtgggtatggtggcgcatgcctgtagtccttgctacacaggaagctgaggtgggagaatcacctgagctctggagttcaaggctgcagtgtgagctatgattgcaccactgctctctatcctgggtgacagagcaaaaccctgtctcaaaaaaaaaaaaaaaaaaaaaaggcagaaaacacagatgcaaacagatactagtgtgcaaatatttatagcagcattatcacaatggccaaaaaatggcaacaaccaaagtatccatcaacggatgaatggataagcaaaagtggtctatcactacactgcagtgttcaaccatataaaggaatgaagcgctaatacatgccccaatgtggatgaaccttgaaaacattatgtgaactgaaagaagccagacataaaaggccacatattgtgtgattccatttctatgaggtatctagaatagacaaatccatagaggcagaaagtaagttagcatctaccagggggcacgtgggagggagggagtagggagttgctgcttaacaggtacagagtgtctgttgggatgataaatatttttggaacaagatagaggtgatggttgccatgatgaacgtaatgaatgccactgaattgtacactttaaaatggttgaaatggtgaagtttatgctatgtctattttaccacaatgaaagaaaaagagcaagaaaagagtggaatgtaagctggcctgtccgatgctggagcctgtgatctttctcttcctctgcgttgtcttcttgaaagttaaccaaagacaaaagttcccactgaatcagcttcccaggtgtagcagggggcaagcagcaaggccggggaatgagcaagccccggaggcggtgtcgggctgacgtccagaggctgtgcatgccagcgccctccggggcccagcccagctcctgacccccaacctgggcctcggcttccactctgcgctgtgtccttagcatcttctcacgtcacagtctcctgcgcggcatatttcatgactgtgtaattgtccttcaaatagacacaccccacccctcaccaacctttcctggaaaacaaattgtctttgcccacagcctgatttcatcttggcgcctcctgacgcccttgaggctgatgtgccttgctggagctcctcacagtgggccagggcaggcccatctaggtcctttttcctttctcatgaccatccaggtcagaaaattggaggttcctttgatgctggcagagctggctctgcctctgaccctgtccttaatgtgtgtgcatagtgtttcctgtccagaatgcctctcttttggagtggcggcagacagaagactcagccacaggcttcctgagggcacccccaactctgtcctgggtggcagtgatcctggtccctgtggcttggcaggccctccccatccgtggaccttgggcagagaagtggcatcacgtggctgaggtgaggggcaggttctcttgaatttcctggctcgtaggagattcctgccccctgccccccaacccctttattttgcagcccgaagggatgaagtcttcactggagaaaaatccaacatgatttcggattgaggagggtggtgggtgttctggaagaaggaaagttggcgggccctgccctcgcctatcacgcacaaagaatgagggacactccccaccgtttccccaccgtgaacatccccagcacctcagggcctgggctccatgtgtcagtgacctgcatgtggttgcattggcctgagcggagctggctgcatgcaaaccactggccaggaagaatcccactcctgctgctgctcctgcagctgcgccgggtcccgcgagcccccgcgtgcgcggcctgtgtaaacagtgcgtcatctcctgttgcacactttgggcctgcgggtcacgaccagggattatcaaattgacagagctcagctggcctctcactccacgtccgggcacattgcattttgttaattatcgtcttttgcttttgacgtaaagggtcggggtctgggtcagggtcactgtgtattttcctttccttctcattaaagttgcccagctctcagggcccccagttaaattctgccagcgtttaaagatatcttccctcgcttcccgacccctaagcgcacttcttccttatttctgtgaagccactggaatagcaaaggaaatgtgggtcagggtctttcaaacccagtccattttatttttcttgaagggctgcagctatttctgaagggctgggtttttctactttgttggcccagagaacatgacacgctgggtctcaggctgaccaggtcagcagggcactgtgaaggggctggaaccacccccgacgctttgcagccccaaggcaaggcttgctcccagcacttcccagccacacggccctcacttggttgctcatagccctgagcctgctgtctgcctgtgatcctcagtgcaaccctaccatctgaaaggggtctagaaaagtgtcagttctgccattaggaaaagtgaattcatccagagctctagtcttggaagagttcctagcgcacaaatggcatgagctggaggatagaagggtcctccctattgcctggctaaaccccctttaccctttgggccatgatcaaacctctccacagccgtggagccacctgtgtctaaagaggccacctctgtgagcgctctctcctaggtgctgaggggctgtgacctgcactctacagcctgcagtccttgctgaccttgaactcctgccattggccaacagagttggtctctggggtccttagggtggacctcatggcctgggcacagaatgggcactcagggaacccgtatggctgatggaccccagctgaagaagctttccgactggtcactggagcagtggccccacctccacctctgctcacaaagacagctcccatgccttgaagtctcttcctggcctggtggaaaacccagctaccctcatggtcaccaccaaagaggtacaagagatcctcagccaaagaattaaggaggttgcaagagtggtggtgtgtgtctgcaccatgatggagtcacaggcctttcgtggatgctggttacttctgaacactgtgtcatggtgtcactcccactttctcctccgccagacacacaagactccagagagcccagagaccccttagactctaggtctttggactgttcaccaaggaaagataaaaatggcagactggatgccatcttcctaaaggcatcatggcctctggaagggccctggagaggcccctttgagagttggagacaagggaagatccagagtttctttgaggggggactgaagcttaaataacttgctgagcatgctttttaagaaaaagaataggaggttaggtacaaaagtgaatattgagaaggagaaaagaaatcacaacaaattactgagggcttggagattcatatccttttcatctgtgacctcaatttcccggaagtgcttctgtagaaatgctctgtctcccaagatagagcattctgtagctcccaggactacaaataaaggactactccgtctcaattaacaaacaaacaaacaaaaccctaaagcttcggcctcctcagcttcattgcagatctgcttcttttttttttttttttttttttttttgagatagagtcttgctctgtcgcccagtctggggtccagtggtgcgatctcggctcacagcaacctccacctcctggagtcaagcaatcctctcgcctcagcctcctgcatagctgggactataggcatacaccaccacgcctggctaatttttgtatttttagtagagacggggtttcatcatgttggccaggctggtctcgaactcctgacctcaggtgatccacctccctcggcctcccaaagtgctgggattccaggcgtgagccactgcgcccggcctcagatccgcttctgattggaggctgtgcccaccttcatgggaaacggtgagcatcaccttcctttgaactcaaaagaggcacagtgagagccttccagcctcgatcacaaggacctctacccacaggctgccggtccggtgtgtctctgcctggcagggctgtgcctggcacggtgcccgggccgtgcagtccatcgcctgggctgaccacgaggacaccccggtgaagagctgggcgtgcttgggccgagggctgctggatgttggcatcaggcccagggtggagggagggacaggccacgagcccgcacagctcgtgagcgtgtggccggactgatttatttttctccccagtgaccccgaaaaccaaaccctgccttctttcctttggtctgttcttgtctggggcttgtggatcacgtctcctgcctggccatggacagagaaaggaaccactccagacggacgtgagggtgtgtggcagtggcttttccacatggccctgaaggttttgattaaaaaggtggaagaatggtgctttttcttcctgtcagccaggccttaaatcaaccctcaagtgaggaaatgctctctgcgcctgctgctcagcaaacctttttctctggttgtgaccgtatgagcatgtttaattgcaagccagggtttagggttggaacagcccccattcgccccaccaccctctgctttccccaccccagaccccgtcgctgcagctgggtgagcagggctgagtgagctcagggaatcggagctcggcgagacgaggggagctcttggccgtgtgaagagcacttggaggcctcctgctcacctggcctaagcccctgattttacagatggtgaattcgtctggattcttggcagcaagtggcagatactttcctcccagttgctcaaacaaagagggaatttactgcagagatgaggaggagggcgttctctcctatggtcaaatgaaaccatgagaccgacacggcggtacctaggctgggaacccccgaaccagggcacttctcccccacccagcaaccctatcctacagtttcttcctgagatggccacggcccctccatctggttttaattaagaaaattccttagcactgtgattggcccagcatgttacaaaggcaggaggcagagcagatgaccccataaaggaccttctggtggacagacctgctattctctatctccttctttcctgctgtgaacgttcacactcatgcacacaggcgcgtgcacacacacacacacttatccaacaagcatattgagcacctactatgtgccaggaacatcatcagttcattcagcaaagcagagtggagagattgcagggtttggaactgggcaggcctggatttgcgtctcaggtctgctacttgctaagcgttccgtctgcgggcatttgcggaaccctcacagcacacctggtgccgtgctgcattccatcctgataagcaggaatgagaccacattcctcctttcacagagctctctagggctctgtttccacatctgtgaccccggaacagtaagcccccacctcacagtgttgttctggagagcaacaggagtaaaaatttatgagaaaacccacatcaaggcccagcacaacgcctgcctctctcaggggccgtgactgttaggccggcccgtccctcaggcgcccacagcagcctccagccctggctcctgctaaagacccgactcccacccctgcccccgcccaggccaggcttcccgtagctgacgcagatcccctcgaggagggtcaaggggcggccagggtatggttgtgggagtgcccctcctctgttcccgccccggaggagaaatgagggtggcctcccaagaaatgacctccaccccatgacagcagaacagggcagcccccttgtgtggaaggaaggggacccctgggagcccctttcttccagagagtctctctctcctgctcagccttcctgaaagctgagcctgtccacgttgggaaattgcaaatagtttacatggggaatgtcagctgcccacatatgaaaatatacacatcattaagccctaagtgcttgcgtctggagatagagtggacagtctcccgggccgaccttttgtccactgacggaaccatggctaatgagcgcggagctcctcagtgggatgttttcctctactgaagtgaagcatatgttggacgttagcgtgtgtgtgtgtgtgagagagagagacacatgacagcactatacaaacaccattggtcaaaacacacagagtccaccgcacctccttatccagcccccatgggcctccagggagggcttgttcctcaacaccacatcctcctgcacactgtctaggaaggaatgtggcatccttggagtacatgctggtgctcagggataaggttctctggccagattccctaggtttgaatcctgtctttgctcccaggccaactatgtgcccttgagcaagttacttaacttctgagcctatttctgcgcctgtgaagtgaggacagtaagaataataaaacctatcttaagaagatcaaacaaggttactccacataaagctcctaggacctggcatatcataagtgggtgctcaagaaaaggcaatgatggccgggtgtggtgacgcatacctgtaatcccagcactttgggaggctgaggcaggtggatcacttgaggccaggagtttgagaccagcctggccaacatggtgaaacaccgtctctactaaaaatacaaaaattagtcaggtgttgtggggcgtgcctgtaatcccagctactcagaaggctgaggcatgagaataacttgaacctgggaggtggagcttgcagtgagccaagattgtgccactgcactccagcctgggtgacagagtgagactctgtctcaaaaaaaaaaaaaaaaaaaaaagaaaaagaaaaaagaaatggcagtgatggcagtgatgatgagaatgatcgtagcagccttctccaggaggtgaggctggaagaacggtcctgcctgctgggaggatcatcttagatgtggttatgtcagaagcaggtcctaaagaactgggtggggtttggacatgccatgaaggggtgggaaggaacgaagggaccaagcaaaggtccagtagccagaaagctggagctcgcccaggaaacagccagtgtggggccagagcactggagagcaggggaagaaaaggggaagcaggtcgggcagggtgttgggggccaggtctaagaagccactagacttggtcctataggcattgggggccgctgatgctgtgtggtgcagaaaaactcctttggggaccattgtgtcaaatgaaagagcaaagagtagcagagacctgtgaggagcctcctcaatagtccaaacaagagaagagaattctccaaaccagggtagtcagctggggatggagaggaggcagtgggtggcagagacgccacggctgagattgctagatgtgagtgttcccagctgtgaaatgggggccagctggttttgactggggccaaggaggccaaagccatgtccttcctagagggctggctcaggatacctggttaagggcttataccactcagatccatgcctcccagtcagaggtgccaatcctggccccgccatgggccagcaagtgacttgcaggggaccccttctctcagtttccccatctgtgccatgagtgggttgaagggctgagccctgaggggtctttcctggagggtcctctgatctccacctcctccgccgtctcactcctgaatctctgaacgagtatcaggcctgtgtttctggacagttcccagggtgacgcggggcaaaggattatcggtggctctggggaggcctctgggtgtagctctgagttgatttcatggtctttcagtcccgcttcatccctgggtgcctccaagggcaccagccaagtacaactgattccatctccaccctgacacttgaaacaagggatgttaatacagggagatgctttgggaaccagagcctcaaacatctggagtttcgcactgatgcaggaaatgatgtcccttcctcacgtcagtcattcatggtgcagaggcagggagcagtgccgggagagcaggtgcagccgccttggcgacgccatcctcggggctgataactcagccactgatagctgccccaggagggggtcagcctcaagctacggcagcattcctgccagccgttcctgcttatttcccatgatcttcactagtccctctgactccgaacagcatctccctttctgttcagtgctgactctgtcctccaggcgctggccctgcagtccagcttctctctccttcaaggtccaggcctgtatgacctctctagggctccctctcgaattgatcgctctctctctctcttttttttttttttaatttgagactgcttctcactctgttgcccaggttggagtgcagtggctcagtgatctcggctcactgcaacctccgcctcctgggttcaagcgattctcgtgcctcagcctcctgagtagctgggactacaggcgcatgccaccatgcccagctaacttttgtatttttagtagagatggggtttcaccatgttggccaggctggactcgaactcctgacctcaagtgatccacacacctcggcctgccgaagtgctaggattacaggcgtgagccaccgcacctggctgaattgatcccctttttcccctcagttgttgttgcagaggccgtactcctctggtctgagattatagtcagttggtaattattccaggtgtgcccacctggcctcccaagtctttggggaccagaaggctggcaggccgttggggtgaaggagcatagggaagcaatggcaccaccttgtggacggcctgcttcatgggccttggctgaatgcgtggaggcagaactggggttgggctgtcgcctgcccttgtgcttgggtccctacctctgtaatgccactgagggtgggtgtctgagcatcagcctcgggtgtggtgggtgatccacacgtgcttcccggattcagtgctgagtgtggtgcccactggggtggcttcatgcccaggcctggcccctgccttcctcctcagcacccctcctccccagcctgcctcagtgtctgaaatactccagatcattcctgcttcaggttaagcacagatggcgcctgtgaagcggcagttgacctgggaggggtgcggcaatgagcatttgctgtaccaaggggtgctgggggcaagggattagccagcaagtcaccccattcactctaaacccattgctgtacaaatgcagcttcaggacaggcccctagttcttctctccaaccacactgccaccccaacagtctcatcattgaaaattccaaggcctcccgtgcattgaatcgttagtggtcagcaatacatcatccacaccatgcctgaatatcccagaggtttctgctctgatggaacagaagatgagagaggcgacctacgcggcatgatacggtttagggtcacagcagcagaggatgcatgagatgaggacaaaaaggaggggagaggcttagagaggagtgaaggtgcgaagtcaccctaggcgtacttcatccgtttcggtggggggtctgccctacttatgttccaagtgatgggaagagcttttctccgtgccctgtggtgcccagaaaaacatcccaggcaagtttcatctcttgctacctgaagaggtacattctggtcatcacagatatcaggaactgcccggatccccagaaccagtggcatagagcagagagcgagtctgggccatagggaagaggtggtaagaaggagtgagtcatcgggggtcccgaggggagttccaaaccagcacgagctctgtccgatctgcccgctggaatagcaggcagccttggctcccctggcccagtgcggccccaggttcctccagtgcaggattcaaggtcaatttcccatcccaagagagaggcagggcaggttcttttacctccaggtgaagggggcttttatacagaagaaccagctcacagagcaggcagagtgcccccagcttcaaggttacctctgtccctccccagcttcaggggggaccagaaggggagagtccttcaccaaagaagtgggtggggagctcagcgctggggagtgattgccagaggggttctcacagcccgcagttcctcatggcaggcaaggcctttctcatccagccagaggggagagatgtctcctgccagcaccccaggctacacagctgtgtccccagggcgtatcttggtgtcttcagctgtcccagagagatgattacagagccctgctcagggatagctgggtgtcaccctgactgtcatcagagtggactctggcagggccaggctgaggctgaccactgtgtagcttcagctgtgcaaggccacaaggggcaggcattcatggcggggacttcaagcagagaaactcccctgctccttccagttaacttgatcctttcaaaggaaccttggtgcccaaattcactgttgtgttaaagtcgaggtctgcagctagagctgtttaaggagaccacctggtgacctgagggggtcccggacccctggggcaattttaccaacgagcaccaccaagaccccttccaacctggctgccttcacctctgcaggtatctacaggccttgaggccctcacgcttggatttctgtatggttagacattcaaggggcatctttgatgggggaagcgtggcacccctgaccatcagctccatcccagagggacatccctgcaggaagagctagagtgctgcccagccatagctctcctgacactcctgagtcctcagtggagtgagggtaacatttctctccagaacccacccggcctgtagggttcccccctctcccttctccagcccaccgcccaccagccaggcatctgaaactgcatggaattctcctgccttgaaagacccagtggatggatcccggtgctgagctgaggttactcagaaccccagagccctctgagcttctgggtgccttgtttcttacacggtgtatccgatctgacacgcagccagcggagggccttcttaaagagtctctctttgtaagtgacttccagggaaggaccagacatcctctggttccattgatgcaaataataaatgtccgactacaactactcgcttcttacccttctggcaggtttgggctttagtttcagacgcaatggccagcagcttcttattcccatcttactggcaaaggtgtcactccctggaggcacttgaaagggggttgggttggaattgtttaatctcttcaagtcgagccagtggttataaagccagacattattacccactcattaactcccttgttagggctttgcccttgggcagagctcccctgccagccaatccaaagtatgagagtggtgtgacttcatgtacacagttgggtcacctctagaccctggacaatccccttctcccatctgctgagaagggagttcagttggctgtccctgcctgcaggtaggagggtcaaattctgctttgccccttattccgtcttctataaagcctttcccagatgaccccagctcacaatgacccctcccttctctgagccgtggggctcattgtctcgagctgcatcacttgcctctgctatgggaccaaacagcaccctggtcctcatgctgagctctgcagagtaccgggggctagggtcagaccttatgggtcctgaggggataaggtgagagtggggcacaggtggcccagacagcccactccctccagccagatctcactcattagacacccaacctaggttcaaatcccctctcaggcacttactggctgagtgaccctgagaaaattgcttaacctttctggacctcggtttcctcatctgcaaaatggacactataataatagccacctcaggatatgattcagtgaattaatgaagcaatgtgtttagcccaggacctaactagagttagccttcagtatatgtaagctattgttaccaattaagttatttttataggttttaaatattgggtctgtggataaatttcatttggaggagaaaagtttgctactaaaacaaacaaacaaacaaaaaaaaaaaacaagaagaaagaaggtttgaaagccattgaatttcaaccaacccattttgtacatcaccatgtacagtacaaccgagaggcataagaacttttctgttgggatattataccttataatatatcatttctgtcttactggagaaaaagtattttgaggtcaaaaccacactagctccatctcttttttcttttttttctttttctttcttttttttttttcttttttcttttgagacagggtctcaccgtgttgcctaggctgtagtgcagtggtgtgatcatgactcactgcagcctcgacctcttgggttcaaggaatcctcccgcctcagcctcccaagtagccgagactacaggcaagccaccatgtttggctaatttctttttttatttttagtagagataggctgtcactatgtttcccaggctggtctcaaactcttggcctcaagcaatcctcctgccttggcctcccaaagtgctggcattacaggcatgagccactgagtcctgcctggcttcatcttcatcttttaattctacccctgcccagcaccaggctgtgcctgtggtgggtaagggtgggtccttcctaggtggaaacaaaggcagaaccctgcagagtgcacacaggtgggcaactcaggtcccccttctgaccattctgtttctccccatggcccaccctgctggcatctctatctggtccttgctgactcgcaccaggctcaaggtcatatcctggcacaacacattgtatcgtcttgctcacgaacagacaaccagcaccagctccgtgccaggccttgggccctcctggactaagggtgccaagccatcggctctctccttcctgaagcagatttgcccagggcctcgggatttgtgctaatattcagttgctctgaagtagcctggaggtactggttcccaagagactcagctgccagaatttccaagaaagttctccaagtcttagaggcacaagcccccagttgtcgactcccaaatctcaaaggacccttcaggcatctctggagcagctccttcctgtttcagagggtgagacggaggcacaaaatggccaaggtcagaggccgggccagagctcaggctcctggctcttggcctggggctcctcccatgacatcgaggatcttttctgcaaaagttgtgacccgtgctctgtgggttgctcttctgtgtctcctggggcagagtgggaaggcaggtgggagacagcagccactacccaggctgctgttggtaactgggaaatgtgctctgagactgctgtttggtgggaatggcttggcctgcacttgggtaagtggtgtttactgtcacagcagctcgcatccacactgcaggctgccccccaagaagctgaagcctctcaggcctggctcagctgggagaccctgagggcaggggtgagcctgcagagagggctggacctagaaaagaaataaagaaggaaggaagggatttggacattcagaaccgtggggaacagaaaacaagccactgattccattcaccaaggacaggccagctgctgcctcgggcgtcccctccacccccagggattgacacccccgcccagaaaccatccagtggactcttagcaaatcagccccatagggaagaggaggcaaggctttcagatttcagcatccttttgggagagagctgtgtccacaccccatctttctgagtccactcccagcaattttctcaattatctctttaatttattaaaaacccatctcaaagcccagctggtgagtcagcccctgggaacagctggcagagggtgaatggtgggaggaggggagggggtgggtaaggcctgccctgggtggagctgccttccagatgcggccgccactcctgggtaggacacagcaactctctgaaatgtcctttcaaatttaaaatactcaggccagcagcttaacctagaaagataaagaaacaacggtggtgacatttattacgtgcttgctactactgccagatctgggccaaatgccttacctgaagcttttattgatttgctccaagagaaactcctattcctgattgtcttcctgacaagagtgaggctgagcagttaagaccaaggccacagctgcgagtcacagatctgggattcaaacccaagcctgcagctccggggctatagctcccctcccctcctcaccaccctcctccctcctgagccttcctgtccaccttggcctgatccaaaccctttcacacatgaacctcgaggctgggcaggtgttcatcttctcttttgccctcggaggaaagaagcccagcatggccaaggggcgtcaccaagcctgctgggggctcagtgatgagctgggtcacgctgcacagccccttatggttgggagcatttgcacaccttgtcagctctgactacatgcccaggccatggggactgtcattatcaatgttttgcagatgaggaatgaggctcagagaagccaagtgacctccatgaggtcacacagcctgtaagtgacacagtcagaagtctcatcctgaacctaggctcattcaccaccttccagctcagccacctccccaaaccaccagtgtccaggtagccctgagccaggtgcagcctggagggggcagcaggtcacacactggggcacagacgggctgccagatgtaccagcacctggagcgtggctggttcttggcccaacacctgtgggcaaacccggccgcactgctgctggctcctcactgaccacctcccttcccttccttcttccagtcccctgttttcatagcccaagttggccaagacctggtctcccagacggaggagaagctcctacagaagccgtgcaaagaactcttttctgcctgtgcacagtaagtgccgtagtcacctggcctgtcctccccgggctgcccagagatgggatgccgcagctctccacctgaccatacagggcactgaggcaggtcttccatgcctgacagcttcagccaagttataccaactgtttgtatacttcccacgaagagaaaaagatatcaaggtgccaagtccaaagaaaacatctgctgcaaagggtattgaaagcaagtggctctccaggctgttgagacagaggaatgtgcaaacatttgaccctgtctgggtggtttggaagtctttcccagggtcctcaacccccaccactgccaccaacccgagccagtgctactgatgcagggggagcttctcagccaaaccccatcaccttgtctgcaggtggcacgtctgccgtgcaggaggtgacacaagtcgatggccatgctgccagcagagcaccaactaaacccccaccccatcctgcacacacacactctgaaggcatgagcactgaggagcacacacaagtcacttgctgacacacgcaagcacacacacacacacatacacacacacaggctcatgaaagttctccaaagccaggttaccccacatagttggatgatcttaggggctttttgtgtgcccttattcagcaccacagacatcaattgagtacctactgtgtacctggcactgtgctgggtgctgggggataccaaggtgaacaagaacccaatcctggctttcatggagtttttacaagaaaaacagcaacctgcatgcactttgaggggagctgggagggccgtcctgggaccaagcagtgggttaggtgctggagagaggccctggtgggcagagcaagcttggttgctgctctcttggagctgcccaggaatcagatccaacagtgggtggggtcttggttggtgactctgaccctgagggaatggccatcttggctcccaacgatggctttcaggtttggcaggacacagactctgacgtgccccacctgccatagtcccctcccttccccaggctccaagtgcctgtgctagattactcagtgtggccactttctaaaggaaagaagctgcctgcagacagtttcagaacctgccctgatggcctaagacccatagagatccacagcatcccagggctcggcctggcacctggcccacagcaggtgaccagtgaattccaatgcatgcataaaaaaactcccagtggctttgctagtccaagaccagatccagagctgcggttctgaggggctgtggccccacccttcccccaaccacccaccacccctgattcccagcccctcattaagtcttcgtctgttctcagcttaaggtcactttttagagagacccctctacccttccagtccccccaaactcattcatgatgacatacctctgggatcatttatttcatgtttgctattcactgtttgtgtcccacatacaatgccaaccccttgctcccagctatatcccagggcctagaacagtgcccaacacttggcaggtacccaacaagtgttggcaggaccaaccaatttcatacaaccctcagtagaatggcaggacctctggccagacgtgctgcatctgcatgggttgagaggccctgtttacttgcatttccaaagctggacacagctttgcccccctgcttgaagatcgggattataaaatgttcatcctcttgttccatctgcactaggtctgtccacgagtacctgaggggagaaccattccacgaatatctggacagcatgttttttgaccgctttctccagtggaagtggttggaaaggtgagtccaccacaccccatacagatcagggaggcagagggtacacatttttcatctgagaattcatataaaaatcagttacctcccgtgggctcatggttaaaacaaaattaacccgactccccctgttaattaagttgtgtattctagaaatgctgtatgcttattcaagcacacacacatacacacacacacacacacacacacacacaaacacacattcacgcaaatgtaaacagcatctcgttcttactttttttacttcactgtctttgtcagcaaataaagagctgccatattccttggaatagttgcacatccttgatttaatccagtgccctgttgatggatattgagttggttctccatttttctgtgtggagccctccctaaataataaatagctttgtacataaatctttaagtacttctgcaagtacatccagagaaattcctagcagaggaatttctgggtcagaaggcacctgattttaaaccgtgagtgctgttaagctgctgtccaaaacagctgcccctgacctccagtgccacagtgcccgagtgcctgctcctcagcttcatcaatgctgttctcgtcttttcctatcccgtgagtgagcagggcgcttccttgttgcttattttcttgtctctctaataatgggggagaccaagtgtcttttcttgtgtgcttgctgtctaattctcttcaaagtactcgcccatgcgtggctgtgacttgggcagatgtgtccctctgtgacagatgaggaagcagaacataggacctgacttagcttcccagcaagccagcagtgctgccgacgaggccccggccctgagcccccagcgcagtgctctgctaccttcactggcccaggatttgcagagcggggcgatgcctgtgtaaaatccatgccgggccgagctggtagatgagggtgggagcctcccctcccacagcccagagtccctgtccccagaggcctggcatgcacagccatctgggggcatccagtgagaaaggagccatccactgctgcctgccagccccacagctggctgtgtcccccgtagacactcaggaagctgcaggccaggagcccttctgaaccccactcacagcccttccctgcctgcttccagaaatccagcagaaaacccttggctctgcggccatggatgggtggtttctctccacctgactggtggggatgacagcgtgaccagagatagtctccttagtggccgctgtccaccctgcacaggcacatcatgactccaggaaagcttgagaggcaaaggattggcctagacatctactgagggcaccagagcccccagcctgggtccgagtcccgcctctgcctcttcccaaggagggtcctcagaaagggtcactcacgactctacacctcagtgtcctcatttgtaaaatgtggatgattgtgcctgcattgtgggcttgggctgaggaggagataagataagcacaacacctgctggaacaaggcaggtgttccgcaaagctcagccatttggccacaggaagtaaactgctgaatgcagttgttgcatccatcaccaccatcatcaccatcaccaccatcatcagcatcactgcatcaatatcccaccgccatcatcagcatcaccgccatcatcagtatcaccatcatcatcagtataccgccatcaacagcatcaccaccttcatcaacatcaccaccatcatcagcatcatcaccatcatcagcatcaccaccatcatcagtatcattgccatcaacagcatcactgccatcaacagcatcaccaccatcatcagcatcactgctgttatcaatatcccaccaccatcaacagcatcactgccataaacagcatcaccgccatcaacatcaccaccatcaacagcatcacagccatcagcagcatcacagccatcagcagcatcaccaccatcatcaatatcactgccatcatcaccatcatcagcatcaccgccatcatcagcatcactgctatcatcagtatcactgccatcatcagcatcactgctgttatcaatatcccaccgccatcatcagcatcaccgccatcatcagtatcaccgccatcaacagcatcactgccttcatcaacatcaccaccatcatcagcatcatcaccatcatcagcatcaaccaccatcttcagcatcatcgccatcaacagcatcactgccatcaacagcatcactgccttcatcaacatcaccaccatcatcagcatcatcaccatcatcagcatcaccaccatcatcagcatcactgccatcaacagcgtcaccaccatcagcagcatcactgccatcatcagcatcaccgccatcatcagcatcaccaccatcatcagcatcaccgccatcatcagcatcacagccatcagcagcatcaccgccatcatcagtatcaccaccatcctcagtatcaccgccatcatcagcatcaccaccatcatcagcatcatcaccatcatcagcatcactgccatcatcagcatcactgctatcatcagtatcacctccatcatcagcatcactgctgttatcaatatcccagtgccatcaacagcatcaccaccatcattagtatcaccaccatcgtcaacatcactgccatcatcagtattaccaccatcagcggcatcaccaccatcatcagcatcaccaccatcaacagcatcaccaccatcatcagcatcactgccatcatcagcatcactgctgttatcaatatcccactgccatcaacagcattactgctatcatcagtatcatcgccaccgtcagcatcactgccatcatcagcctcactgccatcatcagcctcactgccatcatcagcatcaccgccatcaacagcatcactgccattagtcccacttcaccaggtctgatactgggaggcacagccaactcttgctggaggatcagtcctgattctgccaattacagggcagtctagtggagctgtgttcgccatgcccacgcccggttctggagccctgggctgtgcaacacacaaccccaatctgtgtccaccttcccagagtggcagtgtggggtcaggatacagagcatgggctgcctagaccccaactccagcccaccgctaccagctagggcctcgggcaactcatttcacctcttgaagcctcagcgttctcatctgcagaatggggacaataatgatccctgctccctgagcttgtgtgaggattatagaagcccccatgtgtgcttggagcagtaggtattgttactatagagacccccagaggggggcatgccctttattcctaggagttcaaataatgacatctgacacatcaccagtttacaaagagccctccactggatgtaaggccttctcatgatcattttcctcagaggagttggagcagccttgggccactcagcaagggcctggcaaggctggaacctgaacccagaggccccctcccaagtccttgggccttggtccacccagcactccagttcccatagcagcctttgtcggtggtcactggctttcctttttcttatctgcaccaaacacatgaaatggagaaattatcctttttactctgtggcctgattgcaaagaaggcattaagtttttggagcctgtagggcaggaccctggcctaggaatgccctacatatcagatagcaccctgcacaagatcctgcctggttggtgctgtactgctgaaatagtcaagggtttttttcctcccaaggttaaccaagaaattcctgggagcttgcattccactcatttcccccagcagaggagttctgcggagatgtcaaccaaccgtttctcctccatgcatcgtaaactgttaggcgggccgccttcatgtggtttccgggggcggctgtagggaaggcttcccagggccacgtggtcgaggcaggcgtgtggcagctcttccctttggctgtccagccgctcctgtgcagaagagcgggatacccgcagaggggcagctctgcttcggtggggtttgggccctgtgtcctgaggaagcactggtgaagggagaagtgagccatggcacgcaaattcaagatggggtgccagagagtaccctggcttttcagggccttcctcagagtgcggctgtggtgccacagatgtgatttccagggaagactcattcgttcaagagctgctgggtgactgaaggctccctggtcatcctcagctgacccagttctttggcccagttctgctcgatccaacccctgccctggtcgggacttttgaggaatttaggagcaggagtttagtcttggagagccaagagccaattttcacgttttaagctgattatttgtagccaaacagaccagcaatgcaaaccacaagccctctgcaccgtgatgtcctttatggcaactagataggaccatgtctttgcttagtccaaaaagtgccatcatgcctcatgatcagaagttctgtctgattcaatgtcataaatggctttggctcattaaaacgaggagttggaagacgcgaggtgatcattacttccaatccgatcttggcaggcaggatcttctcatgttcctcatctatgtgggaaatacaataaagggtcctcagtggtggaaaggttgggaaccaatggtaaagatccccaggacacgatttgaagaccagcagcctctgccccctcctgaggccgggtcttctgggccagcagcaggagtgccctcaggaaggaataagccatgcccaggacaggaagcactgtcatcctgctgggcagactgagatgcacaggtgtagggagggctgtgacctccttcgcgtcctttgtgggacgctggtcctctgtggctcctggcccccaccccttcctgcacagaaggcacagcttccttctgagtttcgccgcatgatttgcagagagaggagaaccacatggagagtgtggtcaagcacctctgcactcaggtttttcaagctttctgagcaagcgaggcttgtgcatcccccagcttgcagggggctgggggctgggggccagggggcttgggatttgaacactcagcttcagactaagtcctcgaaggtccagtctccagcgatgattcctggggggtccctggggctgctgtggggctcctggaattataccccaccccagctgctctcaatgtgccactgtttcctgtggattctgagtcttggcaccatgagaccagtgtgggattcttctttcttccaggcaaccggtgaccaaaaacactttcaggcagtatcgagtgctaggaaaagggggcttcggggaggtgagtgaacattcacgtttttaattgaaagttcttacattcaagtcacctttcctgtcccttctaaatcaacctaaagggttggcccacgggtcccccgggggcaccagtggctcaatgtgggccccgggggcagtgagggtgggagagagtcagtggccttggggctatcaggtgtgtctatggtggaaagaggttgtggagctgggcaggtgagacagacgtgctctcctgccagcctcaggcaggatccagcctgcagaggacaaatgggcagccctggtcgtgtgtggggaggagatgtgagggcgtgaggaggctgggcaaccttggccactcagtgcctggatgacgctgtcatgcaagattcgagatttcgttgtacattacccgatcttcccagcatgtgaggcaagccttgttattcccattttagagatgaggaaagctgaggtccagaatggttaggtgacccagccaagggcgcgcagacaatgtgaggcagagctaagacttaagcccaaatgctttggttcccgcttatctggattatgaagtcagtgttcttgaggatctcctatcactgcctcccaaaacaaacttctctaccggcagccggtaggagaaaatcctgttgccctgggaatggaacggtacttggggccccagtcagttatctaagccttggtgtgagtggctcattctgccccttccagggctgggaatccttgaaggagaggaggagggagggcaagggcccaggacagctgtgggccccaggccaggcatcactgggtcctgggagcctggagcactcatgaagccaggcagggccggctctgaccccatccattctctacctgggaggcctgtggtccccgccctggaggagctcggggcaggcctccacggtgctcctgccaccctggtttctttcttgcactgcaggtctgtgcctgccaggttcgggccacgggtaaaatgtatgcctgcaagcgcttggagaagaagaggatcaaaaagaggaaaggggagtccatggccctcaatgagaagcagatcctcgagaaggtcaacagtcagtttgtggtgagtgagcatctgggcccagtgaccggctcgcccttctgtggactggggcttccctccctccggaagggcgtggtcctctaatgcggccggtccccacccctgggaaggggaatgccagtggcagcgctgagctacagaaaggccgcaagacattcctccatcacacggcccattgtggtcgactgtggctggctttgtcccatccccagagccggccagtgcctggctccctgctgtgcatgagaccgacgcctctgttctcctggaccactttgtaaactcctcagtggacaaagaaagttcacctgggcccaggctgggagctgtgggttccacagaccctctaggctggtgccatcgtggtggggaccttagtgccagcatcctggaatggcactatcaagtctgtgtgcattgtgttagtcagtctaggctgggccctgctgcagtaacacatttgccccaaaccctaagtagctaaatacagcagaggttcatctgtcactcacctgaagtccaatcagattgggccaccctcctccatctaacagctgccccatctggagccttgaaagtgagtgctaggggttccacacagagactttccactgcctctactggacagatgttcctcagtttcacccacagtctgccagccagaaccagtcaacacagagacaagttagtttcaggggaggctgggaaatgtgaagtgcatggatatttggtcagctctaatatcttctgctacacactgttataaaaaataaagctgggtgcagtggtacatgcttgtagtcccagctactcagaaggctgaggcaggaggattgcttgaacccaggatttcgaggctgcagtgaactatgatcgtgccactgcaccccagcctgggtgacacagcaagacctcatctctaaaactaaatacatgcatacattaaaaataatatatacacaaggtaaaaatttaaacagcacagaaggatacacaataaaacgaaaagcttccctctttgagtaatcactccaggcatgttttattcatgcacaggctttattattcttagccaatgggatcttcctgtacctcttatggaggaatgtttttcccttacattgtagatctttttctccatccagacctctagtcacacccctttttaaagttgggcatcattctcctgaagagataaagcataatccatatagtcagtccccatggatggaaattgttttccatctttaaaccactacagggccgggcacggtggctcacgcctgtaatctcagcactttgggaggtcgaggcagacagatcacttgagatcaggagttcaagatcaacctggccaacatggcaaaaccccatttctactaaaaatacaaaaattacctgggcatggtggtgggcgcctgtaattccagctacttgggaggctgaggcatgagaatcacttgaacctgggaggcagagattgcagtgagctgagatcatgccactgcactccagcctgggtgacagagtgagactttgttaaaaacaaaacaaaacaaacaaacaaaaccactacagaccagtggcactcccagaggatggaagtttgcatcttgggatctcatcccaggccacccccagctgccagccttgtcgggggtgcaggtgtgggcagtgccatggtatgtggagatgaggcagatgaggctaacttcagccatcatttcagctgcgggccttcttgagtccgaaaccttcctccccactgccagccgcttcagcagggacccctggatgctgcctatggagccttgtctctgaagggacagtgctggcgggttctgctcagggaagaggatcatgtgattcacaaagctgggtggcacgtctttaagggccttcagttacgatggctgcaccttctttaactgtgccccatccacggccccggcagggagttcccacgatgtcacctcctggatccctttctcggtgatcacctgggcagatgtgggagaaaggggacagctgcagccattgcagcagaagcacagtccccatgagcttgctcatccttggctgccattttatctcctttcctcaaaaatagctgatgttgatgcaccagttttacggcacagccagttcccagcctggcccacgatggccgggtttcatgtgtgccacctccctatgtggagaaggattaccttctggtgtaatttgcccctcctgccccaccatggccttgcttcacagagccttgggtgtctggactccaccagcagaggactagaccccctctcttggtggccctttgccaagtggaccagtgtattagtccattttcacactgctgattaagatataactgagactgagcaatttacaaaagaaagaggtttgatggacttatggttccatgtggctggggaggcctcacaatcatggtggaatgtgaaaggcacttcttacatggcggtggcaagagaagaatgagaaccaagtgaaaggggtttccccttataaaaccatcagatctcatgagacttattcactactatgagaacagtataggagaaactgcccacaattcaattatctcccaccgggtccctcccacaacacataggaattatgggagtacaattcaagatgagatttgggtggggacacagcccaaccatatcattctgcccctggcccctcccaaatctcatgacctcacatttcaaaaccaatcatgccttcccaacagtcccccaaaatcttaactcatttcagcattaactcaaaagtccatacatagtccaaagtcccatctgagacaaagcaagtcctttccgcctacgagcccgtaaaatcaaaagcaagttagttacttcctagatacaatgtgggtacaggcattgggtaaatacagctgttccaaatgggtgaaattggccaaaacaaaggggctacaggccccatgcaagtcagaaatccagcagggcagtcaaatcttaaagctctaaaatgatctctttgacctcatgtctcacatccagatcatgccgatgccaagacgtgggttcccacggtcttgggcagctccatccctgtggctttgcagggtaccgtctccctcctggctgctttcatgggctggcattgagtgtctgcaggttttccaggcaaacagtgcaagctgtcagtggatctaccattctggggtctggaggacagtggccctcttctgacagctccaataggcaatgccccagtagggactctgtgtggggtctctgaccccacatttcccttctgcactgccctagcagagggtctccatgagggccccgcccctgcagcaaacttctacctgagcattcaggtgttttcacacatcttctgaaatctaggcggaggttcccaaacctcaattcttgacttctgtgcactcgcaggctcaacaccacatggaagctgccaaggcttggggcttccaccatggctcgagcactgcattggcccctttcagccacggatggagcagctgggactcagggcactgggcaccaagtcccttggctgcacacagcacggggaccctggactcagcccgtgaaaccactttttcctcctaggcccctgggcctgtgatgggaggggctgctgtgaagacctctgacatgccctgtagacattttccccatggtcttggggattaacattcagctccttgttacttatgcaaatttaggcagccagcctgaatttctcctcagaaaatgggattttcttttctattgcattgtcaggctgcaaactttccaaacctttatgctctccttcccttacaaaactgaatgcctttaacagcacctatgtcaccccttgagtgctttgttgcttagaaatttcttctgtgagataccctaaatcatctctctcaagttcaaagtttcaaaaatctctagggcaggggcaaaatgccagcagtttctttgctaaaagataacaagagtcacctttgctccagttcccaacaagttcctcgtttccatctgagaccacctcagcctggactttattatccatatcactttcagcattttgggcaaagccattcaacaagtctctaggaagttccaaactttctcacattttcctatcttctgagcccttcaaactcttccaacctctacctgttaccggttccaaagtcatgtctacctttttgggtatttttttcagcagtgcctcactcttctggtaccaatttactctattagtccgttttcacactgctgataaagacatacctgagactgggcaatttacaaaagaaagaggtttaatggacttacagttccacgtggctggggaggccccacaatcatggcagaaggtgaaaggcacttcttacatggcggtagcaagagaagaatgagaaccaagtgaaatgggcttccccttataaaaccatcaggtctgtgagacatattcactaccacaagagcagtatgggagaaactgcccccatgagtcaattgtctcccactggtccctcccacaacacatgggaattatgggagtacaattcaagatgagatttgggtggggacacagagccaaaccatatcaactaggcacatcctgcatgcaagagaaagcctttaccaggccatgttccacttcccaaagccccactgcccctccagctcacccttacttggccctgtgagaatggctcccatacccaaaagggcaagtgagccctgcttttctgactggccaagaaggcaccctccagtcttccccagctgatgcacacatgtgcttctgtggaggaagcacagacgccattctgttggattcactgggaggtcggggtgctagcctgccctaacccgccttggccttctcaccttgatccactgaaagggaggagcaggtgtgagccccttatcagccaaggaggccgcaggcagggtcaccgcagaggccatctgggtgcaggggagcagggtgaggctcctctgttccctcacaccccagctcccaggatcctgaggagggaagtggaagtgagtggccattgtcacaacctccccatggcactgttcttgtgctcccaggtcaacctggcctatgcctacgagaccaaggatgcactgtgcttggtcctgaccatcatgaatgggggtgacctgaagttccacatctacaacatgggcaaccctggcttcgaggaggagcgggccttgttttatgcggcagagatcctctgcggcttagaagacctccaccgtgagaacaccgtctaccggtgagtggaaggcaccaaggacttccaagtctaagtccgagggggtggggccagcccctccacaccctcgggcaggtggttgccatcgctctgggaatcagccctggtcagcaccaggggaggatgcagagtcagacagactttccactccaggaagctggggcctccggcactgaggaagcgaggtgggccaccctctggccagtgttctccagcctccaaagtttagggaagccaagcaagtgaaatgatgttcctgaaactgactgctccttcaagtcaaggaggacgggccgtgaccactgctccctccagttgcctccatcccagcagccagggaagctgggagggggcctggtggccgctatctgggatcagtcctgggaagacttgggtcgggtcactgcccacaagcagaatcggagtggcccatggtcccactccatgctgtcctcagcttgctctggtcttcaccccctctccccacccacctcaatcccacagggacctggacattgtagggccaggggtccagattccactcacaatgagcagtgcccttcagatttttctcccagtccttctgaaagaattttgaaaaatctctgtgatgctgcattttaagtagacatttgaaatattccatcatattgaaatagtggcaatttttgatatattgaaattgaacagttacattacactcctcaggggatccagtggaatctctagttgctgtagccaattgatttccacctgcatttatccaaaaaatgcacagaaagctctttagtgatgaggaattttctatcatttccttcactctctccatccccccagaatgttaataatatatttttttgcctgaaagtctttcactgattagcgtacatctctgaaacaaatatatagatacatacaagagtttttgaagttctccttgaccgtaagtctctaagtgttaaaataacttctctggccggttgtggtggttcacacctgtaatcccagcactttgggaggctggggcaggcggatcacctgaggtcagtggtttgagatcagcctggccaacgtggtgaaaccctgtctctactaaaaatacaaaaagtagccggatgcggtggcacgcgcctgtagtcccagatacttgggaggctgaggctaaagaatcgctttaacctggaggttgcagtgagtcaagatcaccactgcactccagcctgggcaacagagtgagactccgtctcaaaataaaataaaataacttcttctgtcgagttgccattgtaattagtagtagatctcatttctaatcagtcctttggaagcaggggttttgacatctggagtgggtcgctacagtcatactcgggaggggaggaggctgcttttcttctgtaacttgggagaagagttattgagaaagggcagatgggagggagatcccaaaagatgccaggacagagcatcctgatgtgaagaaatccaaacccttcaaactgcggacaggagggaaccccctgctcggtcctggcagaccccgacacgcagcccagtttgaagacctttgcagtggagctcatcttgggaccaagaaggttttgaaaacaagaaagaatggtcttgatgacatgcccttccccccataccatccccccatttatgtttctgttttgttttcattcaaatgaaaagagtcaaaattttccctaagggttgaacaaagaattctctacgtgattgccttttatttaaaaagaaaaaagaaagccctccaagttccagctcgtcttcttccgggggaaagagaaccacagtgcctcctccctggctgtgaccactcaccacggcctctctttgggctccgttctggccagtgcccactagtgagctgccatgctagcctggtggcagccggcttgttgagatgatggctgctgcccttatttggaattgttaacacatcaaaagaatgccatttaaataacagcaacaaaagtattttatgataaataaggatacacaaacaccaattatcatttgatgaggctcactggctggatttgggtacattaaccactccgcatgaggacagctgccatcagttaaataaacaaagctgggtggttgagaactggagcctccatccagatcctgtgtactgtttgccccatggcttaactgagttgcacacactctcctcttggctgttcttttacccatagagaagaccttttcctataaaagcagctcctctgctggctctcccctcatcctgggaatgcagaggctcccttacttgtgagcaagatcctgtcatcaagagaggagacattagggacaggataaggcagccacacctatgccatgccccgtagctgttctttctcccaggctgtagcgtagctggtgttgggggatatgccagtctcctgcaggccccatcccaaagggggtctttttcctgtgtccccaccttctcccctttgatcctctcttcccaattgcacagctcccttcattccaggccctgttctgccttcagggcttcctgagacctgcagggtcttctcagccttggagtatcctcagacctgcagtcattgatgtgtgaacaggggccatgactggccttttcctaactttcccagtcaccctccaggattgggaaatgcctgtggcaaacggcagtgttgctttaaattactggaaggagaaaaattagctgaagatcattttgactcaaaccagacagcctgagccaggaggtgggaaggaaacacactgtggccactcaggcctgattagcccgaggggtcgacccagatgccagtgtatcctacctgcccagaatgcccacactctgatgcttgttgtttttcctttcagagatctgaaacctgaaaacatcctgttagatgattatggtaagtcttttcctactcggtagctgaggtgagcattgcaaccccaagaaagcaaagggcctcccagggattctcagagagggctggggaagctgaccacgggccccactcccactgctcagtgctgggtacctggggaagggggaaagctgtgagtgtgaacagagctccgcttggtgaacaggcagtgttcagagagactttgaaattcagagtttttgaaattccctttgaccataaggctctaagtgttaaaataacttctggccgggcgtggtctctacagtgcactgaacaaggagtccagaatttcagagatgctgggcaaatacttaacttccatcaagttctccacctctcatcttgtttgtaaaatggaaacaaagcgtcctgccctgccctgcccacccagaaggaagagggtggtggagaggcttctacatgacagcttgagagggaattgcttgtcagtctagccagctgtaaatgtctcaggcattacgtttgtgcattaccatcattattttctcttggctgtggacactgaataataagaacaaccacagtacccctcacagctgtttagcctcacacctggaaaatagttcctataccttctttttttttttttgagacagagtctcacttgctcaggctagagtgcaatggcgtgatctcggcctactgcaacctctgcctcccaggttcaagtgattctcctgcctcagcctcccaagtagctgggattacaggtgcacgccaccacacctggctagtttttgtatttttttttttttttgagatgtagttttactcttgttgcccaggctggagtgcagtggtgcaatctcaactcagtgcaacctctacctcccaagttcaagtgattctgctgcctcagcctcccaagtagctgagattacaggcacgtgccaccacgcccggctaatttttgtatctttggtagaaatggggttttgccatgttgaccaggctggtctcagactcctgacctcaagtgatctgccctccttggcctccctatgtgctgggattacaggcatgagccaccggtttccacacctttgatctgactagatcttcccacctgcacagagaagggcaaggcagcatctctgtgcccatttaacagatgacaaaactgagcctcaggggagccatcctgccaaagtcacccagcagcatcagtggggagctgagggcagaaactgggtctcctcccaccaggccccagaacctggcagcccccagtagagggaggggagaaaccgggtcgctgatgacctgaagagaggtctgcatgggatactgccctgtggaggggcggtcggagggcccaggcctgccgcccctctctggatgtgcccggtgcctcccttggtctaagaaccaagcccacgctgctcctctgctatcctgactgtcagcccccaccgagccagggagtccacacggctccagcctggcggggtctcgacactggcccttgctgacatctaggctggagggatgggggtggggccctggtgtccataggcagggaagggaaggggacgtgttccttcctgtggggtaagttgtggccgcgaccctgcccaggtgggctgtgggagggacaaagaccaaagtggagcctcagctcagcgtctcccgctctgggggctcagtcctgggctgtgagctgggattcatctccaggctctgccaggtcagaccagatgttttcccttctcgtttctctaaagtgaaaaacaaccaatctccagagaccaacaaggcaggccggggagctgcttcccaaatcgttttataattttttccccttaagcaaattgttgcataatgccagaagaacctcacatttttcccatgaagtaatcccagaaccaagccaagattctctgacctcagcgttccaggaagcccattcagcctttgactaggcaggtcggtcaacgtccagccgggtccaggcatcctattgcatctttatgttccactcctgaagagtgggcattttcctgtgtcctcccacacctgcactctcccaaggctcttgtggtcactctgagatggcagattggggtccctgttgtccttggacagatgagaatgccgagagctcgtatgccttgcccaagggcacacagcaaggccgggtgcccatgcggctgtcccagggacccactgaccctgctgtccccctcaggccacattaggatctcagacctgggcttggctgtgaagatccccgagggagacctgatccgcggccgggtgggcactgttggctacatgggtgagtgctgggctgcctgtgtcaatgcaccttgagacccaccacctgctcaccgccggccgagcccccagagcctgcccgcagagcctctcgcctcttcatgcactgctgatcacacacagagtcacagtctctgcagggctgctggggggcggccttagccagggggagggggagcacaggggccccagatgtgatgactgctctgagctctctgcactcccaggcccccagccccacctgtgtccaaagccaagccactcttaggggtcggggcctggcatacagcgctgctaggggaggccacattgaagcaggggtctgggaggagaggcctttgagaggaaggaggtaattcacaagagcccgcaaatgagaggcgcgcacagctgctgtgtcaccaagcatgattccagtagagagcagccttgggctcctgccacctttcctcagtctgctctgagaccagcgtcctgggggttgcagggaagagacccagagttaagtcctgtgccctagaatcccccgtccaattgggggcacgccctgggcttcctcctgtgcatttcacacacctaccctccttcccctgagaggcgcgtgcccggggagcaggcacgctgccgccctctagtcaggctggtactgacagcagctgcacaggaggtgtgccttgtctctggtgctagagggtccttttcagattgcatgacatttggcaacctgtggagtgtgtgtctgtgtgtatgtgagtgtgtgtgtgcccacatgaatgctgatcgatgattgataggtaggcgggtgggcgggtggatggatggttggatggatgatggatgatggatgggtggatgatagatctgcctacctgtgtgtgcatttgcctgggtctccttttgcagagtgttccatgcatctgtctgccccggctcttgtgtgcaaaccagcacatgtgtggatgcatttccctccagacatacgtgctgatgctgcagaactatcttttctgtatttctatggtaaatctgtaattcggtttatcaaagtggtacagaagacatagcaagagattgtttgaattacagataaatttaagatcatctttaatttgggtagatacacctttattcattgaaacaaatatactgatagcacctgttctgtgccaggtgtcatattgttacggtagtgaataaagtagctcatgttctaggcgaggggacatcaagagtgcaggacacctccatccacggtggtcagagttctaaagctacagtcaaagtccttcgggggcacagaggagagtcatcagggcaagctccctggagggggtggtattcacagcagttggtggggtaagagttggtggcggccatgaaactccaggccttctgtgagcagcgccaccagctgtctccctcctcctcactcctctctcctctcctctgcccccagctccagaggtcctgaacaaccagaggtacggcctgagccccgactactggggccttggctgcctcatctatgagatgatcgagggccagtcgccgttccgcggccgcaaggagaaggtgaagcgggaggaggtggaccgccgggtcctggagacggaggaggtgtactcccacaagttctccgaggaggccaagtccatctgcaagatggtgagctcctggtggccagatgccaccctcaagctggtggctcccctccctgggcctggccccagtctgtccccagaacagcaaacaggctgaagggacaggggtctgagcatgggggtgggggttgcagcccaccaagctagagttgagggcactccttgctgtggactggggtggtcagcggagacttccaggagaaagcctgggtggggcagggacacccaggaaccaagggaagaggggtgaggggaacagtgtggaacaccctcacatccagcctgtgggggggtccacacagggcggagaagagatggtctgagctggtgccccagacacaaagcaaccttgggccaagccccggcccctgcccgtgggcctcctgctccctccacctctggatcctaaggtgttggtttaagacgaagggctacagggggtgggggcgacgatttcagtctttgaacatcttataacaaagttttccaccactagatggactgctggtcacgccagcctggctcctgcatgacagggtctagggatagtgaggtcagacccacccaaaagctgggtgggtggggccagatggggggactggaagccagataaggagtgacaggagccattggaagtgggggatatgggagtggagtccgcccgtgcacccctgccactgggccgccccatgccggccctcaggcccttccctgggaaccaggactagtggctggctttgtggggagatggccacttcctgctgctgcctggctctcagcccccaagtccagcccatgcccccttggggccctcctccttatggtccccagcacagctgtgctggcacccccactgcaagcagctgccctctaatgccagcctcatagggacaggaggggccggagcacccagctccacaattgccagcccacagacttcctctcctctccctggagccacagatgtaccccgtatcccatgtacccggagccacagatgggcaaaccgagcctgggaggggggagccacacttcccacccctctacatctgcaggcacttttggggcagattcagcgtgtgcattgacaacccaggcaactcccggagtttaggaagcagcagtcctgggagttgattaaaagtcgcaatgcttctgctcaggaagacctgagatctgcgccgcaagcggccccaggagggtctggctcggctcctcaccccagaggcccctctcctgcagccagacacctctgcttggccccttcctgtcaccaacctcatcctcacatcacagagctgtgggaagaagtcctgtgtgtacagcagacccacactctaaccccacagctgttggcccgccatgcagctggggcctcagagaaagccacatggtcatcgcagccagggctagggtggggggaccggaggagcagtgcagcactggtcgggtaaatggaaatgtgggtgtgagccatacttggctgtctcattgggagatatctgtcaggtgcgacaaaacgagacaagggaaagaagaaggggtcagacagccgtgggcagagcatcaccaaatgtcccaggtcagggccaggcaatcagagaagcaggtcttgagagatctcagcagggatatgggacgtactaagaggatgacgaggcggagagggccccagtcccacccccagaccccagacacccaccttggcccctggctttggagctgggatctcctgctgcagcctggaccagggtgctgctgtccctctgctgccccctggtggacactgagagaaagcctgctgctcccggaggacctgtcccgtgggtacaaaaccactgtcctctggaagcctctggccttgctgcggcttcccttacaaatgatctttggtcttgggagtctagtcttaggcctccttcacgcccttgactgcagcatctccggcatctaggcctaccttgtcccctccagctggtggcagctcaggacactgcagagcctgacttgccaggagacctcgcaggtcctgggttcacagggctatttctaggctctggtggctccagccctgcctgcctaagagggtccctccacaatcagtgaggaagccagtctctggcccccaggtctgtcccccattctaccttagcagccgcagaacccactccccctcctctggagcccagaaattcacacatctcaccactttgtctcctgagcccagtccatgggcccagacctcagcctccatcttccccaaacccctgctcagtcccagcactgggccttagcccccctccagctccctcttgcctttcagccgtcttggtctcacttgtccttccagcccatctgtacccctcctccaggaagcccgctctgcctgccccacccatcccagctcacaccttctcttcctctcacttctcctggtgtccacctgatagcatgattgcaaactctttacctgacgatgtggctgcaaactgttgactggatgccagggtttcaaatggcagcatataggcgggtgttcaacctgcacacggtttttcaaaagaagtaaatggtaggttcattgccaagatttagaaatgaggagatttcatgtaataacctggattttctggcttctcttgaaaagcagaagccccaggccctggctgccgtcccacctggcaggagctgacacatagcccggcccggcccacccagcccacccctcgcctttctcatcctcgtttgtgccaccttcctggccagctgctgcagcccctgcagaaggagacttgcctctgagggactgcttagaacagtgcagcacctgggcccagcccaacccagtgccttgagcctttgttgaacagtgaagcccccagagagagaagcagaggcatgagtgccagaccctgagccgccagcctggtggtccgtgggggcgttaaggggcaacactgagcgactgagtgctctgctttgtcctttcaagggtggaacctggtgctggccctgatgccaccttcgattcctttgtttggggggcagccccctccagaccctgagccccaagaggccagtctggctgctcactctccccggcgtccccagccggtgcagtgcctgccccacaaggaccagcaggaagtgtacatgggatgaatatgagcaaagcgcacagggcattgggaaaagacaaggctgggcccctaccccaagcagtctgctcctctggattttagcctcaaagcagacacttagtagacaccaactgcgtacagctgcagcgctcagtaaggcagaggagaagagagaatcacgaggctggggcactgggagtgcaggtcaggggccggggccctgtggtcgtgtggctggccatggctagtcaaggccccctgcgcaggtctagccctctggcctcattcatagcctcatcccgtctcacctgggtgtctgctcccaaagactcttcctctcctagtaaccttcctgcctcgtggttctgatgaagacactctcctacctcaaccatccctggctccttctacctccagatgaaaatcccgccacctgacctggccttcaggatcctctatcatctctccctgaccagccccctccccttgacccatctctgcaccctcctcccgctttctaagtcaaacgtgttttgggtgttccccagactcaccctgcacgtcctgccactctgctttgctggtgcagttccctctacctgtatacccctccccctacccacaccttgaaagcctatttgtcctgcaagactcaacttaaatacctcttccccgtgcagctccctgacctccagctggcagccagtcatgccccctgcccccggggtgcccgatctgtatcaccttgatgcgtcctctgagcatgattagccccccatgagtctgagcactcctagaggccaagtgcctcggtggtgccttctctgtcaggaaggggcttgcacccaggaggtacaactctgcaaattagctgagtatgtgcacgagacagagctattgatgcagtccttgccttttgttgcttaccctacacagaagaggtgacagtgactcgacacccattaatgagtgcccaccataacccaggaacgaggtctgtaatcctgagagaaacaagattcctgctctcctgtcccatcaggcatctagccaggctgtgagtgtgtgagcacagatgcacgccaagactcagaggcagccctgaagcaagacctttgcagggtggggcagcgtgtcttgggttcctaggcatggtgcagacactgtggaggcaggaggtccggacaggaggagaggcccaggggacgtggcttcatggggctctctgtttcagctgctcacgaaagatgcgaagcagaggctgggctgccaggaggagggggctgcagaggtcaagagacaccccttcttcaggaacatgaacttcaagcgcttagaagccgggatgttggaccctcccttcgttccagacgtgagtagcctcccccagcccccagcagctcccttcacagggtacccagggctgcccccgagtgctgcctcacagtgagctggtgcagagtgtggggcacatcgtgtctttgtggggaccagggtcccctcccggccactcctcacctaagctgcagatgaacttcacgccaggcagtgcagaagaggcgtgggccagggagcccacattggctgtccagagacttgggcactttcccaggtctgggggtcctggacagattccttctaagcgtcagtttcctccctgtccagtgaaaccagtaacactcatgcctcccacctgcctgggagatttgagggtgaaatgagaactgaatggggaatgctttcaagagcattgacggccactacattcagttcatcttgaccagcatgcatgcatcgagcactactgttgacgccaggttctgggccaggcagaaacataagaggcccctcccccagcagctcacattgcagggagttgcatcttcccaggaggtccccaggtcccccagtcggtgtgtgaggcaagattccagctgaggtagaattgtccttgaaagtcccctacatggtctataaatcatgagctctcagctggatcagaggcccaagagatgcagaccaggcagaggctgggtgatctgtgcgggatacgtgctgtgattccggggcctgctctgtttaaagtcagggagtcagaagccaggaaggcctgctgtgcttcggctcctgccacgctcccgcggatgaccccttgctggcagggggactgggccggggactatggaggccgtgggagcagcagtgtgctgcaggcgaatgactgcatctccagagagctcatgtgcacctctcttcccaattccgtgtccaatggctttgcgtcggtagcttacagtagatctggtggtagcatctgcacagcagcaatttgcaaatgctacaaatcagggcctctgcgtccccctctcccagaaccagtggttatcacttaccagtaccgccctgagtggaggcaggtggggaccgtccttggaactctggcaccccctatacatggggattccctggtcctctgggacagaaggtggcttgggaagctgctaggtgcggatcagtgtccatggcaaccacaccacagaccccgtctggccagggatggcatcagtgtgatgggtaatcagggaatgctttttggagaaacacgggggccactgagaatataaagagtaggccgggcacggtggctcatgcctataatcccagcacttgggaaggctgaggcagtcgggttaggagttcgagaccagcctgaccaacgtggtgaaaccccatctctactaaaatacaaaattaaccaggcttgggggcacacacctataatcccagctacctgggaggctgaggcaggagaatcacttgaacccaggaggcagaggttgcagtgagctgagattgtaccactgcactccagcctgggcgacggagcgagactgcatctcaaaaaataaaaagtgaaagtcactgaatgctgcaaactcaatctgcagatgagcttgagcaggcagggggaggatggtaatcacagcattgctctcgaccctggctgcctggcgaaccgcctggggagcatgaacaacactcgccttggatgcagtccccagggagtctggggtaagactcgggcttcaggagttttgaaacctccccagctgattctagcgtagagccagggttgagagtcactattatgggaagtgccacatgcaaggagtgtgttgtttgttgtttgtttttagtgccaagggctttgggagtggccactccttggtgttccaggaaaccacatagtgttgagtgcatgaacatcacggttgtgccattgggctgatgtccgaaattggagaggatgtgggcatccagactgggggtgtggcaaaggtttggaacccgggtggccatccttgtggcctctgggctacctattgctatggtgacgggctgagattagtcatcgcattggagctattcctctaccttccagcacactccaggtcccgtgccaggccccaagggagatcccatggcacacaaaacagttggttgtttccagtctgaagaggagcaggggtgtcagcaaaaccccttaaatagaagtagaaatacgagtcacaagagaagagaacaggcagcctccgggaagatgggagagtagcggggcctccgtgcgtgcacccaggcatggctggagaaaagcgctccaggccctggaagcagcatgtggaaggaggcggctctgagggtcagagcgaccaactgtcctgctttgcctgggactgtcctgcttttagcactgaaagtcctgtgtcctggggagacagggacagttggtcaccctgggagtgaccctggccacttcgaatcagggcattaggaggatgaggtagcagagccccgcaaagcgcacagcctgacaaggtgcacagagcagcccaccggtgccctcctgcctcagccgtgtaccctgtggcccagggcctctgttcctggcatccgaggcctcaggtcagcaaaggttgcaggccctggagtgcgaagccgctgtgagctggggactttgccttttccccactggccctccccaggctgcacgccaacccccagtcatccctgccagccccccacagtcatcccgccccccacagtcttccctgccagccccccacagtcttccctgccagcccccccagtcgtccctgccagccccccacagtcatccctgccagccccccaccatcgtccctgccagccccccaccgtcgtccctgccagccccccacagtcatccatgccagccccccacagtcatcccatccccacaccactgtcggggctgctgccacattcctaaaccacgagcactgtgagtgacatcatctttttcacttccattgactctttttttaaaataaaaatcaatgtattttaaaaggaaacctttccaaggaaataatagccatgaaagaggggtttgggtgtgccaggtaactttctgttccattacagatttttaaaatacgctcatttcttaacattcctctgcaagccacccagggccagcttcgtgagcttgacctggcaccccctagggcaccctgggtccccacacctggctcagtgccctctgttgccatcttaaaattctaaatgtggaacatggaccctgcgttttcattctgcgctgagcatgtgaatgatgtggtcttgcttccagctaaaagtccgctgagttccacggtggcgtgcaccccgggctttgggaactagagaagggtcgcagctctgcaactggacacccctgcccgcacccctgcttccgtccacgtgcacttgggcccatggtttgctttgctggggacagcatggccttgagccttgagctggagaccagagcagactggaggggagagtcccagaaagtgccgagccctgagaccattgctagaaccttcctggcatggcggagcccatgctgagccggtgcactgattcacaaccttcgtattagccaaatgtcaggagactataagcaggaggtagcctctaccctccagtgacagatgtgtcaccaggtctggggatcccttcacaccccacctggggctgtctctataaaggcctcatctccagaggctctgggaagcctccccacaccaaccttgaactcttagagggcagggtccacccaggttcatctctgccctggcatagagcaggcccccagtgcacagctgagggacgagtaaggcaaaagatatgcctaccataataataccagctcccagttacgggcgccaggctcggtggccagcactgacagcagccccatcgcccaggtgcctcgttgtccccattttgccggtaaggaaacaggacataggcctcaggggatatgagacttccccaaagttcctaagccccacagctgggactctagcccacgtctgtccagtatgggtaagggagtgatggcaggaatgagccctgggctgggcacccaggtgccccgagctcctgtgtcaccccagccagggtccccgtcatggatctgagagagggctgcactgtcatctggaggggtcgcacaaaaaaaccacaggccatcatctgaggtggacaggaagcccagccaagccactggggccgacccctcccctggactcacctgcatctgagccacacaccctccagccactacccatagcagttctgggggtgtgtcctgggaagactcccttctgctccccaaaaccccaaggcctggctcggggccactggagccgcaggcgggacatatgtgtgaccggccctctgcccctggcagccccgcgctgtgtactgtaaggacgtgctggacatcgagcagttctccactgtgaagggcgtcaatctggaccacacagacgacgacttctactccaagttctccacgggctctgtgtccatcccatggcaaaacgaggtgagcagggcagaccacttgctttggtctgggtgggagggagggactgacgggtggaaggaggcgtcgggaatatgagtttggcggcaggaggctgagcgcatggtttctgttttctccatgaaggcagcacacaaaagctgtcagtggccaagtagggagctgtagccaccacgggccagtcattgacggggagcctcgcccagcccctgagacctggagggcgtgtggctcaggggcaggtgaggccaggggagggagccccagtggctttgctgctgggcttcctgactgccccagttgacggcctgtgttttgttttcacggcccctccagatgatagaaacagaatgctttaaggagctgaacgtgtttggacctaatggtaccctcccgccagatctgaacagaaaccaccctccggaaccgcccaagaaagggctgctccagagactcttcaagcggcaggtgagacacccatgcctggccagtcctggcatcagctccgagacccctggctcacttccatgggaaacgagaagacccacagtagagacccttggaaggcttggaagtctggggcagtagcagcttggaagggcaactgattatgtccaaggcccctgatacccacggcagctgatgggatccccggggagaagggcagggccagcccaaattcaccctccctctgggtttctccgccttgacactgttggcgcctggggccggttaattccttgtcacagtgccgtcctgtgcatcgcaagatgtggggcagcaagtttggcctccacccaccagatgcagcaacacgccatcccccagtcgtgagagcccataaaggagccagacattgctgaatgtcctcaggggcacagtcacccctgattgagagccactgccctctctggcccttacgaagcctcagtcatataaagactgaacatcataagcccagggagaactgggggtagaagctgaccccacagaaccttccggctcctgggatggcccccatccaatgctgtgccctctagctggcagccagaggagacagggcccttgggaaatgacacttagagcctggccctgggtaagggttggtgtgggccaatggaggaaatgcgggggaagggcccccacctcaccccacaccatgaaggtggccaccatacaccccgtcttggcctggcccctgaggaagctgtggcccagtgtgcccgccctggagcctgggaggctccctcacctagttctgctccttcctcctctccacaaagagccagctccaggatggacacactcagccagtgataatataaaaatacaacgcttcaatgcttccatcaagtaaaacggaagttccagaaagaatgacctctccctcccctgatggccaggcatgctaagaacaccctgggtcctagaaaaagaaattaccatggagtctcacagacccgggttcaaacccagccctgagacttcttggttatgtggcaacttacggaacctctcccacctcagtttgcctgcctgaaacatcaggatagaaatgcccattgcctagagccacgggtggcggcccacatatgggcaccagcacctgtgaagcaaacgcttcttgcctccctcctcctcccctctgcaacatgaagggcccagcactcacgggatgcagagggaaggcctgagcaatgggaacgaccgcccatctctcccaggccggccctcgctagagccctttgcatatgaggccccattgtatcctcccagccaccctgtgcggaagctgctcttctcccgtgttacaggagaggaaactgggagatggaattgcatgcccaaggccactctgcgagggaggggaagactgagaattccagcccaggcagcgtaaccccatgcctgcaggcttaaccaaggtggatattataggaggggccgcctccaccctgattggaggttctgttaattccatagctcttcccaggtacctgtgcctccaggggtggcccttgtacctggctctgaggggagactgcaaaaggcaataaaaagcaagggttggagcaggcagaggcagccccgacccatccccagggctcccaggactgacttctgttctctccaccccgtctcccccaaccccaaccccagcatcagaacaattccaagagttcgcccagctccaagaccagttttaaccaccacataaactcaaaccatgtcagctcgaactccaccggaagcagctagtttcggctctggcctccaagtccacagtggaaccagcccagacccttctccttagaagtggaagtagtggagcccctgctctggtggggctgccaggggagaccccgggagccggggaaggaggccgtccatcccgtcgacgtagaacctcgaggtttctcaaagaaatttccactcaggtctgttttccgaggcggccccggccggggtggattggatttgtctttggtgaacattgcaatagaaatccaattggatacgacaacttgcacgtattttaatagcgtcataactagaactgaattttgtctttatgatttttaaagaaaagttttgtaaatttctctactgtctcagtttacattttgtatatttgtatttaaatgaaagtgagactttgagggtgtatattttctgtgcagccactgttaagccatgtgttccaaggcattttagcggggagggggttatcaaaaaaaaaaaaatgtgactcaagacttccagagcctcaaatgagaaaatgtctttattaaatgtagaaagtgatccatacttcacctttgaaggattggttgtatttacccacatctatctctggagccatttcctcacattggtgtcacccttctgtcggcttggaacaatctgaattaaatgttccagacacacgtgggacttccccctcccagccagaatgtcctctcctggggccctcggagtcgcctaggctgagcccttctcctcgaggggcacgccgagccactgtcgcacccacctctgtctgctcttccttcaggaaggcggctggcacgcggatctaggtgtttgcagcctggtgggcgatgggcctctttccttctaagcaggtcctgactgctaaagccagtcatttgcaagaggtttgcattgggggatttttgctctatttttaacagaagcataggaccgtaaagatgtgtcatgaaaccccaagtgtcccaaagcctcggggcccacaggagcatcgggaagtgaggcagtgcgctcatcctgacggagcagcgtcgtgtctgtagcggggagggaggctggcccaggggcccggcatgttcctgaagcgttcacagggttttgagaccttcacagccccatcaatgtgctggcccatgtggcatggatggggtagtctctctgggcaaatgagaggcccaaggagagaccaagccaccaaagggctcaagacaaagtcactgttccttccccaggaaggtggggcagaggcaagatctatcggacatttcaaagtttcaggcaggagctcctagaggacttggtggctttgccagcccaggggcctctgaaggcagcccccagacccttgtagcagggctgtccatccccagggagcagctggccacctcctcctgcctcgaagaagtgaccaggggccaatctgctcccacctcccgtccaggacagggtgaacatttgacctcactgtcccctgcccggctgagtccctgatgtctgactgtgccacccagcagctgccagggtctctcaccatgtggaccctgccctagctgcagctgcacctcctgtcaaaagtgcagactcgcaggttccaccccaaaccacagaatgggaatgcctgggagcccacccctgctgtgggctctcagcggggctttgggggtgatcatcccaaacacatttctctggatgacgcaggcagcattggagcatgagccgtggggaggacagtcgtgagcacaccagctgtgaggcccggtttccatgcctaacccccggactctacccctgggtcctggggcgtaccgctaaaagggtcctggcctttgggactgatcattttgaggcccttttacaaagaaatgggggagaagaaatagctgggcttccctcaaatctttttaatgtgcagtatttttttgttcaagaccagctcttgttttatgaggctccttccattacctttcttgggctgaatgcaaaacaaatacagccacattcaagtcttccaaggaagtagaaaactctttgaatggtatc

SEQ ID NO: 244 - DNA, 42958 bp, Homo sapiens
  source 1..42958: mol_type = genomic DNA
agggggtgggggtgccgctgtctctgaggggtgggggtgccgctgtctctgaggggtgggggtgccgctctctctgagggggtgggggtgccgctttctctgagggggtgggggtgccgctctctctgagggggtgggggtgctgctctctccgaggggtggaatgccgctgtctctgaggggtgggggtgccgctctaaattggctccatatcatttgagtttagggttctggtgtttggtttcttcattctttactgcactcagatttaagccttacaaagggaaagcctctggccgtcacacgtaggacgcatgaaggtcactcgtggtgaggctgacatgctcacacattacaacagtagagagggaacatcctaagacagaggaactccagagatgagtgtctggagcgcttcagttcagctttaaaggccaggacgggccacacgtggctggcggcctcgttccagtggcggcacgtccttgggcgtctctaatgtctgcagctcaagggctggcacttttttaaatataaaaatgggtgttatttttatttttatttgtaaagtgatttttggtcttctgttgacattcggggtgatcctgttctgcgctgtgtacaatgtgagatcggtgcgttctcctgatgttttgccgtggcttggggattgtacacgggaccagctcacgtaatgcattgcctgtaacaatgtaataaaaagcctctttctttttggggtgggccttgtccttctgtcagctaaaatgggagctcatgagagaaggacgtcagggaaacggggttgagggtggtctcggtgcagagagaagggtgtcagggaaacggggggtgagggtggtcttggtgccagacgtagggaatggtgttgggagtggcccgagtgcctggcacagttgtctggttcattcatgtaacatgataatttttaaatcattaaaaaaattacctttcatacagataccatggaatactatgcagccataaagaggtatgagatcttgtcccctgcagggacacggatagagctggaagccattattctcagcaaactaacacaggagcagaaaaccagacaccacttgttctcacttgtaagtgggagcttctgatgagaacacatggacacaaggaggggaacatcacacactggggcccgttgggtcgggggcagggagagcatcaggaagaatagctaagggatgctggcttcatacctaggtgacaggatggtctgtgcagcacatcaccacggcacacgtttacctgtgcaacagacctgtacaccctccacctgtacccagaagttaaaagttgaagggagaaaatgatctttctaaagagaaatcacctactacgtgcagaagcctcacataaactgcacgctctgtcacagaaaggaatggaatattgacactgccgctgtaagacctcagtgaccactcactatgttaatttccagtcagctgagaaactgatcacaaacacaggtgttggcatactttattagatacaaacccacactcacattttatatattattgatctctcaggtaaaaataagttttctttaaaaagtatgacttcatagctaatcatcaaaagctggtagaatgacctgattttaaactgctcttttaaaaaattcacaactaaagtgtagtgatgtcaagtatttacaacactaaaaaggaaagcagtgaaagttggtccagtgtcaactctggaaaggggcatcgtcagtgtagagacgagcaacgcaggggacaggcacgctcacccctgtgccagcagccgggccctgcagctctcgcggagcttggcgacggtggccatggataagcttccaggttctgaaaatattttctggaaggcaaacagttagtttaaaaacaaacccaacaacccatttctacgttagctctcccagactggcaggcaggcagacaggcctcgtgtgaggtgagggaggagcagtccacatccaagggcttctggggtgacccacagattgtcaccatctcactcctgccctggggcctaggactgcagctttgctgctcagaaatgttaaatgaatcaaacggtggaagaaaaggccatctgcttccattagactttttttttttttttgagacagagtctcactctgttgcccaggctggagtgcagtggcgcgatctcggctcactgcaacctccgcctcccaggttcaagtgattctcgtgcctcagcctcccgagtaactgggactacataagcgtgagccaccacacctggctaatttttgtattttttagtagagacggggtttcaccgtgttggccaggctggtcttgaactcctgacctcaggtgatccacacgccttggcctcccaaagtgctgggactgcaggcgtgagccaccgcgcccggccaacatggtcttctctttgatgaaggcccagctgctgaaataccgcccacgtttgccatgctgcacccagagtggccccgagcctccactccctcttaggaaactactgactcccaggcctgagcctctcctggcgtcttggcttcctcagaaggcctgtcaggtacagctcccacaacgccctcatcaggacctgagtctatacggcctgcgccaggtccaggacccagtggggaggccgggcctcgggaagccacacttctggcaccacacacagcagatgagtacagccattaggaccaggagcagcgtccgcagtgccagggccaagaagacagggccgccatagacaggaaagccctcggaggccaggcgcagggggcagatgcaggacagagctggaggctcatcctgtgccctatgcccactggtgcccgtcctgtgcaccctccgggtggtcagagcagcccccgggctgcaggtgaggcggggccccctgggaggggactgagccacgtgcagccccacacacctgcataaacgtgtgacactccatcacgaaactccctttggttatctgcttaaacttatcgcaaatgtctggaacgctggtggcttccaaaatcaactcctggtgctgcttaattaaggtcagggccacccggaagataatcttcgagccttcgttaaacaaacagtcccagatccgaagcactgtctgcagagacatgggaacccggtgtcactccctggcggcccgcccgccccagggcccgagtgaggcgctcacctccacgggcaagatgtccacaaacaggcagatgaaccagcgggacaccagcagcgtccacagcacaccgagacgctccatcagggcccccacagccggcagcttcgcccgcaccagctccccgaggacctcctggtcggtcttcaggcccagcatggccgggctgtagtaatctgccaggcaatgtggagaaaagaccccgagacactcccgtcacctccacaagccccattcccctcagagccagacaaagacaacagggccaccctgggaggacccctcccaagagggagggacaaagttggagaggaagagtcggggtgaggcctgcagacacagggctcatggggagcgacccccacagccaggcctttcaggacgtccctgaggctggagggataggctggatgccgcctggctgggcatcagttaaaatctgcaggtggagggtggcgcggtggggggggggggggcgggagcgtggctcacacctgtaatcccagcactttgggaggccgaggcgggtggatcacctaaagtcaggagttcaagaccagcctggctgacatggctgaaaccccgtctctactaaaaatacaaaaattagccaggtgtggtggtgggcacctgtaaccccagctattcaggaggctgaggcaggagaatcgcttgaacctgggaggtggaggttgcagtgggccgagatcacaccactgcactccagtctgggccacagagcgagactctgtctcaaaaaaacaaacaaacaaaaatctgcaggtggaaaagagagtcccaaggaggtgcaggcacccccgtgttcctagcagaactatttacaacagccaagagatggaggcaacccacgtgtccgtcggcagacaagtggataaccaacatgtgaatgtccacacgacggaatattattcagccttagaaagggaggaagtcaggccacagcagcgggagggagggagtgacaggaccgagttcagtctgggaagatgaaacagctctggagagggcggcggcaatggttacacagagaggtaagcggcccttgtgccactgaactgcacaggggaaagacatgggtaagatggtacattctatgttctgtgtattttaccacagtagaaataaaacgtactcagataaatacttccaacagcttgcccttcttttgaatggacatttgtcttaccaaagcacttttgtgtttacctacgtaattttttaacttgttcatgtaatgagttatagtacatttttttttgagacggagtctcgctctgtcaccgaggctggaatgtagtggcatgatcttagctcactggaacctctctgcctcctgggttcaagcaattctcctgccttagcctcctgagtagctgggactacaggtgctcaccaccacgcccaagctaatttttgtattttcagtagagacaaagtttcaccatatttgccaggctggtctcgaactcctgacctcatgatctgcccgcctcggcctccaaaagtgctgggattacaggcgtgagccactgcgcccagtctgttcttgttaattcaatatcttggttaaaatagaaccatcacaaacactgacgcaacatcacggtcctgtcactgcttttcagagtgagcacacagtgaagtcggtttaatagtaaatactaacgcctctgaaggtgatttagccagagccaattcagtgagcaagcgccaaggattaaaaacgcctcccttccatatccttgttctgcacctgccactggggttctgagcgctttgctcatctttcaccttcttagctgagcacataccgttccagctggggagagaggggtgaagaaccatcaatcagtgcccaccctggttctgcaggtggcccccaaccccacaggtggtgtggcaggggggcttgagtgccaggcagcagggggtctgcagagacacacagcctgaccttggccccagacacagagaagcttagaacagcttccaaaaatagaggcgctgaactcattccctaaactccaccaggctgagccggccaccaaggggaggattaaattaaagccgcagcttctttcccttccttgaacatcgagggcaaggtggttcctcccaggcccagccggcgcagcggctgctccctgcagaaggggctcatccctcaggctgaggcgcaggcactgatgttcccaggtgaccacctcatctggtctcgcgccgctatccccccaggctccttgtccctgtccttctggggacatccacgcctctgcaaaccacccaacactgtgcattcatcaccgaggctccgggacggcacctgcctggccaggacgggggcacagctctgacactcccctgcacacccctcagggtctgcggtcagacgtgggcaggggccatacaaagacggtggccacaggcgtctgcacatggctgtggcttcctcctacttcatttccactctgcagatcttcctctgagagcaggtgtgagtcccaagaccactctctcacatgcactcacaggccagttctccaccctggtgctttcaattagaaaacaaaaggtgtgagttgaagactcaaacaattttttgagacagggtctcactctgtcgcccaagctggagtgcagtggtgctatcacagctcactgcagcctcaacctcctgggctcaagtgatccccctgcctcagcctcctgcgtagctgggaccacaggtgtgcaccaccacacccagctaatttttaaatattttttgtagagagaaggttttaccatgttgcccaggctggtctagaattcctgggcagccaaaacattaaatggtctgtgcagccttctgtgaaaggagtttccattcccaggggcgtctccctctccctttccctaccaggaaagacacccctgaaatccacatctcaaaccttacaaagcagccttgtggactaaattttcctgattcccttccccgcccagaagcctgatgcatctcaaaccttacaaagcagcctgtggactaaattctcctggttcccttccctgcccagaagcctgaaggtagcaggctgcccaggatggtgaatgcgcccaggcgccagccacgctttatgtcccccgatccgggtgctctccagggtgtgcgtgacacgtgttgataagcgtctttttctcactcattattcagtcttcggccagtcccatgtacagagcccagctgggggacctaaggtgtacaggggaagacctttcttcctccctggccaccgacagttaaggaaggtataatccacgcataacacactctgcagtgccacggagacattgggagagagcttaaaaattaccgcattggccgggtgcagtggctcacacctgtaatcgcagcactttgggaggctgagacgggtagatcacctgaggtcagaagtttgagactagccgggccaacatggtgaaaacccatctctactaaaaatacaaaaattagctgggcgtggtggccagcacctgtaatcccagctactcagctactcaggaggctgagcaggagaattgcttgacccgggagatgaaggttgcagtgagccgagatcgtgccactgcactccagcctgggcaacagagtgaaactccatctcaaaaaataaaaaataaaaataaaaataaattactgcaagatgtgtggaaattcccaccacgtgatgtcaaatgaaaaagatgggatgcgggactacatacaaagcactccaagtgtttctaaaatagctgccccatgtgcatagaaaagacgacccaggcttgcaccaaaaataccatttgtggggctcacccccactgataggggtagtgggcggttccgatctttatctagacttctccctcttcttcagtattaacacaatggaagtgactcataaaagataatcagaaaatggttacgtgaatgagataatggcgtcaatgccaaggagggagctgggcgcccaggtgggcaggggatgtagctgatgcaagtgtgcatggaaaaccaggtgtgtgcatgggagcccgggtgcgtgcatgggagcccaggtgcgtacatggaaacccaggtgcctgcatggaaacccgggtgcgtgcatggaaacccgggtgcgtgcatggaaacccgggtgtgtgcatggaaacccgggtgtgtgcatggaaacccaggagtgtgcatggaaactcaggtgcgtgcatgggagcccaggtgcgtggatggaaacccagatgtgtgcatgggagcccaggtgcgtggatggaaacccgggtgtgtgcatggaaacccaggtgtgtgcatgggagcccaggtgtgtgcgtggaaactcaggtgcgtgcatggagcccaggtgcgtggatggaaacccaggtgtgtgcatgggagcccaggtgtgtggaaggaaacccaggtgtgtgcatggaagcccaggtgtgtgcatggaaacccgggtgtgtgcatgggagcccgggtgtgtgcatgggagcccgggtgtgtgcataaaaacccaggtgtgtgcatgggagcccaggtgtgtgcatgggagcccaggtgtgtgcatggaaacccaggtgtgtgcatgggagcccaggtgtgtgcatgggagcccaggtgtgtgcatggaaacccaggtgtgtgcatgggagcccaggtgtgtgcatgggagcccaggtgtgtgcatgggagcccaggtgtgtgcatggaaacccaggtgtgtgcatgggagcccaggtgtgtgcatggaaacccgggtgtgtgcatggaaacccaggtgtgtgcatgggagcccaggtgtgtgcgtggaaactcaggtgcgtgcatggagcccaggtgcgtggatggaaacccaggtgtgtgcatgggagcccaggtgtgtggaaggaaacccaggtgtgtgcatggaagcccaggtgtgtgcatggaaacccgggtgtgtgcatgggagcccgggtgtgtgcatgggagcccaggtgtgtgcatggaaaaccaggtgtgtgcatgggagcccagtgtgtgcatgggagcccaggcgtgtgcatggaaagccaggtgtgtgcattggagcacaggtgtgtgcatgggagcccaggtgcgtggatggaaacccaggtgtgtgcacgggagcccaggtgtgtgcatgggagcccgggtgtgtgcacgaaagcctaggtgtgtgcatgggaacccgggtgtgtgcatggaaaccggtcgcagctctcctgtgaagaagcacctgcccagccccggcttccatccagataggaggaatccacctcttcccaacagacatggtctttgctcctcatctgagccacaggattgaccatggcagagaccaggtgcatgacctgggggttgggggctcaggggcggctgctaccaggatggccttgcctctgtgagtgaccacagctgcggggctgggataccaggaggcacgggctgcagcatgggaggcggcccaggaggagatgccaagaaggcacagcaaggacagccagtgcaggagccacccgggtgcccacccagcagctgcgcacccccactgcccgagccagcctctctgcatctcttttcctgagaagacttcggcgtggcacagcccttacagggcgtgagccttctcagacgcagctcaggttacagcaaggaagctgcaaggctggttttgctgtttggtttacttttttttttttttttttttttttttagacagagtctcactctgtcacccaggctggagtgcagtggtataatctcggctcactgcaacctccgcctcccaggttaaagcgattctcctgcctcagcctcctgagtagctgggatcacaggcatccgacaccaggcccggctaattttttgtatttttagtagagacggggtttcatcatgttggccaggctggtctcgaattcctgacctcaggcgatccacccacctcggcctcccaaagtgctgagattacaggcgtgacccaccatgcctagccttttgtttacatttaaaaaaaggtattttgggccgggtgccatgtcttatgcctgtaatcccagcactctgggaggccgaggtgggaggattgcttgagcccaggagttccagaccagcctgggcaacaaaataaaaaataaattttaaaaaacctagccatgaaatagcaacaataagaactgcacaaagaacccccacatccccatcagattccctgactgtgaacatttcagcacatttgctcccccgtcacctccctatctgcacgcacaccacacacaggtacacacgtgcacacgcacaccacacacaggtacacacgtgcacacacacaccacacgtgcacacgcacgccacacacaggtacacacgtgcacacgcacgccacacacaggtacacacgtgcacacgcacaccacacacgcacacgcacgccacacacaggtacacacgtgcacacgcacaccacacaggcacacacgtgcacacgcacacctgcctccatcccctggactgtgtgaggcagagctgcacactcactgccccatcgcaccaaatactccagggcgtgcttccccaaacaacagtatggccacctcgacactagtcaacaccgacaccacctcccagttcccagatcccacccgacggtcttcaagcactccgtaaggacagttcccacaaacacatcccgaggaatccacccaagaacaagcttcaggagccacactgacaaaggcccagtgacacacattacgccagagtttcctggagaaacaggcgggtccaggtctggggcagaaggcccatggggtgagcccagagtagcctgtcctgcagactcgaggaagccgtcggcgccacattcacatccacaggactcaggggccaaccagaagaggctcccgctggccacagatgggccaacctgagcttcaagaaggataaaaaccctccagtgtgtgcagcccaggagtccacagttgacatggacacacagcactgaccaaccgccttctagtgaccagacgccaatttattattttgagggcggggacataaagccaagggaccagcatttatcccgcctcttctaatggactcatgacatcaggtcttgattcagccaccagtctgcaggaaatttcgaggagaggggcccagccggagggcgctggggtatcctcatcaggaaagcctgaggcgccgagctcggagggttggcttacccaagtgcttggacaggaagagaaagaggtgcagattcccacgcacagaccgaaggggcccaagggttcctcacgtgtaacccggggcaatgctaagacacacagcccaggtgcccatgcacatggcgaaccacagaaaacagcacagagcagtgtggtcacagtcaggaagatgggatccagtcacaacctttgccaaactcacgaatgcacccatcaccactgcaccgtacgcttgaaatggagggactgtgggataagtggatttcacctcaacaaagatttctcttcagtgcctgtgcttttattgttttattttatttatttatttttttgagatagggtcttgctctgtcacccaggctggagagcagtggcgtgatctcggctcactgcaacctccacctcccaggctcagacaattctcgtgcctcagcctcccgagcagctgggattacaggtgtgcaccaccacgcccagctaatttttgtatttttagtagagatggggttttgccatgttgtccaggctgctcttgagcaatctgcctgcctaggactcccaaaatgctgggattacaggcgagagccaccacgcccatctcagtgcctgtactttatttatttatttatttatttatttatttatttagtgtgtgtgtgtgtgtgtgtgtgtgtgtgtgtgtgtccgaggctggagtgcagtagcgcgatcttggttcactgcagcctccaccttccaggttcaagcaactctcctgcctcagcctcctgagtagctgggattataggtgtgcgccaccatgcctggctaatttttgtatttttagtagggatgaggtttcgccatactggccaagctggtcccgaactcctgaccccaggtgatctgcccacctcagcctcccaaagtgctgggattacaggggtgagccgccgcgcctggcccatgcctgtgcatttagaaacatgtaaagttttctcaaacacaggggacatcttgagacagataacatgagaaactctctgtagggtccggaggaccgagagggagggacctgcttccccttcgtccccaccctgcactgccacgacagcctcccgcccaccctgcactgctacgacagcctcccgctggcctgtgacttttgcacctagaagctgactagttaataaaatttaagtcagctgcaaagataaaggaatcgagaaaaacagaaaataagaaccgcaaatgcttacctaggtattaacttagttcagagtgataaatcagtcgtgcgcggaaacagtttcatcctgcactgaaccactcttgcggattctcaatttgagattataaataagcaataaagttgtcctagggttagaatgagaaactggtggaaatcctcaatttgctagacagaacaaatctttaaacagaaaaaaaaagcacgtaatccttcaggcaaaggaaagactttctaactggggtgggcagagcagggagggcccctctggcctcgggttcaccagggagagccgtgagcagcaacagtgggctcatcagacagccgcaaacatgagcaccacagcccggcagtggaggactgatggccttttcctctttaacttctgtaagtttggcttggctaattcttttcttttgagatggacacttgctctgtcgcccaggctggatggagtgcagtggcgcgatctcggctcactgcaagctccgcctcccgggttcacgccattcttctgcctcagcctcccgagtagctgggactacaggtgcccgccaccacgcccggctaattttttgtatttttagtagacacggggtttcactgtgttagccaggatggtctcgatctcctgacctcgcgatccgcctgcctcagcctcccagagtgctgggattacaggcatgagcaccatgcctggccaagtttgtctaattcttaaacctgtcagttttataatgctaaaaaggtttatttttaatatttatggatacctaataggtgtacatattaatggtgtccatgtgatattttgatacaggcattcaatgtgtcatgatcagacctgggtcactggaggctggccgtggtggtgtgtgcctgtaatcccagctacttgggaggctgaggcaggagaatcgcttgaacccaggaggcggaggttgcagtgagccgagatcatgccattgcactccagcctgagagacagagcgggactctgtctcacaaaaaacaaaaaacaaaaacctgggtaacggatccacccacatttaccatttctttgtgttgggaacattccaaatcttctcttctagctattttgaaatacatgttactgttacctatagtgggtctgacctactaacacacggtctcacttcttctaactgtaggtctgtaaccattaacgagcctctctatccccctcccttcctggcctctggtaactgcccttctactctctgcctccatgagtttcatttttatttagcgcccacatgtgggtgggaacatgtgatatctgtctctgcacccggcttatttcacttaacacagtgtcctctggttccctccatgctgctgaaatgacgggattttttttttttctttttgagatggagtcttgctgttgtcgcccaggctggagcgtagtggtacaaactcagctcactgcagcctcaacctcctaggttcaagcgattctcctgcctcagcctcctgagtagctggaattatagatgcccgccaccacgcctggctactttttgtattttagtagagaaagggtttcaccgtgttgaccaggctggtctgaaactcctgacctcaggtgatccacccgcctcggcctcacaaagtgctgggattacaggcgacagccaccacgcctggccaggatctcattctttctaaggctgaacagcactctgctgagtgtgtgcaccccactttccttatccatccatctgcggtcagacacctgggttgattctatcctggctgctgggagcagtgccgtggcgaacgctggaggacagatgcccttcaacagagtaacttcctttcttctggaaacacacccagcagtgggaataaggtagtttttttttttttttttaaggcaaaataggtactgtaaaatttaattaaaaaacaaacaaacatgcaaagggttcctcaccctctaggtgtaagattcagtcccaagtcctcctctgaaagcaaagtgccctcggtgtgccgagcactaggaaaggccaacttggactcagcaccaggccaggattctccactgctgcctgcagacaccatcgctgggagactgaagaacaggggggctctggccgtggttgggggcgaggtgaggggggctggcttcagagccacccgctggggtggccctgcctacacctacactagctgtgcaggacaccagccccttgccctgggccctacctctgcactgggaacacgagaccccacctgatgtcctgaagccctgaggacagcggacacatgaactgccctagaacggtaccaaccatccctccagacagcggacgcacacaggccaagtgcccgcctggcgctcagccctagaactgtaccaaccatccctccagacagcagatgcgtgagggtgagagggctctgggaaaacccaccgcacttcccaagtgccctgtacaaatttccagattccagaaaaggtgcagagaagctaccaggaaataatgtttctgatgtgcttatgctgttacatttcacaagtaaaaagctaacagacctgttacatgtcaactaaacaaactgaggccaggcgtggtggctcaagcctgtaatcccggcactttggaaggctgaggtgggaggatcatttgagcccaagagttcgagaccagcctgggcaattcaagaagaccctgtctgtactcaaaataaaaaaattagccgggcatggtggtgcacacctgcagtccctgctagttgggaggctgaggtgggaggatcacttgaacccaggaggtcaaaggctgcagtgagctgtgatggtgccactgtactccagcctggcaacagtgagatcctgtatccaataaataataaataaataaactttagaagtagctaagatctccggctaaatacttggtagaaaactgagcaattacttaaatttcaagatcccactaaattagatcaactgtcttgaattcagcaatttgttagcatacaactcaattaaactttatctgctataactaggagaccctgaatggaaaagcggcaatgacttttttccctaatatatagagttcttttaaaaaaaagtagcttatggcgaaacctggtatcaagaggcctcggattgtacagcgtgctttctgcgcaaccctctcacggaataagctcacacttaaggtgcaaggcctgaggcccacaggtctggtgagcctggccgcctggtgactcagcgcaatctgatcccaaaacagctgttcctgaccccagagaccagcctcctgtgacaaagccagcccaacgggggcgtggcccaggccacatgagcaccaccctcaggacaggtgacctcagggaaccccactcgggaggacgcaggaaacgcacctccgatgtggcaattgcggcgccaagagcctccctccacccacctctgctcacggggctgagccgtggtccccacagaatgtgccttgtcggtccacatctcagccagtcctcccagccagagctgaggtatttctatgtcgagttgttaaaacctgacctgcttccctatttttcagaggaaaccaggtcaaacccatctttcaggatgtagagcgctaattcagggctgcaccgactcatgactgacgcagtcttccgagacagggccccctccaccctcagtcacgcggcagggcccggtcaacctcctcctctgaggaggcccgggacccatcgcccgcccggggagcggcgtctgcaccttcttcctgcgtcctttccatgccttgttgggatggtgattgatggccatcatcttcatgggctctacaagaggccgcgggtgtggcaggtgttctgggctgagaactcggggtgtggggcatctgcgtgtggatggtcacaggccacggggagcgtgtcctcaggtcacttcctaactgaattgggattagaggcatttgctggtaaaagtaactcccttaattggaccccctctaagtgactcatgagcgatgaaccaaacagtccgcaacaacagtggtgggggaaaccggggaggcagatgtggggtgcaggccttgggcggggaggcctgagatgggatctcagcccggggatgggatctcagccttgctggcggactgtgtatgagctacttaatccccaccagtctcggcctcctccaaggaaaaagacgacaatgtgcatgacattttcaatacccagacggactcgcaccccgtggtcactgccccacggcagggagctttcgttttgtgtcacgggcctggaggcctcggtggctgcagaaggctccactccaaccccagtctttccatttccaccttcatgctcaccagggagctcagccatgggttcacaggtctgctggccattccggtctctattttgtaaattgcctgtcaggcacattcttcacctgatgttctgctgagctgtttctttttctgcttagattttttttttttttttttttttgagacggagcttcactcttgttgcccaagctggagtgcaatggtgcagtctcggctcactgcaacctctgcctcccaggtttaagtgattctcctgcctcagcctcccaagtagctgggattacaggtgcactgcaccatgcccagctaatttttgtatttttagtagagacagagttttaccatgttgaccaggctggtctcgaactcctgaccttaggtgatccacccacctcagcctcccaaagtgctgggactacaggcatgagccaccacaccctggctttctgcttagatttttagaaattcacacacagtccagacactaaccctttgttaattatatggatcaaagatactttctcaaaccagcagcttatctttttactttgcttatgatgtctcttaccaaaattagtttttaaattttcatgtaattaaaattatcaatgccttttatactttttgaattatgttcaagaacttctcccctactcccacatgacacgactgttctgtattttgttctctgagtttcaaagttttacttttttacatgagtcttaaatccatctggaaatgaaataagggtttaattttgttttcttccatacagtcaactgtcactgaattatgttttaaacagtctttttcccattaattgatatatctcacaaaagacattcccataaattaatagatccacagactggttgatttctatctggcttcgcaattttgttccattggtctgtttatccattcataacctaataccacaccattttaattattagagcattataatatatctctagtgttcttctttcaagccttcttggcttggctttgcccttgattattccatatgattaagccatccttggatttctggaaaaaactatcttcaaactaaaaaaatacttcatagtcacctgtagattcaagttgctaacattaataattaacaattacatacttctattcatcagtgagattagtctgtatggtgtgaaggctatactagcttcataacatgaagtgatgagagtttcttttttttattttctgcaagattgattaattaatcagttatttagacagggtcttgctctgtcacccaggctgcagtgcagtggcactaccacagctcactgcagcctcgacctccttagctcaagtgatcctcccacctcagcctcctgggtagctgggaccgcaggcatgcaccacccaaagtgctacgattacaggtatgagccacagatttatttttaaaaaacaggaattaatcacagccctttgtgaggccaaggcaggaggactacttgaggccaggtgttcaaggccagcctgggcaacatagcaagaacctgtctctacaaataaaaaaaaaaaaatcaactaggcatggtggtgcccacctgtggtcccagctactcagaagactgaggtgggaggatcacttgagctaaggaggtcgaggctgcagtgagccatgatcacaccactgcactccagcctgggtgacagactgagaccctgtctctaaaaaatacaataaaatggccaggcgctgtagttcacgcctgtaatcccagcacttttgggaggccaaggtgggcggatcacctgaggtcaggagtttgagaccagcctggccaacatggtgaaaccccgtccttactacaaatacaaaaattagccgggcgtggtggcgggcgcctgtagtcccagctactcaggaggctgaggcaggagaatggcgtgaacccgggaggcggagcttgcagtgagccgagattgcgccactgcactccagcctgggcgacagagtgagactctgtcttgaaaaaattaaataaataaaacaataaaataaaaacattaaaaagcaggagttacctgttccttcacagtttgatagcagtaaaaacccagtgtgtccatgcacacacccatcagatgttctattttctctctcaagtcaacttcgttaggctgtttttttctcagaattatccatttctgtctcttcatttttttcttttgattcttaaaaatctctacaaatcttcaaattacagcaccttttcatttctactatatcttatccttttttttttttctttctgagataagagtctcactctgtcgcccaggctggagtgcagtggtgtgatcttggctcactacagcctgttctaaactcacgaatgcaccaatcacgactgcaccatacgcttgaaatgggggaactgtgggatatgtggattatacctcaacaaagatttctcttcagtgtctgtgcttttatgtatgtgtgtatgtatgtatgtttgtatatatttatttgagacagggtcttgtcctgttgcccaggcctgagtgcagtggtgtgatctcggctttctgcaacctctgtcccctgggttcaagcaattctcctgcttcagcctcccaagtagctgggactacaggcacccgccaccacgcccagctaatttttgtatttttagtagagatggggtttcaccatgttggtcaggctggtctcgaactcctgacgtcaggtgatcctcttgcctcagcctcccaaagtgctgggattacaggcgtgagccaccgtgcccagctacatttttttcttatcagtcttaccagaggtttgtctatttatcagttttcccaaagaaccagatttttgtctgagtttatcttttcttctgtttctctgtttctgtcgctaattttcagtccttcatgtgtatgtttatatcggtctataaaaactctggaaatacatacatcagactgatgataacagttacctctgagtaggagataaatggggatgtgccagtgaaggcgggtcgtcacttttgtttaaatttttatttttagagatgggaggggtctcactttattgcccaggctggtctcgaacttctgggctcaagtgatcctctcaccttgtggcctcccagatgctgggattatatgtgagctactctgcccggccctgtttttttttgagatggagtctcgctccgtcttcccacactggagtgtagtggtgtgatctagctcactgcaacctcagcctccctcaagctgattcttgtgcctcagcctcctaagtagctgggattacaggcatctgccaccacacctgtctaatttttgtatttttagtggaggtggggttttgccatgttggccaggctggtcttgaactcccctaaatgcctgcctcggtcttgcaaagtgctaggattacaggcgtgagccacggctcctggctgtcactttttattctataaaaagtactgttgggaggccgaggcaggcggatcacgaggtcaggagatcgagaccatcctggctaacacggtgaaaccccatctctactaaaaatacaaaaaaaaattggccaggcgtagtggcgggcgcctgtagtcccagctactcgggaggctgaggcaggagaatggcgtgaacctgggaggcggagcttgcagtgagccattgtgccactgcactccagcctgggcgacagagcgagactcagtctcaaaaaaaaaaaagtactgtattttttgaacttctgaaatgagaatatatctgtgtatttcttgtataacttaaaagcagcaattaagagcaggataacagtggcactgaaacgacctagtttgggtaactataacttcgaggatggattttagagcaggatgactgtggcactgaaacgacctacttcggtcactgtaacttagagaaggacatatatttgcctcttttctctgccgctgggagagctctgccgggatcggaataacccccttttcctcccatgatcctaacagtttagtttttgtactttcttttctttttgaatccagacctatttgcattgcagtttcgttcaacttaatctcataatgaatatcggaagtgacgtcgtacggactgaaaacgcatctgtccatcacaccagcacggcggggcctgctcctgccctctaggttggtgctgagccctccgacctgagctctcacctgctgctgcttgaggtctgccctccacaaagacaggaactcgtgtgtgctcaccgatgtttcccacacccctgaacggcgcccagaacacgataggttttcaacaatatgtggtgaaaagaactgcatggcccacggctgtgaagattcgccatgatttgcactcagacataaccgaagcaggctgtgagcccgtttccatgtcctaccaatcccacatttggatgtctcctaactccatctgcctctaatttcaccattccacctggtccaggtgttcaccgaactgagctgagacagccggcatcctttccgccctgcgaggttctgcctgctgctgctgctgctgcactgggtccctgggccccagccgggtcaacagctcttcccactcccgggagctctgtggggttcccttcctctggggcggctccgtcaggctggtctctggcatcctcatttctgcgcccttgggttgagggtggcgctgattcctccctgcccttaatgatgcacttgagctttgccccatccgtgaggacacacactatggtctgtgagtcacacagccaggatctgaaccaggctctgccatgtacagcggtggtcaggccagcacgcaaattctcccggccttcggtgtcctcaccctggaaatggggtgggtgactgtgtccgtgtggtgtggctgttctgaggacaagcgcagctcagcaggaaactgacacatgccgtgtgctcaccaggcaggagctggagccacacacccccaggctccaaacactggggactggcccggctgcccctcacgtctcctctgccctgcaggatgagcacgcagcccccttgacccagcaccacagccaggctggggaagggcagagtggtctcagccccaggccctgcccacccgactgatcctcagcttctcttcccaagtgacttgagcctgcagctcatcgtctgcactggccttcaccataacccgtggataacttatccactaataaatacactttaattattaaataattaaacattaataaatagaaaagtggaaaggtttgaaaagaatggttttcaccttaaaaagtaagtaattacttaaaaagcaaccatggatatatatagcgcaattattatgctcttactagtattcacaaactcagtacaaatacatacataaaaccaagatagcctctcagagattctgtgatcaatacaaaccacaccgtggccctcaataggcacagaagttaccaactgaggaaggggtgagccaaccacacagccccagctgcccacaagggctaagagacggcaaaaggccctctgccgtcccaggagcaagcagttgctgcagccggaccctggccactcacatgggtttctccttttcaactcaatttcaaagaaatttttttactgcaaaaagatttttggccaggcatggtggctcatgcctgtaatcccagcactttgggaggccaaggcgggtggatcacctgaggtcagaagtttgagaccagcctgaccaacatggtgaaactccatctctactaaaaatacaaaattagccgggtgtggtggcacacacctacaatcccagctacttgggaggctgaggcaggagaatcacttgaacccgggaggcagaggttccagtcagccaagatcacaccactgcactccagcctgggcatcagagcgagactccgtctcaaaaaaaaaaaaaaaaaaaaaaacggtttgtaacctcatctcccaaacaattcaaccatgttttaattaaattttgatttctcagcggaatcattttggcagcaccagaaacaggacagttcgggcataccgcaggaattttcaacatacctggtagtattcttccaacaagagcatctaacagccaaaaagattcttcttcattatttgttataagaatcagatatcctgctataaaattcattccctgaaattagaaaaatgagaaacaaattcacattgagttttaagcccccatttgattctgcaatcattcggctacaaactacccagtttccatttctcttgcttctccttaaaacctgcataattgcagaatgatcctttagtagaactctagagtcactaaatacctaccgtctagtaatgtgtttagtcaagcttacgtgaaaagtaaaagcaaaaggaaacagtttaaagaaatcctgaatactaaaatcaaagactcttccactaatggtaaccttgtgataaaagaacataacttaccattgctttctaaagaaattactatatatcaacagcatgaaactctctgccagagagaaaattataccaatgaccacattttataaaaccgtaaggaacatgtgctgacacgcgggtgttaggagaatttcgtggtggagacccttttgggaaatccacgtgcacacctgccaaagggcgggtgctgcctccaacatcacgtatgtgaccctctccatcgagggcagccccagaccctgggggcttcgcagccgtgagtcagcgccatttccaggtgactgcgttttacacgactgaaattctcttctttgtcactcatttgtaatttctaaagtaagtatttctctagtaataagggaaaagaatccagcttctgccagcccacaagatcaattcacgtgatcggaagtgcggaggggcagctgcagagagcgatgctggcagcagcgcggcggcttcagtcacacagggatgtggcgctgttcacccggagccaaagcactggaggacgggcacgcagccttacacgtcccttggcctggacctccccttaaaaacagaccctaagagtttcactcaaaaagcaaaagtaaccagtgcagagaagatcatgttccagaagatgacgatggaagctctgggaagaaccgactgcttcgagctgatgacggaaatgctgggaagacctctgtggccaaaagcagacccaggaggacttttgtggccgagagtggacccgagaggacctctgcggctgagcagacctgggaagacatctgtggccgagagcagacccgggaggacctctgcggctgagcagacctgggaagacatctgtggccgagaacagacccgggaggacctctgtggacaagagcagacccgggaggacctctgtgcctgacagtggacccgggaggacctctgtggctgagagcagacccgggaggacctctgtggctgagaacagacccgggaggacctctgtggccgagagcagatccgggaggacctctgtggctgagcggatctgggaggacctctgtggcagagagcagacccgggaggacctctgtggccgagagcggacccaggaggacctctgtggctgagagcggacctgggaggacctctgtggctgagcagacctgggaagacatctgtggccgagaacagacccaggaggacctctgtggacaagagcagacccgggaggacctctgtgcctgacagtggacccgggaggacctctgtggcaaagagcagacccgggaggacctctgtggcaaagagcagacccaggaggacctctgtggccgagaacagacccgggaggacctctgtgcctgacagtggacccgggaggacctctgtggctgagagcggacctgggaggacctctgtggctgagcggatctgggaggacctctgtggcagagagcagacccgggaggacctctgtggctgagagcggacccgggaggacctctgtggctgagagcggacctgggaggacctctgtggcaaagagcagacccgggaggacctctgtggacaagagcagacccgggaggacctctgtggacaagagcagacccgggaggacctctgtgcctgacagtggacccgggaggacctctgtggctgagagcggacctgggaggacctctgtggctgagcggatctgggaggacctctgtggcagagagcagacccgggaggacctctgtggctgagagcggacccgggaggacctctgtggctgagagcggacctgggaggacctctgtggctgagcggatctgggaggacctctgtggcagagagcagacccgggaggacctctgtggcagagagcagacccgggaggacctctgtggcagagagcagacccgggaggacctctgtggcagagagcagacccaggaggacctctgtggccgagagcagacccaggaggacctctgtggctgagagcggacctgggaggacctctgtggctgagagcagacccgggaggacctctgtggctgagcggatctgggaggacctctgtggcagagagcagacccgggaggacctctgtggccaagaacagatccgggaggacctctgaagccgagagcagacccgggaggacctctgtggctgacagtggacccgggaggacctctgtggctgagagcagacccaggaggatctctgtggccgagagcagacctgggaggacctctgtggccgagagcggacccaggagcacctctgtggctgagcggatccgggaggacctctgtggcagagagcagacccaggaggacctctgtggctgagaacagacccgggaggacctctgtggctgagagcggacctgggaggacctctgtggctgagcagatctgggaggacctctgtggcagagagcagacccgggaggacctctgtggcagagagcagacccgggaggacctctgtggccaagaacagatccgggaggacctctgaagccgagagcagacccgggaggacctctgtggctgagcggatctgggaggacctctgtggcagagagcagacccgggaggacctctgtggccaagaacagatccgggaggacctctgaagccgagagcagacccgggaggacctctgtggccaagaacggacctgggaggacctctgaggccgagagcggacccgggaggacctctgtggccgagagcagacctgggaggacctgtgtggctgagcggacctgggaggacctgtctggccgagtggacccgggaggatctccgtggctgagaatggacccctttgagtggacagtgctactggacctgggagagggcgaccatgtggacagtgtggacacatggaaatgcaggtgggtgatcatcgtggagaaaaagcagaacatagccaggcacagtgggggatcccagcactgtgagaggtagaggcaggaggatcgcctgagctcaggagttcaagaccagcctgggcaatgtggcaaaaccccgatctctacaaaacatacaaaaattactcgagcgtggtggcgcacctgtggtcccagctactcaggaggccaaggtgggaaaatcgcttgagcaaaggaggttgaggctgcagtgagccgagatcacgccactgcactccagcctgggtgacagagcgagaccgtgtgcactgtgtaactctacacatatgccacacattgaactgtgttgcccgccccaaaattcatctgttgaagtcctaacccctagtacctcagattgggaccttgtttgggaaaaagactgttgcagatgtcattacggatggggtcatggaggagttggtgggccctatccaagcctggtgtccttgtcttacgtggagctttagacacaggcatgcacaggagaacgcacatggagatggaggcagagattggagtagtgatgccacccgccgaggggcacccaggactgccaggaaccagcagaaccagggcaaggcctgggacagtccgtccgtcacagcctcagaaagaacccgccccgcagacgccgcgacctcacctgccccgcagatgccgcgacctctgatgcacagcttccagagctgagagagaattcgtttccactgtttaccaggctgtggcatttccttaggggcccacagcaagctaacaggtgcacatctccgcacacacatgtacgtatgtgcctgtaggttccaaaagccagctgtgctctggcattctgttagtatgtaacattgtgtttgtgccttgttttttaagaatagagatggggtcttgctctattgcccaggctggtcttgaactcttggcctcaagcaaacaatcctcctgccttgacctcccaaagtgcatgattataggcaagggccacccaggtgggtggtgtttttttttgtttgtttctcggtttttttcagacagggtcttgctctgttgcccaggctggagtgtagtggtgccaacatggctcactgcaggcttgacctcccagacccaaacgaccctctcacctcagcccctcgagcagccgggaccacaggcgtgtgccaccacaccccgctaatttttaaaaatattttgtagagatggagtcttgccaccttgcccaggctggtgtatgcattttaataaagctgtttttaaaacacaaaggagcagtaaatagaatgatgtagaggatttcttgcccattctacctcaactccagaaggccacgttcttgctcctggacagtcataaaagtgaggaatggcaggaattctgtctgcaaaggagggactctcccagcttcacccgacacggcactgccagccagctacagagccacacacgcacagcacgtggaacagctggtgaggacagcgtggtcccgtggctctgctgctggcctttcacagggcgctcctcacgcaacgtccaccctttctcctcgggagcattcactctgccaggtgccaggcccagggctgtccaggcaggggctccacactcctccaaacgttcactcaaactgcattttctggttggtgcacgcctggctcccggctcctacaggaagtttctgggggcatcactgggactgctaggttcgaaccacccatcgcgacgatgtccttccctgtcctcctagaaacgtttaagccagccacaacccctaggagcccgtgaagcacatggcctaaaatgccaggaacgcactctccaatcccggtggcagccgtgggctccaggctctcagccacggggactcacaggcagtcacgggctgtgcgcacacctggaaaccctcgtggaggccagccctgcccagatgcctgccctgccctcggcgagctcagacagactggaacagcaccaccagcgacaggcccaggcaggacacacaggctgggagactgcacggctcctggttgccctgcattccggcctgttcactccactagttactaacagcaatgcccttaatatgcgcccagctaggtggcctccgggaggcgcaaggactctcccaactgcagctgctggttcacaccacggagccagccaggggatgacagtgtagacagcagacactctgggagtggcctcagaggacgacacacacctcacagcacatgcaccccatagcacacacatcccacagcgcacgcaccccacagcgcacgcacccacagcacacatatcccatacacacaccccatggtgcacatgccttccagcatacacaccccacagcacacacaccccacagcacacacaccccacagcacacatatcccacagcacacacaccccacagcgcacgcaccccacagcactcgccctctgtgtcccgtgctgattctcctcccgccacctgaggccggaatgaggtcgtcggctgctgctccctgtcctccctgctgggaaatggcgtccgagcctcaatggggcatcaggacgtggaattcatgaacagggttgacagagacgtgaggccgtcactgccgagcctgcagctgtggacagacctgtcctcacagccacctcatggcgtcagagggtcccgaggctcacctggcagtagcccactccctggttatggtgcccatatgccagcagcacattgtacagggtcctctgtaagcaggggtccgtggtcttccggaacttcacgttgtcggggaaggtccggttcaggtctgtgggaaattcagaaggaatcacccacgggtttctgttccacaagcctcccacccctccagctgccccgagggtggccacctgggttccacttgggacttacggactggttttcaccctggccgcacagcagactcaacacagccagagcgacaggctcactgggccaggaaggagggggtgatcctgaactcggggcggagaggggccctaaccgtccttcccgcagagtcagggacagcagagcgaccccagagctggtggccaggccatggcactccctcctcaatgcccgtctcctcccggcccccagcacaggcctcctgcacctcggacctcgcgcgtagcggaggcaactctgcctcgaggacccagggtgacaggtggagagaaatgcacacaaaactttgaggtgttttcctaatttcaaagatccaaaacagaaggagacagaataaattgagactcctcagagataaaggacacggctgagagctgagagctgagaactgaataaacctcgagttgtcagcttgtgtgtgcaggaggcatccctgccggcctcttccttcctcagcaccaacccctcccactgtcccgcccaggcatctcttggcaggacagtgtggccttggccaagctgtttagtgctgggggacccggataccacgtgggtccctgagactaaccaagcctcacgctgaccaagtgccaggcctcactgaagctgacctccgcgttaaccctggacacaagccgagcaggaaggataatgccggcttgacaactccactggtttctgctcccactggccctacctctgttagaggtgttcgccaggcaccccatgcggtcaccagcagacagccgctttctgcacaagttccaagatggactcacagcagtccccgccagccatgacgctgagatgggtgtacacccagctctggaggaacccaaccgcctgtggtctctccacaacggctgcaaaatactgtaagtctgtttccgacctctggccccaggccttatctttgcttacaaaaaactagatttgggccaacattagttcaatgcctcagagcacattatttctcattgtgtgttttcttacaaaagagcctttttttttttctggaattctaaacattccaaaaaatggaatcagtcaaggggaagttagtatttttgctatttcagactagagtgaccagctgtgttcatttatatgtaatatttttattgagttttctatatttatatatatatttatatatatttatatatttttatatttttatatatatttatatatatttatatatattttatatatattttatatatatttttatatatattttatatatatatttatatatattttatatatatatatatatttatatatatatttaacacagggtctcactctgtcacccaggctggagtgcagaggtgcaatcacggctcactgcatcctcgacctccagggctcaagcgatcctcccacctcagcttcctgagtagctgagactacaggcacacaccaccatgcctgggctaatttacgtattgttttgtaaagacagagttttgccatggtggccaggctggtcttgaactcctgagctcaactaatccgcctgcctcagcttcccgaagtgctgggattacaggcgtgagccaccacactaagtttcttgatatgttttgataacatcctgtgggaaaggagatggctccatctccattgtggagacagaagagcatgggagctttctgtctgcactgcgtggcctggcattggctctgtgggactggaccatccactgcatggctcctgaaagataactgaccaggtggctccaattactaagcacagaactgtcatggatccagcagccccacactctaggtaggagcccacagctgaaagcagggacccagtagaatccacactctgggtaggagcccacagctgaaagcagggacccagcagagtccactctaggtaggagcccacagctgaaagcagggacccagccccacactctgggtaggaacccacagctgaaagcagggacccagccccacactctgggtaggaacccacagctgaaagcagggacccagccccacactctgggtaggaacccacagctgaaagcagggacccagccccacactctgggtaggaacccacagctgaaagcaggggcccagccccacactctgggtaggaacccacagctgaaagcagggacccagcagaatccacactctgggtaggaacccacagctgaaagcagggacccagcagaatccacatacccaggctcacggccatgccacccataacagccgtgcggcaggagagcccaggggtccactgatagatggataaatgaacaaaatgtagtctgcccatgcgtggaatattattcacccttaaagaaggaggaaattgtcacacaagatgcagtacagaggatccctgaggactgaggcgagggaaaggaccccagctgcagaggacgcagcccacgggactcctcttatgtgaccctggagttgccaaagcacggagacaagcgtacagtgggactgccaggggctgggcaaggacacgggggtcggtgcttgacaatggggatggcacagagacaagcgcacagcgggattgccaggggctgggtgaggacatggggttcagtgcttaacaatggggaagctcccaagagcttcagcttgggaaaatgaaatggtaaattttatattaggcatattttaccataatttaaaaaacaattcagccaggtgggtggctcactcctgtaaccctagcactttgggaggtgaaggagggcgaatcctcagagcccgggagttcaagaccaaaaccccatctctgcaaaaaaataaaaattaaaaaatgagccaggtgtggtggtgcacacctgtggttcagaccacttccagctacgcaggaggctgaggcaggaggatcgcttgagcctggtaggtcacggctgaagtgagctgtcactgtgaccgcaccactacactccagtctgggtaacagactgacacctgtcataaaaaataaaaaaattcatccaaaaaaccacaaaacagagactttaaatgcatttttcagacagcagtgctgttttaatatgcacccccacccactgcacccaagctctcctcttcccaccctgaatcagcgtttctggccgccaggctgtgcactggagacctttggcggccatcactctgtggtcaggatgcagcctctcccctggcagccccagctcccagccttgggagccccctccccactggctcagccccgtggacaggagacccccaggaagggcagcaggatgcaccatgtcctccccgtcccgtctttctaacctctcagcactttaaagccactgggttttttaaaattaagtatattgtgtttaaatgtgtatttctcaaaaactgttaaaatcagaagggcagatgtactttctaaaaatctattcaatttaggttaaccaatattttttttttttttgagatggagtttcactcttgttgcccaggctggagtgcggtggtgcaatcccaactcaccgcaacctccacctcccgggttcaagcgattctcctgcctcagcctcccgagtagctgggattacaggcatgcgccaccacgcccggctattttgtatttttagtagagaccgggtttcaccatgttgggcaggctggtctcgaactcctgacctcaggtgatccgccctcctcagcctctcaaagtgctgggattacaggcgtgagccaccgcgcccggccttaggttaatcaattttgttagcactctgaacttctgagagccagggaccctatggttatgtgattactgagaaaaatcagaggagaagggagtccagcaattatgataaccagatacaaaaaaggaagccctggtgtgcggcctcatgagcgcagctgcgtccgaaggccgcgtgaacagtgcccggtgcgaagcgcaccggcaacagaggccgcctctccctgtcccgcgagtcttcatggagcgcatctgctccttcatgcccattttcttattagccagctaggcacgtgaatatctgctgagtgaattacgatcattgttctccccttgcaaaggcttcagttttgattctttcatggaggaagacgtaacttcaagttaaaagcagcaggcgcaccgctcacccctggacgctgaggctagacactgggtggaaaccggttccttccggcccccgggccctgcaccagagctcgacccccaccgcctcacctgtcctgatggcgtcctccagcctggggtttctctctccctggagaagctggtggtagtagccgggattctggtccatctgcgcctgggccccactcagcaccatccagacgcgggcacggtgctccagcgggacccctttccggacatagcgcttcactgaaggccgagaggacggacagcgtgtgagctggaccaggggcctgcggggcccacgcgttcctgccacactttccactctcaccagttctcttcttaaatcaaatattaaagagacccagaacttcgtccatctccaccaaaactggtacatatactcctttaaaaattctgctctcctctccctctcaacagagcacaaaccagactggctacagaaccgcccccacgcccacttcaccattcaatgcaggtggtcaagaaacagagccgcggtcagatggctgctctgcaaagcttcctggcagccgtgcagagcagcagcaaaggggcaaagcagtgagaggcccagctgagtacaaggaggccggctgggctcagctgtgagcacctcaggtgggacgccacagctgggagaacacggtttcagtggcagacgtcactgtccaactcgtgcagttaatctctatatattgaaagctactccattttgtagggatattttaattgacaataaaaatgtgaaaaagtaattagtaattttaatggccacagaaacatatagggacagaaagaagccaaaagccatgagctatcttcattagtcaatactgagtaatttcttaggcagatggaaaaggtatgtatggctaacatctgaattaattatgttaagtccaaagctgcgacactgtgctcttaacctacaaaacagttaattttcaaagcaaatatttaaagttttgctgttttcctttgatactacactatatatattttattttattttattttatttttttcgagacggagtcttgttctgtcgcccaggctggagtgcagtggtgcaatcttggctcactgtaacctctgcctcccaggttcaagcaattctcctgcctcagcctcctgagtagctgggattaaaggcacctgccaacatgcctggctaatttttgtattcttagtaaagacaggatttcaccatgttggccaggatggtcttgaactcttgacctcatgatccgcccacctcggcctcccaaagtgctgggattacaggcgtgagccaccacgcctggccctgcacatatttgaaaagaaaccaatattttaaaagaaaccatactttacaaaagaaaagaaggcatatgcaatttgtaaaattctataagctgccttaaaagaaaaaaatctgaggcaccagctgtatttagcagataaaaactcataactttataggctacagtcaagaaaagcactatagggtaaaactttatgagctcaaattccaaggtgatccacaatgtatgatcatctggacacgagcagatgatcatgtgctatgtgattactgagaaaatcaggctctggaaggacaggcccttgtctgtccactgggcctcccactcctggaagggaacctgggaggcagtaattgctcactaaatacgtgacgaattatacaaggacaacgagggaagacccagaggagagagaaaacagacactaatgccatccactgaaagccaaagaatccctcttaagggccgggcgcagtggctcatgcctggaatcccagcactttgggaggccaaggtgggcagatcacgaggtcaagagatcgagaccatcctggccaacatggtgaaaccctgtctctacaaaagatacaaaaattagctggacgcggtggctcatgcctgtaatcccagcactttgggaggccgaggtgggcagatcacctgaggtccagagatcgagaccagcctggccaacatggtgaaacctcatctctactcaaaatacaaaaattggctgggcgtgatggctcacgtctgtagtcctagctactcggcagactgaggcaggagaatagcctgaacctggcaggcagaggttgcagtgagccgagatcacgccgctgcactccagcctggcgacagagtgacactgcctcaaaaaaaaaaaaaaaaaaaagaatccctcttaagaaaccctctttctggtttagaaacatatttgaggatcatgtctcaggtaagaacatctcagcacacttggtttacggtttattcacactgcttacaggaacatgaaaaacatgttttgctttatttttaaaattctaccaaagacaccaataattcagcctgactttcctccaagttagtacgattcatactgaggtttgctgtaggtctcatgaccctcagagggcagcttgaccaggaatgctctgaatgagttcttagtcattctgtgctatacaacagcaggagacggtgagtcccagcacaggcaaggactgttctaactgagagggacagaagcagaaaggagaggccatgcaaaaaccagtggtacttctacaaactaataatgaacacctggaaatcatatatttaaaactgcggcctggcgtggtggttcatgcctgtaatcccagcactttgggaggccaaggcgggtggatcacctgaggtcaggagttcaagatcagcctgaccaacatggcaaaaccccgtctctactaaaaaaaatacaaaaattagccgggcgtggtggcaggtgcctgtaatcccagctacttgggaggctgaggcaggagaatcgcttgaacctgggaggcggaggttgcagtgagctgagattgcaccactgcactccagcctgggagacacagagagattccatctcaaaaaataaatacataaaaataaaaaaataaaattggcatcatttacaatagtaacaagaaataaaaggagaaatacttaggtaaaaatctaatgaagtatttgcaggatccaaatactgaatgctgcaaaagcaatcaaataagactgaaataaactaatagatacaccatgttcacagattgcaaggctcactcttaagacgtcagttcttccaaagttgatctacagattcctatatgcacctctttatcactgttccaggaaaaaatactttgtagacaatgacaagctgattctaaactttatatgcaaagcgaaaagaaccaaaacaattttgaaaatgaagttggaggagacatattacctgattttatgctttactataaacctacagtaagacagacaacgtggtactgaaaaaaaggtagacaaatgaaataatgggatatgataaggaatccacaaagagacccacacaaacagaaccaattgctttttgataaagatgcaaaggaaatttaatgcacacagaatagtccatctacaaaagaatgactaaaataaaaaaacaccaacaatatgaagagctggcaagaatgtggagcaattaggacactcatatatttgtggtgggaatgcaaaatttacagccacattggaaaggcggtttgtaatttcttactagttagttaaacatgcacttgtcacacgacccagcaatcccatgcggtgtttagtcaagataaatgaagaccaagttcacacaaaaacctgtaggtggatgtttataatgtcggcttacacattccaaatgtcttctgctgatgaatgggtttttaaaaattgtagtacatccgtaaatgaagtacctcagcaataaaaaggaaggaactattgacacatacaaggtcctggatggatctccaacgcattaggtgaaagaaaccagactcaaaggctacaatctgcatgattccactaatgacaccatagaaatggctgaactacgggaatggggaagagctcagtgatgtgagcagtgggctgacttcaaaggacaggattgttgaaggcgacagaatcttgactgtggtgatgactgcctagctgcgtgtttgtccaaattcacagaaccatatactgttaagagtgaattttactgtaaattgttaaaattatttgataggccaggtgcagtggctcatgcctgtaatcccaggagactccatctctacaaaaaaacccttaaaaattagctgggcatggtggtgcacacctgtagtcccagctactctggaggctgaggcgggaggattgctcctctaggctgcagtgagctatgatcgtcccactgtcctcctgcctgggtgacagagcaagaccctgtctcgataataacaataatatcaaggttgtatttaagagaaaggtcgaaatggctaaatgcaccagctctggagtcagacactctgctccgctatgacttgcaggctccagaccctgagcgtgccttggtttcctcatcgtaaagtgaacagaaggcaccgagcctgcacccaaggcccccgagcagctctggcagttggagcaacacccggaagcttcacggaacaaagaattctgcgactttttgataagtttgttatctggatttacactgtttctttatagaagaaagaaaattgtttacttgtcctcacagactgacactttcccaagggcagggctaacgcacagagcatcactaatgtttggagaagtataaaatatcaagtcaaaacagttgggaaatttttaaaaagaagctacatccagagaactgacgtccatctgtctaccctgacaaagttaggcaaatccccagtttttcggtgtatctttgaaaatatgttttctcgatttaacttaggtggtgttaatattctaagccaccaggaaggaggtctcaaagaagccaacggccctgaagctgcttccctgcagacgtctattctcgagatggagaatgaaataggaatccaacaggactaagtttgttgaatttagtctttccagggaggaagaggaagctgtcttcctaagggctcctggtggatatttgctatggaaaaaggaaaatacaatatttattgtacccaccaagagtgtgatcaggcagaatacataataactgtcccttaagacatgtggaatgctgagattggtagatgattgtgttcctggagactttaacatggggagtgcagatgaaaaccctccaaaaggagaggaaagaactctatcactgtcagcctggaatacctggcaggaagaagtggtattcccatttttggaataactcgtccactccagttttatacccgaccctctgctcttggggctttgccagtgctcatgggcaccctgacggtcacactgggacccaggccccaggccagtagagacacgcgatcactgactccatgtgcctcccaccggagtcaccagcatccctactccctgcagaacaggcccacagccctgtggctcccacccctcaggctgaggctcatataggatcaaagagatatatttgctcacagacccatttatgccagtgatgcttgctaccataattacatggtccacttaacattacataaattagcccagcatggtggctcacgcctgtcatcccagcattttgggaggctgaggtgggcggatcactggagctcaggagttcgagaccagcctggccaacaaggcaaaacccatctctcctaaaaacacaaaaattagccgggcatggtggcgagtgcctgtaatcccagttactcaggaggctgaggcaggagaattgcttgaacctgggaggcagaggttgcagtgagccgagattgcgccactaccctccagccaggctgacagagctagactttgactcaaaaaaaaaaaaaaaaaaaaaattaaagcaaaaagaagaaagttgttacttcaataaaaacaaaatgaaatttttagaaagagttgatagagaccaatgctaaaaaaaaaaaaaaaaaaaagcaaaaacaaaactgttgacttaggtgtaaaataattgcaaaggagtggggaaaagaataaaaatctggaggattttgcatccggattgctcttttccttttccctgctcttcccagaaccccctcccaagtccatattggaaagtgggggcaatgtgctgagtggttccctaaaaaggaaaatatggaacccaagttagcagctcctggtcgaagaaaaggacagcaataggacagacccaaatggcaaaggcaaagacgggagaatgactgtgcagttgtgttttctgtaaaaacaaaaatttatgcacaaccatacatctttcagattctccgctgtaaccaacctccaggtcacagccacaggacttcccacggacttcccctgctcttaaagcaaactgcagaaccaagcgtggacttctgctcctgagggggacggaaggacagtcccctgcggtcatctctataggagatgggggccatgggtgggagagaaactccctgttgcactttgtagccctcagtatgattaaagtgtttaccatgtacataaattatgctttttaagttcacatgtcttatatacttttacgttactttttaaaattaaaagacagttaacttttaagaataaatcaggcgcagtggctcatgcctgtaatcccagcattttgggaggccaacgtgggcagatcccttgaggtcaggagtttgagaccagcctggccaatatggtaaaacccatctctactaaaaaatagaaaaattagcctggcgtggtggtaggtgcctgtaatcccagctacttgggaggctgaggcaggaaaatcgcttgaacccaggaggcagaggttgcaatgagctgaaatcatgccactgcactctagcctgggcgacagagtgagactccgtctcaaaataaaaaaaataagaaaataaaaaataaattagccaggtgtagtggtgtgcacctgtaatcccagctactcaggaggctgaggcaggagaatcacttgaacccaggaggtggaggttgcagtcagctgagatcgcaccactgcactccagcctgggcgacagagtgagactctgtctcaaaaataaataaatcaaaaagaataaatgaaaaggaaaaataaagacacacgttccactggaaacatgtgaacatgcagaggccacagggatgggacatgatgcattcgtgggaagcatataggatattaacttccatctctataaaaaatttaaaaattagccaggagtggtggccacaccagtggtcccagctatgcgggaggctgagaggggaggatggctggagcccaggaggtcaaggctacagtgagtggtgattgtgccactgcactcagagggataccctgtctcaaataaataaataaaagcaaaagttgatcttgtcaccccctgcctggaaaacctttaacagttggcttctctgtgcctggccgtggtcaccacacacctccgaccctccgcccaggtgcagggcccctggtttcatctctgtccttccccaccaggtccctactgctcggtccctggaagcccagctgccattcacatcccccttctcaggaagcccccaggactcccctttgaccccacttctctgagttcctagctccagggcacactcccaccaagccctcaccccaggcagacacttcattcattcactgaacacacagggaagtcgcctggcactgccccaggttctgaggactgagcagtgaatgaaaaatccgttgcagggaggaagggtttttgactccagcaggggctgtgctgggaaaggcagaaatgaggaggtgccctccgcacagggaagcctggggcgccccggaggagggggccctgcagctaaccccgaggcgggcgggcggtcaggccggtgctcaccgcagcagtaggaggcctggggtcgcggaggagcggcaggtcgagcagggccctgtgggtcccgtcacaaggacggagtctcgctctgtcgcccaggctggagtgcaatggcgcaatctcggctcactgcaacctccgcctactgggttcaagcgattctcctgcctcagcctccagagtagctgggactacaggcaggagccaccacgcccggctaattttgtatttttagtagagacggggtttcaccatgttggtcaggctggtctcaaactcctgacctcgtgatccgcccgcctcggcctcccaaagcgctgggattacaggcgtgagccaccgcgcccggcatggatcgagttttgatccatcccgatatggctccctgctgggagggacgggtctccttcgcgtccgacccgccggcccatctcaaagcgggaaaaccggtccctgcggctgccctagctcggagcccgcagcttcgtcccgacctgcccggaaaggttcctccccctccctccgctccgggagcccggactttgcccggcccgtcccagcccaacccacctgcgccctcgggacccacctgcgcccccgggacccacctgtccggctcctggggacgcccccgccctgcagcagccgggaccatttgatcgccctgcgggtgagcgtgaccaggtagctggagaaaaacttctcgtaggcggcgtcgtcgaagtcctcaggccgctcgaatccgtacgggtcgatcctgcaaaaccgagagaaggaggccggcgtccccgaagtttcctctggggggtcgcgggcccgcgcggggaccgcagccgccggggacgcccgcaccccgcgccacacacctggggacccgcgagcgctcggcgggctgcatgcggggagggaggcgcgcaccgagcgaggccagcgggtcccaagttcgcctcccggctccggggcgcttaagtccttccggcgggaccgcgggcgcgtgggggcggggcggggagcggagaggggcggggctggaggcgggggcgggggggggcagggcggggggaggggcggctgggggcggggaggacttggggagagaggaggggcaggagcgggggaggggcaggggagcacccagggcgggggaggggcggggctgggggcgggaggacctggggagagaggaggggcaggagcgggtgaggggcgggggagggccgggggaggggcaggggagcacccagggcgggggaggggcggggctgggggggcgggaggacttggggagagaggagggtgggggcggggcggggcctgctcccggggcttccgaggccgcggcgtcccgcgggcagaatcgggggcgcctcccgcagaacccccgcggcctggacccgggtgagaggagcttcttctgcgattccttcaaacctcagtgcctggccgacccgactctgacacctgactcctatttttattttattttttattttctccgctgcatttcaaggccgagaccaacacacaaatgagaagcccccaggggcgcccgcccgttcctgcccccccaaaccagggaccggggtccccccaccggcgagccaggcctgggagaatccggggcagctctggttccgaacggcttcttctcggtccgcatccaatgacattgtcctgagatttcagctgcttttcgtgtccgggaggccccggaaatttgccagaactgcagattttgaattttgctctggcgacgtggcaaaggggagcccccagacgtgaggcgctggggcgacctcgccctgggtcccccaggggtctggagcgggggctcctccgacaggcctctccccgcctgtaatttaggcccagggcgacctggacaggccccaggaggaggccgtccccggactccagacgcactttcctgtgagaagcagcccggcctcgtctgggtgaggcgaggatcacaggctcagcgtcccctgcgcgtccgtcagggcctttcggaaccaacttgggaccttcccatgggtgtttccggaatgttccatgcgagcgccacccaggagcctggtcagcagcgtgtggaacggaccggtccctaagtgcggactcccgcctctgcctttcacccttctccagcccttgcaagaccggggggcggggtgggggtcagtgcccagcggagcagagcccccgacacggttcctcccgttcctagtctgctggttctgggaactccccaagctttcagcccagctcctcagcactggcctttggtaacacgcggcgtccctcatttgaaagatcacacagcccccactctacggtctgacctccttgggatgtttagacccaagccaggagacagggccatagcctcctgcccctcggcctacgggtgccccacagtccaggactgacaggtgggcgtccgtccccagggtcttcgaaccccgtctgggctcctctctgcctaagtcagtgactcc

SEQ ID NO: 245 - DNA, 67783 bp, Homo sapiens
  source 1..67783: mol_type = genomic DNA
ctgggattacaggcgtgagctaccatgcccttaggaaagcttttaaattttaaatctcttttgtggtgcaggtctaataggttccagggcttgtggaggtagggctagagtttgcacctaggtgtcactgaagcaggtacctgaggcaggtgaggggctgggagcctgccttccgctcttggaggcacagtttagcttggcaggggcctcagggtgtgagcaaacgcgcaccaggcaccagcatcctgttgccttggcacaaagcacagtccgtggtaaggagcaccgcgtgcagcatccccagggcaggtgtcctgctctgggaggtgcctccgtaggcctggccctggcacctacctagctccttccaggcaaatgggagtggagggtgggaaggaggtccagggaaagagagctgtgcccaggaagggctcgcactatctgggggcgcggggctgtgggtagggcgctgcttaggaagagagaggaggaggagcaggcctggagggaaatggagggaggccagccttagccccagtgctgggaaattaggagtcaagcgacaaacctcgttagcgaggagcgcgccggctgcaggagagcaattcccacccttaaactcggaggccgtgctccggattactaatttccgggggccgggcgcactgacagtgagtgtcatccatctcccccttgccagcccgcctggtggccgccagcgtttcccggccaggactcacagagcggctcgctgctgccccccggcggttgccggggtgtccggcagcgcctcgctcccctaggcctactgggttgggaaggggagtgacttccaggtgtgagcagtttggggcgcagcttgcatgtcacctgtgtgcacatgatcttgagcaactcagggcctcaacttcctcatctgtgaaacgggaccagaccacccatctcgcaatccaggggagctagatgtatacgccggagggattggccggctctaaaaagccgagtgatgcacctcccagtggccactccacacgtttttgtggttggccgtcgtggtcctgctcaaacaggtggagaaacctaaccccaccttcacccctggcccaagggcctctccaaggaagaagggagtaggtggtggcaccgtgtccgggtgagagacctggaggtggggcctaggtgtctacccggccaggtgcgagaggttcatttgcatgctgttcccctccccccgcagcttgtaatccaggtgggaaaggggttgggccagtcccggaggtgaattttgtttttaaggctcggggccagtcgtcgtccattccttcctaacacctccctatcctcccctccccccgcccgtgactcccagtgggggtggaggcgcccctccccctccccctccccctcccagccctggccgcctggggccgggtgaatccgccggccagtgcgggtataaattacccgggcccgcgcggccgagccaccgtgtggtgcgtaaattatagcgtccggccaaggccgcaaggggggcgccgccggtgagctggcgggtcgtgcggggaagcagcacccccgcgccgtgccagggccggccagcgtccgcaggtaggagccagtaacggcccgacccggcctcgccggtccgtttcccttttcgtttgtggtctgcccggagccttgtgcaaggcggggggccggcccgcgtgcgcccccacctccgggccccggcgcgcgctcggtcggaggtcgagcggggagcgtggggcctgagggagcccgccagaccctgccccccggagggcacacaggctggttctgctccccgctggcgcgggccccgaacgctctaggcccgccagcgtcatcgggaacagatggatggggggtggcaggcgcccagcgctcgctcccgtcgcaatccgggctggcgcggggagggggagggaggaaggcgggggaggcgggctcgcggggacggcagcgtgcgcgcctgccaagcctggcgcgggcatgtcccggggcaggtttggggctggcacgagggggctgaaagtcgaaacccgcaccgcagcgcagcgctggggcggccgcccagggggtgctggtttgccccagggctcagaagtagggacgcgctagatcagaggggtgttggaagaggatgaggagggagcgaccccggggcctcagagccgcccgggggggttacagcccagggcgccagaaggcggcaggggaggctcgccgacccctgcccccgaggcccgcccctttaaccccgagcttcctggggacgcgcccgccgcgatggggtgggggcggggcggggcggggcggggtgggcggagccggggggtgggaaggctggggccttcagtccctctccgcgccgcctgtgggtgcccaggaatttcaggacgctccctgagtcattccagtcaagtgcctgggtgaggtagggtggggggtgccaggaatggggaggcgctgcgctggggccagaagcgcaatgggtcgtgccagtttctggaggcgggcgacctcgcctctgaccgcaaccccagctacttaatgatccccctggcgaagcggcgcctccgtgggttctccagcccctgggccgcgggttctttaaagaacaccccccgcagcggcccgcaattgtggccttcccaaaagttacttaaaactggggggtggggtgccttatggaattttgaggccaagttcttagtattcagccttttctagttggggtaataaggtcaggcatggggggggtggggcttgggtacacagtctgttttgtgtcgcctccccccaccccacgcgccaccagcgcccagaaagttgttctccaaaaggcctccaggacacggagttacccgtccgcccattattgggcctgctctgtgtcaggcactgttctaggttcccgggacgcagctgcgagacagggctccgctcacgtggcgagggtgctgcactactttaagagttaagtggccggtcttagccaccaaggtccccgggacccccgagcagtccagccaggggctcccgagagtgtgggggtggcacctccgcggccccgctggtgtccccggctcacctggccggccgggccggggaggggcgtgtgcctgggcgggtggatccgggcgcccgtcggtgcgcgcgcgcgcgcctgtgtgtttgcggctgaaacccgacacctcccgctggctgaggtcagggagccgggagcgagccagtggcccgggagtgggcggcgttgcgtttgggtgtgtcctcggcggcgacagcagcaggtgtttcttggccggggccccggaagctccacctccccagcgggcccgagctgccgccgccgagcagccccgggtgagataagcagtttagacaaacactgggcgacggtggctccagcatgtatcagccgaggtggagctgcggggccctggcatgaaaggtgagcgcgccgcacccggccggggacggggtcctcccccctccccccaccgcactgtcctcctgcaagttcgcgggtttcgcgggggcggccgccaacggctcccgggcaacttccccggagtgttagcggcgataagagccgggagggcgggcaggcgaccaaaggccacccccttcctccgcccgcgggtcgcagcctgggaggcctggctgcgggcggggactcgggggctccgggctcaggagtgcgctcagcgggggatggggggggtgcgtttaagtgcgtgcgggctagagggcaggtaaagtggggggatgggggtggcggggggagtctccgagagctgcgggcgctggagagctggaatgaaaactttgcggcgacgcgggagggagcgaatgggggtggctgtgcgcccccgcggcaggtgctggcgacggccgaggaagcgggggtgtggggggggggggtgctcgctactggggccgcgccggttagggttcttgtcttgctcccctccccctccccgaccccttgtctcgggggagttggtcgggagggcgggaccgcagcctgccgggtttgtgacccccacgccctgcttcccgaggaagggcgcgccccgggctcggccgcttctctcctctctctccccccacccccggcggagcggctccctgcccctcccctcccccccgcagaagatggctgccccagcctcggaggtgggagagggattgcacatccgccgccccccacccgcactggcctttttccctccccggcccttcctgctccgcctggatgcgcctccccgcccccagccctcccgggccctgcggccgcgctgatgggcggcgagtggcccgaccgagtggagccgattcaattatattgcagcaccagagacacctcctcggccgcccgcccgcctctctagcaggctaattaaattcccttcatggaggcggagcgggagtggagctcaccctccctgcgcccgcccacccccagctttccgcctcccctccccagcgccgggtgggggaccaggggggcacttagaaatgtgcggtggagactcgaggcgcaggccatagggagggggttcccagatggggggaagggacaccgcgacaccctcattagatgggggagtggaggctgcgccctttccacgtggtgggccgggggcctggccgcagtgcccgtctgagttccgagggcagcgtgctggcggtgggggagcacctgccgggttcccagctgggcggtggatgccagccggagttgagtcggtttggctcttacaaactagcctttgtacaaagtgcgtttaaaacacactaaacccttgctccccgctgcggtgccttatctggggcctgaggggtagcggccacacaggttggggtttggaaacaaaaagcggggccaccaaatggaaagagggctccttttgtaaaaggcgcctgaacaaaaggcccagccgcactccgggtggaagcgaacccgcctaagccgatttccaggcggcgggggacaaaggggcagagagaaggtcttggtgggggcgttgtgaaatgtgccccctggtcggccgtctcgtcctctcctctgggattccgtgctcccgcctcccggcaggggtggaagggggaacccaggtgagcagccttccctggcctccctcggtgttgcttaagcttggggcacttcagtgttgctcaccctgtgtttacggccgcctccaccagcagggacggcagaacctgaggcacaggctgtgcctgactcagccgccacgccacaggtgaggggcccagggcgcaggctccgacggcgaagtgtgtcatcccggccgccggctgtgcagggagtcgccccgcccaggtagattcaggagcgctggaagaggccctggcctgcgagagcagcgacctcggtgcttcctaagagactttccgagacagccagccccgtgtcggcagcgttcctgatctcctgcgggccgggtgcgaggatggcttttgtcactctggcagcagacaccaaagtcaggaggggaagctggggaagctggagccaaccacggttttgacgcttggagttttctttcctggagccttgggggcggtgccgggccagagctggtgagagcccgccaggagcctccggtgacctagggtcagccctgccttgggaagggaggtcgggaagtcctagttctaggcacagtgaggctgagctcaaaacaaggaaggcaacaaggtgtccactgtggcgcaggctctgagctgtttgggacagtttttaggatcttggagtgtcagagttcaaaggggcttgtacatctccaaactcggtgttttaaaactgctgctggccaggcctttccaagcccagttaagccacagcctctgggttcctgacccgggtctgggggttgtcagagctccccagctgatcctaacgtacacactgggggtaggaacaaggggcaaactgaggcttggggccaggcgtggggcggacaccgcgctcacagcaggaagcctcctccgatggccccgatgagccctcccctccagcagtcacttccctgtctctgggggaagttcaggggctgcagatctgagtgccttgtggtttcagagcagaagccaagcctgcctgtgggctcagcatcgccggccccaggaagagccaagtctgcacagcgccactctgtggcagaccggggtcctgcacctctgagctagagattccccccttccaacccctggagtcccaaattccccttgagcccctggagcaggtactgtctgtcctcccctgctctgaaggaggcggactggggggcctttgggctcggagccccgagctgaggggcaggagctggtgcctcccacttttctggaagagtgcggataagctagagggctggctgctaccttttccctgcctccaggagctcgcaggggcttgtggagtcggctagcagggccggtttttcctggccccatttgaagccttggaattcccagcctgggttactcgaagtccaaggatcaaaccctgggatcgggccagggttggatggggaccctctctgggtagcctgtgaattgtctctgttgtggcaacagcagggtcctctgaaaccacagggcttcccctccctttcctggtgtgccgggagagctgtttttttaacctgcagagatccatgttgcaggtgacatttcagcttggtggctgtgccgaagcctggccgcctggctttaattcctcccccagtggagtctcagatctcggtggcctcaccgagtgcggtgtgggacgccgtgctgctggcttcacttccgcatgctggcctttctcccccggctgaggccacagcctgggaggtgacgtttcggagtgtcgctgtcaatgagaatttattgagctcctcctctgaatccagccgtgtgcttgctgctgggaggtgtacagacagataaaacaggagcgtggccaaaagcagccctttgcatgcctgccaaacgcacactcgggggccttttaatcttgcttctgcagctctgattccccaccagcctcttctctcacgccctcagctccagccagacgaaaccacacgccattctcgccactcctgcgtttggccacgtccctgtcctagcatgggccatcccgtctgcctgggattctcccgtctgctccaaagcccacctgtcactgaggccagtccacctgcccctcctaacctgatgcctccctcgcatccatactcccatgcccaccccgtgtctggaatcagaagttcagaggggaagtgagagctgcccccgggaggctggggcggagtccaggcctggaggaaggagctgtagatgagggcagggctggtgctggagagggcctctggtttaccttcacctgcacctaccagtcatctgtggaaagaaggggttgggctgcacttgaggcttttgtgggtccttgtgacttgggggtttctagggaggcaggtggaggaagtggggagcctccagctcgggggtctctcctggctgcacttttgaatcacctggggagctttaaaagctcccagtgtccaggctgtactgccaggcagttcaggccaaatctcggagggatgcagcctgggcatccgtgtgtcaaccctcccccccccccccccgttaactgccacgtgcagcccaagctgagaccctggctctgctttcttccagagcagcttcctagtcacctaggggccagggtgggagcttttcaatgcttggcccccctaatccagaagggccttctgctggggggagcaatgtgggtaggaattccttctcctgggaagatgggctgatgctgtttcaggagacctggggtctctcttcccacctgggaagccagagaccgccttgcttgccccggaattggatggagaaccctggtgactcagaaatggacgtctcccctctacgccacctcccccgcaggacggcgtggcacctgtcacctggctgctctctggatgtctgtgggccttgtgttaaccccaggcagaatcctgaaggtcattcttgcctggcccaggtgtgctttgagctcttctaaaggggcttacaaatgcagagtcccactggcatgggtggattcgtgttcacctgcatctctagccaggccttccaattctggaaccggttcctccagctggaggacttgacgtgtctgaggaggtgtgtgtaatagtggctttgggatcactggactgaggtggcgtgaggggggtgcgtgctaatggtgacatagatccttccactttaatcatcacgtcctcacccccacccccatgttctcatctgtaagacgaggatgcagaggccctctggcagttgagggtgaggatgagatgctgtaatgcccgccacatgcccctgacgggtaaatgacagatgcgggtgagggttgagaaggcctggagcgtggggtgagcccctgatgagtgtcagctgttactgtgtcgatcagtgcatctgactgttcgtatctgcctcttgcttagcctgtgtgacctcaggcacttgtgttctgggcctcagtcttctaatctgtggaataggaatgacaatgtcacctgtatcctgaggctgttgagggttaaagcctttattaccaagtgcccagtacagcacctgacacaggctctgcaaagccttgcggctactcctgttgctgttgttttaattagagacagggtcttgctctgctgcctaggctggggcgcagtggtgcgatcacagctcaccacagcctcaaactcctgcgctcaagtgatcctgctgccgcagcctcctgagaagttggaaccactgatgcgtgccgcgacacctggctaattttaaagaaatttttttgtggagacagggtctctcactgtgttgcccagggtggtctcaaactcctgatcttgggtgatccttccgtctcagcctcccaaagcactggagttacaggcatgagccactgtgtccagcttggctttaatttataaagttccaaggctctgttcccctacgctcaactgactcccttgcggtgttgggggtggccccttttcccaaaaagactggagttgctttttctgccctaaggctcaagtcaccacagcagaccctgccggcccctctgctgggctttaacaaccggaggttctttttaggagcctcaacgtcccctcgggctcacatgcacaccactgcccccttggtgattggcactctgggcccaggtggcgggagatgctttaacaaactgtccctcccccagccctgcccttcctgcgctcggatggtgggtctgtggccacaggcagcaatgaagggtatcgaccgcccagcttttggttgagcagtattgatgttggacaggttaagccgtcccgaaggaaaatctatatgtcaagctgagcacaagacagcttgcgagtggaggcgggaggggggtggggcgcagccttaagggccacttctaggctaaccctgagtcttatcttctgggttggggggcaaagcccgggggtgccaagcgatgccccacagccccagacgggcctggagggacggcaggcgctcttacgtggtgtgatctgtgggcagatggtgtgccggccaggtcttgatcccacttaaggagttgtctctgggatttagtaaccagatgggaaagactgtatttctgtatccagaggtgctgtggctgccccagcctatgagggtcacgccgtgggctgtgcgtcaggcgtggtggggggacgttttcaccccaacgtgctcctcctccccagggagggactgacttgctaggcagggattatccccatttagccatgcaccagggaagaaaggggccccggggatccatatcctccctgtagtcacacagctggtaattaattggtagaggagcagaaacccacaccatgattttcccactccagcctcctcacccaactcccacccgctctcccttagagcctggagagaggtcaccggctgcttcggaaggccctgtttaacctgggctgcttatggggtgcggtggctcaagcctgtaatcccagcactccaggaggccgaggcaggtggattgcttgagctctgcagtttaagacctcctctctacaaaaaataaaaataaaaataaaaagaactggccaggcttggtgggatgcgcctgtggttccagctactcaggaggctgggcagggaggatcacttgagccccggagctcgaggctgcctgcaatgagctgtgatcgcaccactgcaccccagcctgggtgatagagcgggactcttgtctcagcaaaaaaacaaaattaaactgagctgcttcacccagtctcgggatgtgagtggattcttccaactgaattcccagtgtacatttatctttgagtgtatttttgtaatgtttttgcatttgacatgtggtattttttccattcacttaaatatacgaggatccactagacagccgatgctatactgggtgttgaagacacaaagtggaatgcggttcaagcaaaaattctcagccagatgggagcattggagagacttccgcctcccagaggctgccgatccacgcggtcgtctctgccgcccgtcgggagggtgcggttagtcaccccgtaacagataagaaaacagggtttcggaatcagcccttgtggaatgcctgggctggcgccccactcagccctgcatctctgagctgttggggaacccgtttagatggtctcagccttgggtctctgcactgttctcagccctgggtctctgctctgttgaggaacccgtttagagggtctcagccctgggtctctgctgtgttggggaagccgtgtagatggtcttggccatgggtgtctgctgtgttggggaacccgtttagagggtctcggccctgggtctctgctctgttggggaagccgtgtagatggtctcggccatgggtgtctgctgtgttggggaacccgtgtagatggtctcggcccggggtctctgctgtgttggggaatccgtttagatggtctcagccctgggtctctgctgtgtgggggaacccatttagatggtttcagccctggatctctgcactgttggggaacccgtgtagatggtcttggccctgggtctctgccctgttggggaacccgtttagatggtctcggccctggatctctgcactgttggggaacccgtgtagatggtcttggccctgggtctctgctgtgttggggaacccgtttagatggtttcggccctgggtctgtgctctgttggggaacccgtttagatggtcttggccttgggtctctgcggtgttgggggaacccgcttagatcgtctcttgaaaaaggtttgtgtccaccgccccccgtgctggggtgtgcagggagtggagtgtgcgctgagatcgtatctattttaaatcaagccgatgtcctggcgtccttttttgaatacagtcttatcgttttacaacgtgttgtttccacctaaatgtacatcttataagactttataggactaaggaagttaatccatccttagcagggatgccagacccctggagcctgtcacctgggcacagggaggacattttaactaagcagctggtttccaggttgagactggttgggatcctgcggagtgactctgaatccactaacagcaggactgtgtctgcttggatgctggagctggggtttctccagccacggctggcagagtggaccctggggttttgtgtcatccgtgtctcttatccactggagagactgttgtgttccttctgccagattacccttgaagaagcaggggaggggagggcgctccggcccacctctgcttacctgcccacctcgggctcattcttcccaccccatactccccatgcagccttcaggacaggagacatagcctggactacttctcatggcgcaacaagaactttgttaccagtcttggtggcagagactgccagctcccaacagccaggtctgcacctgactgggaaatttactagttcctcactgggattctggaggggcgtgtgtgtgtgcatgttgagaattacagaatcatttagacttaagcagtcagccattcagcagttgacaggatgattgtggccggaaaaggtgaccagtttgtcctgtttggtggctgggttggatgagggagtccaggactcctggcgcatgactgttatgggagcttttcctggacagctccattccaaagtccatcttggctgagggtgcttgttggttttttccagtgaggcatttagtgatgtctgggcacagcacttggggctttgaagatgggagacgagtctggacgaggaaacgccattagaacgtggatggttctgggccctttctttttccaccctgtatttcctctgtccaggcaggtcatattggggagggtgttcatactcgtgggttgccacttagggaactctgtgctgtaggagtttgtagcctgggttcatggatgctacacatcttcaaacacacgctcccacagggtttacagataggctcttcgaacttggtaaaactgtatgtaacatgcagtaggtgtattttcctggggagagggtctggtccgccactttgaaccatcttgagagtggacctttttgcaaaggcggatgtaactgttttatgacttgaggggcaagtcctgacttggtgagcttgctttgattcaggggagacctaccttggggttgacacacgccagaattgtggccttcataggcgtcccctgaagctgagcctgggaaggggttgacctctttctgttacaccctcatggagttaccgtgtcgatgacatctgagtggagtgtctgtgctgagggttgcagctgcagctgccgcagggctgttagttgctcagacctgcatgtacttggagaattgggaagacctggtgttgaggaagctggctggcctgagaccatagggaggggaggggtgcagactctggcaacctggagagttagggacaaactaagggagaagtgccactcatggggctgtggtttttatggcttagacttttcgggagaaactgggcaccttctcgttgacttgaagcctcctattttaagacattgcccattgattctcgtttaaacaacacagcgtgatttcaggtcaaataaaaacaggttgaagggtaaaaggctggccccttgtccactcctttttttttttttttttgagacagggtctcgctctgtcacctacattgcagtgcagtcgcgcaatcacaactcaaggcagcctcaacctcctgggctcaagcgatcccccacctcggcctcccaaagcgctgggattataggcgtgagccactgttcactgaccctcttgtccaatcatttgcaccctctctccatggtactgacagggaaactgaggctcaggccatgcggtgccctggaagtccgcactgagctgttgggcatgagtcagcctgggcccacccccgttccccttggttttccagctcaggaccaagccctttttgctctgcccccatagtgtgttccctcgaggccccacagctctcagccttcagtggaagttcaggctggctgagtgggatgtgaggaccccggtgcctgcaggcaggcacactgcgccttctgacttaaaggcgcccatttctgctggtgtgggcgtccgccctgttggagggaagggacgttttccagtcatcaccatctccccgcctctgaagctggagaccctggacccctcttcgaaggccaggtggccctttctgcccccgcgccacctcccctgctgcccaggccactcctggcccctgtatgattgcttctttgagcacctgttggtgtccagctcctgtacggcctggtccctgttcttggctgtagactaagggccctgtagataggtactggcactcactcggtacagaagggacaggcattcataggagacgtccttggatcctctctccctcccacttacctgagggagcttgttaaacactcagcctcctccacactggggagaggagaggggcctgcatttcgtgggtccttgtgagcaagcgtctcagcctcctcttcctgctggcccatgccccccggccgccacccgccgtcccacggaaacttggagacctcagtgcccgccctggggtgggggagccaggttggatttccctcctgggcacctctcacctgcctggacaccttggacctcatccgttcctctgcccagggcctctggagggaggaagggctcccacaggagcaggtgcaatggaaggcagcctggtcagctctggtgccatgggctacacagggcacccgggggcggttccggcctctagcacaggtgccctctggctgagagctgtgggaaagtggggctgggggaggcctcgagtccagagccttcctattcccagccgtgtaggtcccgtccgtaaaacgggtatagcactagggtgggcacccaaacagccgccacagggtgagagctgccacagggaggggaccccaagtgacgccagccatttccaatctcttcgcacattaaagggaagcagccggcaccatggccaggacagctgggtttccttccggctcctgagcctctacatgtgacccgggttgagggcgtgaatctccagcctccgttcagcctctgtaggctgggagtgagcatcccactgtgtggaataaacaggtggagagaggcgcctgggcaccgccaggaccactgcctccgggaagcagcccatggggagaatgtgacaagggaccccaggtaccgccaagggcacagggtggcggaggggctgggaatcggccggcatgggtgagcccccggctctgtctcagctgagctgtgtggccccagcggcctgtgtcactttgctgttcgcagctttgctttctggggtctgcttacgtaaagggaagtaagggtacaggtagccggcgccctgtaaaagttgccccctggtaccttgatcgctgttggtgctgggcaccatctcccagagtcacagctctggacaccgaccccagccttgactcagggccccgccctctcccttggtctgtcgtgcccctttaggaggccgcctccctgccgaggccaggctgccgcccgcatctgccagtcccgcccttcccgccgccctcctctccagcccttcatctgcccggcctgcttctccgcacacacagcagccgcttaggataatcgcgtcaaatgttgctgccatctgttgcctgacttcccgtccctcgcctccatccgggaacctccgggaccagtccgtggccgtgaacctcagtcgcaggaccgtcggctcctaggaggctgctgtccgcgggtccccagaatgcaacctcagcatccagcgccttctgtgcagagcccccctgctgtcctcaaaactgtagtgtggcgtccaacctgggaagcccctccaggtgacctggccccccaggtgacacccctgggattgacctgctcccttgcactgtccaatgctgttgtgtggacgtctcccgagagctctgcaccccgtgttcttctgcagaacacggcctcctttgtgttcccagcatggcagtgagcaagagaaggctggggagaaaccggggtggccagccccctccccgtcacccccattcacagcaggactgcagcttcaagggtgtcgtggggctcgggcagaatatggggttcagggtggctgctgggggccctaggcattgcttgggagatggctcattgcgggtggctctacgtggttgaccggggccctggagggcagcgtctgggggctcctgccgtggctcagtgagcgtggcagaggacaggtctacacgggccaggcgctgtgttgctctttcctcctggggtagggactcctgtggctgcacaggttgcccccgcccacctgcttgtgttttctcagcccttcttgttccaggtcaggatcctggccacctgcaagggctgtcctttgccttagccatgagtgatggccctggccggtttctggggcatagaccttgggaagcaagtccagtatggggacccagggcagcctgggggggtgtttttatttggaaaaaaaaaattaaggcacaagcaggctgcccccatgtgtctggagcaagaagacctctccccagggtctccccgccccctcccttgcctccacccccaagaaaaattgctttgtgccactgagcttggagcacgtggagggcagatatgataatgaatttatcatgaagccgcccaggctcctgcgatcacgtggtgcccgtgcagcctcagccgccagggtctgtagcagggtgacccgacctcgttagggccacggaagcttcgcccctttgggggagtggggatcgcgggggcgggcaccagtccccgagctgggggacgccctttatttgttcacaaacatttctttctgcggtaatgaaaaattaccaagaggggtgattagagaatccaggtccagattgtgtgtgcggggcctgaaagtgaaggcctgctgggcccagcctcacggggtgtaattaccccacggggggctgtcagggggaaggggcggattggtgcttgaaccgggacccagcagaaaattcacctcagctattagcttgtaattacagagcacagagggagcaggcctgaggtctggtgccggggaagagccgggatgaaaggaagcagtaattacgggatccgcgggaggccgggagggcggctggcacgctgattaataagcccctccagcctcgtggggagggggagcgaggaatgggacaccatatttaatggagtagagaggcctcccccctcgtttaaatcctgctgttggagcgtttggacagcaggcagaccggtttggggtctgttctgaagaactaagaacgagatgggttccggaaaatagcagctcgctgggccagccagccttgtccctctccactgggactttgcttccttttcttcttgccttttttttttttttttttttttttttttttttaaagcattgtgctgcttctgaccctattagaaacctagccagagaataggagaaagtattgattcaagaagcggtgctttgttacggggggcggggggtgggggcctcacccgggggcggtggtctttgcttccccagacctttcctgtctgtgaaatggtgggacctgagggttttgcggtgctgtgggctgctgcttcattctccgtttcctgccctctggcttctggcagaagcctctaggttctcagctctgccaggcagactgtctagaccaggtgggttctttctgaaagggtccagggagcagacagttgaggctcacatgaagaaggggtatgtcccctggcccctcagtttgagggtgcccagggccgaggggcctttaggtgtctggctgtggcagctttttttttcctgggggtgggggtcaaggtggcagctgacagtggcaggaagggttgtccagagcagcacgtgatgtaaataagagggtgggggcctcgcagacctggtccacctagacccctggctcgttttcgcctgctgagctgcacatgtcaagagagcttgtacagtgcggagacagcccccggccccccggccccccggccctcatccgtcacaggccttcacacggtggagcgtattcccagctgttaggataatgaatttacatgagctgataatgtagacaagaattcagtcaatgtccaggagcgcagaagttaataaatacctctctaatgagggcagcaggggggtgtgctctcccagggcctccctctccccgccatccctgtgtcccccacggacaccttggcacctgcactgacctcagccagagaacacctgcacgggaggaggcccgcatcggtctccctggggagggctgggggcttcgtgccgaggcctcgggggcagcagccttgaagtgatccccaccaggcctggaggggcaggaggcacgtgggccctggaggctgtgtccattcacagcaggcccagggggacccctccaaggatctcggggttccccggctcttggcctcctgtcctggcctcaagggagctgcgcccggctgctgcggcccccgccccgcctgcccagtgcacacatactgaggagcagcgctaattttagattccccctaatgaagccgctcatttggaattctattttaagtgacctgacatcagcagagccgcttcccaggctcacagctcctcaggagcctgcagctgacaccggggcagggatgctgcccgcaggggacccccagggacccagggagactgtacctggggctggagggggcccatggggcccggggagcagatattgggctttgtcagaggccggggtagggaggttgctgtcaggatgccagtgggctggtgatagtgacactgaggtagcctcagacccaggcattggagggagcaggcagagggcctccctggtcaccagggaagggctggggagctgtgggtgagggctcaggttcagactcctgcagggacaccccagttccctccacctctgccctgtggctggacagccccacgcttttgttggcggtgctgacttcgtgccgtcgagccgccatccctttgaatgtccgccttttaaaagcctggttcactgcagaaaaattagaacatacagagagagaaaaaggatgaaagtgaaagacatagctcttctcgttgccatctgaagacactgccagtagcctcaaggtgtgtgcgccatctggggtctggtctgggactcgcgccatggcctctgtgtaccactgatagggtttggatgtgtgtcccctccgaatctcatgtggaaatgtgtcctccagttttggaggtggggcccagtggcagtgattggatcatgggggtggatctctcatgaaggggttatcaccgtcaccttagtggtgagcacgctctcgcaagatctgggtgtttaaaagcctgggacctccccactcttgctccctctctcaccactggatgtgctggcttccctcgccttccgccatgattagaagcctcctgaggcctccccagaagcagatgccagcaccacgcttcctgtacaccccacagagtcaggagccaaaataagcctcttttctttatgaattacacagcctcgggtatttctttatagcaacacagacagcctagttcagccacccagcccgtgcctgtggctggtggtcatagcacatctgcccgggtggccagccagcctcatgaaggccacaggagagagaattggcatctgctcccagaccttcagggcgggtcacctggaggtgaaatgaccatacggtgccccacgttccccttttgcggtagcatgtggtgtggtttgcagggcatagtcagccacccagcctgcaccggagatcggcccctcctgcggccctggagcaggtcgagctgggccctggctggcttgtcacatgggcactgtgctgaggtcatctcagccctgctctgcactggacctgggctccaagcctgccttcgcctatctgggaaataggcccagtcccagctttctcatagggcggccaagatgtagagtggctggctctctgaggaatgtgggaaagggggatgggggatgctgatggtctctggcatcgaagggacatgttttggagactctgggtgaagatgcagagtctctgtgtgcagatagtttcacttcttggctttctgatggattgagggggcggcctggattaatagagggtgtggtgatgctgaccgtatcagttatctagcgttgtgtgaccaactgtccgcagctcagtggcttaaacacaaaacctttgttatctcagtttctgtgggccagggattggaggatggcttagctgggtggttctggctcagggtctgtgatgagcctacttgagatgttggctggggctgcggtctcatcagaaggccagcctggggctggaggattcattgccaaggtggcttctcacatggctgttggctggaggccttggttctttgaaatgtgggtttctccatgacctgcttgagcatcctcatgatacggcagctgacccccctccactggagtgacccaagagggccaggaaggaggtgatcttaccttggcagctgcagactgctgcttccattatactctgttcatcagaagtgagttgctcagtctggcccacgcttggggaagggaattggtctctacctcttgaaaggatgactgatgaagactttatagacattctttttattttttgagagacagggttctgttacccaggctagagtatagcggtgtgatcatagctcactgtagctccaactcctgggctcaaataatcctcccaaacagcggagattacaggtacgcatgtgtcgtttcagggtaatttacagagacagcgtctatgctgcccaggctggttttgaactcctggcctcacgcagtcctcccacctcaccctcctacttacctgggattacaggtgtgcccaccatgcccaggatgaatgtttttaaccattacagttcaacgtatcttagctgtgtgtggtgcgcgcacatgtgaccattcacgccttctgatcgggtgccatggttgggccgtgtactgggcaggtgctggtaatgagcagtgggggcccaggaagccgggttcaagtcctggacatgctgctcaactgactgaccttggaccaagcttaggtcatctcctggtctcggtttccccatctgtacgctaggcctcttgggcttgggcgatggctgtgaggggtgggacacaggctgggtggtgggtgacagttcagctgctgtggcctctcctgggctcattgtgaggctgtcttgagaggtgcccgactggtctgtgtgacttctgagagctgctgcagtatcccctgggggggtggtctttgcgttccccggggccctgctcctgtcttccaggcagctctcctagcgtcaccctcctgagtgcctcgttgggaccacgaggacctggttcattgatgtccgtgtgggtccctgtgagggtggggctctgtcctgtgccacttcgtctttctagacattccctcctaaaaacccgcagcctactcggtgtggtgctgaaggtgcttcggtgacagataggacccggaggtcctctggactgcccatggcagcccctatgttggccatgtcctccagtgtcccctgcaggcaccaggacaagagctctggtctcccccatcctccagtgtcctgtgggtcaccttttcccggccaccggccttttggggtcacggggtggccctctgccgaaggtgtgtgggctcgtgggcccagggcacggggcttgtgggcagggtgcctgccagcttgacaccatgtgccctccccattgtggctccagtggggtgagcatcgcagactcagagcatgggtcccatttgctgagacacctgcgtggccttggctggaccccctgcctgctgggactggcatctgcctgctgggactggcatctgtcctcgctggctggcatgctgtctcgtaatggccctggggtgccccacaggctctgaagcccctcatgtcagttaccccattatgctcaggggagtgacctcatgaggtcagctttgctgtgctgttaccccgtttggtagatgaagaaacggaggccctgacaggcaaagtaacttgccccaaaaggttgttcagccagaagcatccagaagctgggtctgagccacaggcgcgttttcatcgcctccaatggacccgctgcgcctctgtgcacagggagaggcactgatggcagcccggtgcgggggacacgcagaggccaggcccgccttgggggcagcgtggctggcggtgcggagcagagagcagctggcagggttcaggctggccgaggacgggccctcattggcagcccgcattttctggaagtgaggctgccaggcagagcccccgccctcccgcttgtttggatgtctgtgccgggttgaagcggccttggaaaggcaggatgggggtgcaggtccccctccacccctggcccctccagaaagagccaagggaagacaggctaggtggggcccgctgctgcagggcacggccacggcgccacctggctgttgcctgccatgggcatggggctctcaggggtcctttgttcccaaggtgtgagctctcactggggagaacaaacgatgccccccgaactcgttcccgcctctctgttctctcatttgcagccccctctctcaggcagtgcccccagcccttccctcagtgcccccaaagaattattttctccctacgtcccctctatcaggagagggaggacttggctccctgaatacatggccaggactcacggcctttggtggcaagttctggggatagcaggtggacaaaggaggtcttgagggggtcctctccacgctgcctccgagcctgctgtcccatggggacaggttccaattagacttgtcaatgtcacttagaatctggcagaggtggagtgggctctggaggccagggcagcctcttccggggaggaacctgggggcccccttgcccttaccccataggaagtgcacagtccgcccctcttgtgtgttgccccccggatctctgtgacaccagccccaccatgtgtggccccagcgcccccccgccccaagatgcatccacagggaggaagccgggaccctgtctgtgggtgatgtaggggtgggggcgtctctgcgggggagggatgttggtggaaacattttgaccaggttgggcttttattgattggacacacggggtgggcggactgagggcttgtttggaggtggccatgtcctttccccagtggttctgatgtcaccaggtggctgcccctgggctcagacctctggtgccgccgccgccgccgctgtcaccactggccgggagggccaggtcagccgttgctgcgccaggtcggcctgaacttggccctgggaggaaagagggttccaagctgcaccgcggtttggatttgcggttttctgtttttagcatctccgggcagactctgtgcccagtaaggggccacagtggggtctgcagtgcggccgtgttcttccccaccgctccctgtcagcctgcctgtgtggccccatctctgggacccctctcagacagagacgcacagggtccctgagtggcggggaggccgggggtctgccctgagtgcccgcgtggactgggccgagttggggccttagtttccttttctgtaacgtggggcagaactcccgccagtcttctgagggcattgccatgcgtgcctggcatcgtgtgcttgtcgcgtcagtggccacagcagttgtcttggttcccgtcgtccctgggcctctccaccagcgtgtttctatcctgaggatgcgggccgcacgcctcctccgcctgggcctcagtctccttccccacgccatttgatggtcaggggcctgttgggtgatgcgtgggatcctccacgacctgcccagcctggactgccctggagaggtagagggacagtgctggcccaagccgttcagcatctggggtcctgggggcctcttgggtctgtgccgggttccagctggactctggggacggggtctgttctctctgcagcgctggctctgtcctgttcttgcttgtcctgctggagcccccggggctgcccctgctccctgcctgctgctgctgacaccggccctgccgaccctgctctggtgctgggcgctcctgctctctgggtgacctctggttcttcttttcctgtttcaggcatgagccatgagcccaagtccccttcgctagggatgctttccaccgcgaccaggaccaccgccaccgtcaaccccctcaccccctcgccgctcaatggcgccctggtgcccagcggcagccccgccaccagcagcgcgctgtcggcccaggccgcgccatcctccagctttgccgccgcgctgcgcaagctcgccaaacaggcggaggagcccagaggtaagggggcccgccaggctgcgcgtggggggagcggcggctcccgaggccgggactcagcctcccgcctgcggcgtgcacgctcacagcaggtctcgtctttcccacgccgtgtgctctgcatggagcaggcagtgctggctgagctacagaccctgggccagtccgcctgccccagcacctccgctttgcctctgtgcttctgtctctcctgcctctgtccttcctcggcccccggagccactgcaggggtgtccggatgtagcgaggtgctcctaccagctctgtgacttgattgggaggagggtgggtgccctggaccaggggagccccaagaggctgcagagggagagctgggccccagtgctccccaagtggctccttgcccaggttttgacactccctccagaagtggcagagaacatggtgtccctggaaacacagtggtctggagcgggggtctctggcacagctgaacccaccactgctcaactccctgaggcagagactgtggggagcatagacaagcggcccccggggtctggagccttggcttctggtatcacctgggcaggacctgctgtgtgaacctgggcacgttgctgatcctctgagcctcatttttcctgtctgtgcagtgaggctctaaagacgccccctttggctctggctctggggtactttttggcgcctgcgatgaccattggcaggggctgctgctggcacaaatggggaggggcagtgggcggctggagctgctgggggccttggccatgtggattctggcctcggacaccctttggactcgctgctgacaggcgggggggctgaggaaaccgggaccccagtggcatccgcttcattcacctccaaggcccacgggttaagatccgggtgccagggccctccggggtggccacagcaacacatgcaggagccatgtccgtctttacattacccgggttccagcttggcagaggggacacctgccctgaccagggcgggctggggggacttctcatttctgaatgtctccttcctggatcctttctgctgctgctcgttggagaatggggggagtgtgagaggacacacctgacattgatggatggggggtattggcccaggagggaggcccgttggggtctggtttccgtaccaccagggggcagcccctcgcctcctggctcttcctggcaaaccaggcacaggcaggaccgccagaaaaccctccacgcccttggcaggggactccctggccacacctgagcgggccaggttgcatgggccccacctgtgtcaagaggccggacagctgcaggcaagatggctcagggggaagcagactgcctgcctggtggaggcatcctggactctctggggcggtgaacaaggcagctggggacagaccctgggaggaagctgagcttggagtcgagactcgggctctcctgagaggggtggagagaagcgaggtcagagctggcccagctcctgctgctgcagttgtctttttttctcagcgtttgggggcaggagaaccagggctggtgagggatttccgaggccacgggcggcacgtgactggcgctggtgctacctgggctgggttatccttgcatcctgctttcatccagcagctgtgtctgctttggggcctctgggctccacccctgggtaacgctgcagaggacgtggtcaggaaagggcaggtttccctcctcgccaaggaaggtggtagagaggtgttcagactcgccttccctccctgggcccagcagcggccgtgggcgtcacagcaggagcctgctcacagggccgtcgcttcctctccgctgccccatgctgctggccccagcacttggtttggtggctcggccagcgggtggcctgagtgccagaggccgctggtccccactggccaggaacaaagtgccgctgggcgcccctggcgggaggccagacaccatggcctcgtggccctgctccctcccagctgcaacctgggcactgggaagggtcccccatggtggatgccccccaggaaagatgcccccggggtggatgcctgggaactgaatggcagagggtcgggagagcgggcgagcagtgccactgcctgagccatgtgcccatcggttcactcacccacctcaccccctattgagctgggaatgccaaggtttgtggggctcggagtctgcggatgtggagcagtgtttgggtcctggaacgccctcagccaggcctgggccctcgtcgcccccacccgttttgatgaatctccagctggtcacccctgtcaggccttggtctggatggggagggactgggtgactcgttcctcgtgacctcagccactcagtgcacctggtccccattctcatggagtcacccggaccctgacctcacgtttccccgtccatggaactggccggcagccctcccgggaccctcgggcagctgagaaggccaaagttcagagaggacaagtcgcaagacggcagccacagcgggtggggtcgtgtccgtgtcccactgctgctgggccttcccgggggggggctgggagagccgccgttaggacagttctgagctggtggtcccggcggtccctgctggaaaggaagcccccctcacccctagcaccactgccagtggagcagggagctggcgttgggcgcacaaaagggtctatgcctggctgtcagcacgctgaccctgcctccctgtgggttgtggagtcctggatgacagtggggacatgtggaccccccagctcccctgtgctacccccccagctccctggtgctacctccccatctgcgccagagggcagcagggggaacctttggcggacttggcagtgggaggggtttgcatttcttatttaaaatttttttagttacaattcacatgccataaaattcaccctgtagaagcgcatgatttggtgattttcctacacagttgtgtgaccatctaattctagaacatttgggtcacccctaagagaacctcggttgcatttgccgtcagctcccacgccctcccccagcccccggcggccgctgtctgctttctgcctctgtagatgtacctgtgggcattttgtacacatgggctggcgcggtgcgtgtctggaccctgagcgtgacatctcctggtccttgtgggccatctgcggcgtgacagcccttcctgcttctcgtggctggacgacccgggtcgggggagctgggtggggccacgaacccgcagctgcctttctgctccgtcctggagttggaccagtgagggcctccccaccttcatcatggcagtggctgtgcccccttgattgcagcagtggctatgtatcgagtccccccttgatcgcggcagtggctatgtattgagtccccccttgatcgcggcagtggctgtgtatcgagcgcctgctgtgcccctggcgggctcgctgtgcttctcacacacccttcgcctctggtggatgagaactgagcctccggcttgcccgggtcccacgttgtaagtggcatggggaattccaatccccagcttgtgcctgagactccatagacccctgccccgcaggtgtagcctcctccctgcagaaagggagaccgggcctctgtgaaagccacacctgccggggagtggggtccctctggtgcctgccaggtgcccaagagagcaccaagccccagcgggctagcggctgagctggccagctcagcggcccgcagccagggctgcctcctggcgacggcacgtcctgggcagagggggcagggatggaagcagggcagctcccagagctgcagggggaggtggcaggagaggtggcagagctggcgcacccagggaacagcagaggctgtgctgccccacgcggcccctcctctgggtgccctgggccccagccgcctgcggcaagccttctcactcaccctgaccctcctctccagtgcacgcctgacgacttctggaagtgcctctcggttttcgccatctgactgcgattgcctccgcgtctctcctctcattgtgtctcaagggtgtagtttaaaaattcaattcagacgaagctgtggcatgcgctgccctgggagaaaggctgggaaggagaggaagaggaggccctcgctgggatttatttttctggaggcgctgagacgtcttctcttcttcaaagctcagtcacccgcccaccagcgcgggccagacacccttccccagggccagcctgaccctttaacctactcacctactcactgccgaggctggggcgctttgggcaagggcagacgcttgcgaatcgccgatgcatgccccagcactttccttccttgctgtgtgatccgggcaggccgctttgcctctctgagcttccactttttcttgggtgaggagcaggtctctacctcatgaatcgtggggactgggtgggaatgtgccacagccgggaatggtggcatgagtgtcaatgcagcaggcctccaccctggctcccacccccgcctccccttccctgccccccaccctaatgctgcctcctttcaccttccccattcttgccacccccacctcctacgtgcctcccctacccctccacccactgccaccccttcccctgactccccgtcctacccctgtgacccccatcatctgccctgggagggcgtgtgcttccccggtggggttggaaggtgtgggtccgccatggcttccccccgtcaatggctctgggccgggagcctgcggtggcttcctctgtcccagtggtgcagggtgcaggcagggccaagtggctgcctgttggtcttgactttctgggagaaatggggcttggagtgcccgggccccacgcagaacattctagaaggaggctgcaggtttgggcgtgatcctgagttgatcctgggttgcacccccagccccttcccagcgaccggcctgggctgcagtctgagccgaggcgtccctgaccctgttctgccctggtggctattggtctctttgttcctcccacattgtcccagccaccaaagggacgtccccggggccgcccagccctcccttcgacgcagctgggccagctcccgctgtagcccagactcctcgggtggcaccgggtccttgggtacaagcagggacctgtcccctcctcggaatggcggcctggccaccgcctccctccctgcctctcctaccaggacctcttctgcacagacacccaaccacccccataggcatctgaaacctcagcctaggagtcccaagactggggggatgggtcccagccctgtgtcccaccccctgcgctggacagattctgactcccctctaagcctcctgggcgccaggcctagcctgccttgcgggtgtgtcgggatccccccatcatcccttgtccttggaggtgcttgttgactgactgaataagaggtgtttgccccgagggtgccccgggaacgcctgtgcgtggagccaggccctgtgcttccagctccccagctccacaccctgaaggcagccctgagccaggctggggtgtgacagctgtcgggcctgcccagtgtctctgcagagggcaggccgtggagcctccaccgccgcccccactgctgtgtgacgaagccagggctgctgccaggcaccctcgcaagctgtgtggcatctgcttgccgtgtgcagcaggcggcagcctcccgcagggacgcagcgcccgtctgccaaggcggccgggggcggaggtacggggagccttgcgtgtcctcagctgctccaggaggcacaggcagcacctgggaccaggcaccccctccctgggaaacagttgggggcgatcgtgctgcgggcctttgctctgggaggccggcgctttgggaacagggtggctccagagccttcccaggtgggctggagagccgccgtctggaggacagttctgagcaggtgctcctggctggcgaggaagccccacctcaccccagcaccacccatggtgcagggagctggggttgggcgcacaagagtctgagcccgttcccaccccgcctccttgtcaccagcccggtggccgggactcatggcttccctgcccacacttcgctcccttaacaccggccgggggctcatggtacctgccctggaagctgccagaggcctctccaagcaggtgttggccgctgtgttacctgcggcaggggtggcccagccacccatagcccggcttgggccacagggacggggccgacaggtggtggcagtggggctggaactgctctcttgtcatcgaggcccgcggggccctgtgccgccttcccctggtggtgtctgctggctgcctgcctcgtcttgtcactggctttgcaggcaagaggggaggcagatccggttactgtcctgtccctggtgccacctgaaaccgagatcccagctgagtgagtggggactacgtgtgcggggaccacggagcagggaccacagacccatcctcatgagctgccgtgggaatgcttccaccgtggagccggcctgggcgggggagaggctccccctttctgccgctgcctcggaaatctgcctctcaaagaaaacagcaaaacaaacacggaggaaggatcccgcctggcaggcgcgcctcgcgtgggtgtcagtctgcggcggcggcggctctgcaggcgtctggagcccgtctgtctcccgcgcaggtgtgagcgccgcgggcgtcctcatggtgcctctccgttctcctggcccgggggccagagggctggtggtcaggggaagccagagccaaaggggagcaaggcccacggagaggaccccaccacctatcccgaccccttctccgcatagcacagtggggagccctgggcagggtggaggagcccagtacttggcgtgtcagcctttgggggcctgtcctgggataatggaggcaaggcctcccctagccacgtggacataagggtgatttttttccggttttccctgatgcaccctgtgcctccctgcagcccctgtgcccgtttcttcttcctcgtcctaacgtcccacctccctcagggtacctgtctcagctcctttggtcccacgcggactctcccggctccatccggctcccagggtccagcatctaagctcacgctgttcagcacataatccgcccccggcaaaacgcatctccagctagaaacccgcacctcccgctgtcagtttgggtttgatgactgtggcacgtgatggcagggtgggcatgggagcccgccactggctgacgcccccccccgcccttttgcagctgtgaggtggagcctcgttggtggacgcaggccgcgggtcgggagagccctgccctgggagccttgtagggcggctgctgctacttggtctcctgcttctccctggaacgcagggggtcgcggcgtgacttcagccttgcgctgtggtgtgcctgctgtcccgtgtaccagggctgcggtgactccagaaggtttcccagcctgttcttgtcacttgtgcgatggggacttcaccttccagacccgcaccattcccagtgggtggggggctgattggctctttcctctggggtctgctattcccgttccactgggcagatttcaaggaaagtggctggggtgactcagctcctgtcccacttccctactcactggctggcggcttcctgtggctcccgtgggcctcctaggccaaggggctggacctcctctggccgggctcctttccacatccatgtcgccacaagtccgcccagggctgggttcccaggttttgggtggaaacaggtcggtaggcgaaagtagaaagtggaggagcagccctggcagacacaggctctgtggacctgccccgccctccctccagctgttccagcctacaccggctgagggcccagctggcatcgccgttggtgggtctgctccagagtcatggcacgtggcacactgagtctcctgctgagtggactctgcccagagcttttcaaggttgagctgggagctgagcatgatgctgcatgcctatagtcccagctgctcggaggctgaggtgggaggatcacttgagccctggaggttgaggctgcagtgaggcatgatcacactgctgcactccagcctgggtgacagagagagaccctgtctctaaaaatattttgtaattaaaaagaaaattttaaacactaacttggggacagaactgatgacaggaagagcccccaggttagcagacacacagggtcccctgggttcccaccctggccggcacctgcccctgcatggttgaaagcagggggcaaagtgcacctggggaccctccttccaaggggctgagacaggggtctgtcgctcacccatctgttcaagctgcccctcacctgtgtctccatcggcagcatgggctaggcatgggctgtggacaccggagccgtcccctagggctctggccctgctaagctctgggcagcccccggccatggcatctcacaaagacgttccagggaccctctttagggaagcacgtccggtagttaccgttctgttctctccaccgttcccctgagcagttgcagcggggccgggccctggggtgggtcggggccgtgcagaacagcggctgggggaatgcctgagccgagctcggctggggagtctttacctctccgggtgccctgccctcccctttccttccatgctcgctgctggcctggtcagggcctgtggctttggggcctgaccacggtgaggccacgcccgcctcggtctacagtgcgctggagagtggtcctgtggcgtggcccccaagcgcctcttaaagaccgatgactcttcagggggtgccggtggtttttgcctggcggggtgggcctgagcctgggtggctgacaggtgctgctgtggcgctgcggtcctgtttttgccctcaatacactccctcgctgactttggggtgtcagctgttaattacatctgcccgtgggcctcagcgctaatcttcgaggtcagacagcagaggtgacgcggacacgggctgcctcttgtcatctccaatccagatccgtttcattgacttaactcctggctgaataccgccagttaattacagcaatcacagaccttcctgctccagccacgcggtgagaatgagggttcgagggccaggtgccagcctcgctaatgggcctggcgttgtgggggcatcgatcgaggctgagctggctggtctgatgagtagcacccgccagcggggattaggccgctgagtgtcaatggcctgccctgccccagagaagctccccacccttcacccacccctcttacttcctcacccgcgcctctttcttcctcacccactggtgcttagaaacgaggctcattcagagactctggagtggcagctgccttggtcatggcaaggggtctctctgggaggtggggttcagagggatggggcagcatggggtctggagccaggcagctccaggtctctgtgcatccccttatggcatgggctataaggttctccccatttgtagagttggggtacagagaagtctctgaggttcctggggcttggcacgtggtggggctcggaagctcctgctcccagctccccactgtccggtccccagggaggacccacagcccacctggccattggccccaacttttcccctgggcagcaggagcccggatcatgagctcttggcagcctctgcctgggtggggtggcggctctcggtgtgttggttttatttcctttttcggctccacagcacaaatgtccacatttcccctactcacagctactggaatctagatgggaacaccctgggtttgggccgggtgcacaggagggctttccatgaagtagggtggtggggcaggcaccgttactcatgcctgtaatcccagcactgtgggcaactgaggcgggaggatcgcttgagcccaggagtttgagaccatcctgggcaccacagcgagaccctgtctctaccaaaaacaaacaaacaaacaaaaaactagccgggcctggtggcacgtgcctttagtcccggctcctcaggaggctgaggtgggaggatcacttgaacccaggaggttgaggctgcagtgagctgtgattgcaccactgcactccagcccagcctgggcagcagagtgagatcctgtctcaaaaaaaaaaaaaaaaagagtgttgggcacagtactgttgacagcggccacaaggtgggcccagcctgtatgccaccagctgagggacggaccagtaaggagtgggtggacagaggcacacagtggactgtcacttagccgcgggaaggagagattctcttaggtgctgcaatgtggatgaaccgtgaagacacggctcccagtgagaggagccaggcgagaagggccacgcggtgggattcccttgatgtgaagtctccggaacaggcccttctttagagacggagagccaatgcgtgcggggcctggggagacgggagtggttgctcatgggtagggggttccttttggggtgacggaaatgctctgaaatggattgtggtgatggtcgcacaactctggacgtgctagaaccgtggggccgcgcgctgggtgggtgaattacgcgggatggaatcatagctcggtgaagctataacaactgaaacccaagagccatggaggttccatggaatttttttttttaaacaacgatcctttccctagtttttattttttttccccaaaaacttaaagtgaactttttctcaaaatctaaatacatacagaaaagcgcctagactgccagtgtccagaacgaacccacagatcaggagggctgaggcctgttctcctgtccccaccctctgcccctgaggtgaggggcgtggtgccccgccctgcagccagcgtttcccctcctcaggtggatctagtagcccgccggcacagtgcccagtcccaggtgttggcccggtcgacttggggtggtggagttctcagggtgtgggcagtggttggctagtccatctgggggtctggggttgggtcacgcctcaggggcagcagccctcagcctcattccccacctgggccagatcctggtgggtgggagcgtgatgaggtgggggccttgccttgggcagttcgggggttgctggggagaatgtgaacgtgcctctgggccgctctggggcgtggccgatctggctagacggagtgtctgttgtggagctgccctatccagttgtgcaggttgcacacaagcccaggaaaccacattaaagaggcccagataccgttctgcaggaagcaacggacttgccctcgggacagggcagctgccccaccccaagggagcacctttgggagagcaaagttctgtttccacatcgggatgcctgtggggcctctgcctcctggtcacgccactaaggccactttggctgcctgaggcctctgggcaccccctgtgagcagcagttttctttggtgaatgtgcgcgtgcccactccggacacagtgaaggggagatgaggctgcttctgcccccggaaccaaggccaggtctgaacagaagtcgggcaggatgccgggagctgatgggctggggtcctccttctggaaagggcatctacctgcttctaccacgcattctacctgcttctaccacgcttcctatgcatgcattctacctgcttctaccatgcttcctatgcatgcattctaccatgcttctaccatgctttctatgcatgcattctgcctgcttctaccacgcattctacctgcttctaccacgcattctacctgcttctaccacgcttcctatgcatgcattctacctgcttctcccacgctttctatgcatgcattctacctgcttctaccacgcttcctatgcatgcattctacctgcttctaccacgcttcctatgcatgcattctacctgcttctaccacgcttcctatgcatgcattctacctgcttctaccacgcttcctatgcatgcattctacctgcttctaccacgcttcctatgcatgcattctacctgcttctaccacgcattctacctgcttctaccacgcattctacttgcttctaccatgccccgggctgtaggtgcctcccaagtggggcttttgcaaacagaaggtgcccaattgtaccacacctcctcagatggcagcatctgtccccgtgggcccaagtgcaagcttgcacagctgctgtgacacggggtctgggtgcctgaacgcacggtgctgctggtgggtggacatgtgcctgctcctgctggaacctgcccccagtggacactgctgtgatatcatagaatccagggccacctctgcggcctgccttgttggggaccttggcctgtgctggacaccagttgggtgctgtgtgtgcctcttgggggcggagatctgccctgggcctgtgtcagggaagggggcttggggagggtgagccggacactgagctgtgtacaagtccacaaccgtgtgagcggcacgaggtctccccgctgcaggctgcaggccagccggagtcgggggtgtgagtgtgcagccgtgcaccccctgggcttcgtcaggctgggcagggctcttgacccccaggcagcagagcttctggaaccccaggcccaggcctcactggcagccccagcctctggggagctgctctggtctcggtcacgggggcttgatccccacaacaagggggggggtgggggctccggaagcgaggctggtgcctggttggggacaggaggactcttgcagcaggtgcctttggacaccccctacccctgccaccacacacacttggtccccttctgacctgggcgggagggagacaacagaggggagccctggtctgagaaggcagttttgctccatgaaggaggaagccccttcccttagggcctgggaacactcctccccgtcctccccggtccaaacccctgccgcacctgcagatgggccggggcggccctgcccgtccatgccccctgtccttggggtatcctcttggctgtagccaccagtcacccaggcccaaagccctcctgcctgccctgcaccctccccctgctacccgcggggctgcagccacccattctcccatccctgctgcgttttgggggctgaggggttctttctgaggcgacgggcgagttccggggtaggtcgtggtggtggttgtaaacagcgaacctaggcaaacctcctgatgtgtacccttaaagatggtgaattatatctcattttctgaaatttaaaaataaatggatcttttaaagaaactcccccagggtcaccgtgggtcaccctgaatggctgccatttgggcttcctcagccaccaccgcactgcatccctgcttggctgggccccgtagaggggtgctgaccacttctttttttgttttgagacgaagtctcgctctgtcgccaggctggagtgcggcagcacgatctctgctcaccagaacctccgcctcccgggttcaagcgattctcctgcctccgcctcccgagtagctgggactacaggcgcgcgccatcacgcccggctaatatttgtatttttagtagagacagggtttcaccatgttggccaggatggtctcgaactcctgacctcgtgatctgtctgcctcggcctcccaaagtgctgggattacaggcgggagccaccgcgcccggccagtgctgaccgcttcttgtgtttgttccctgctgcactgcagccccatgtctgccctgcttgatgggagcccccggagggggcgccttttcctgtgaccccccaagcacatgggggctccccgggaagactcagaggcttggggtctctgctgcttacacgtggagctgcctctcggtggggcagggtgtgtggcccagctggcctgtgtgtcctgggatgtccacaggcccttggttcatgacacctcctagaaacacgtgtgttctctaactctggggctccatgtctgtcccggaaggtgctaccttcgtctctcactcagggacgtcaggcactggtcctgcccgccctgcccaggctcctcctgtctggtggcggtgggcggccctgggcaccagagcatctgtgctttgtgccacgtgagcagggcccgtggggcaaagggatagggagtgcccggggtagactgagctgctgacccgatcgggcctcaggagaggtgtctcctgcctgcctgtcttgggtgggggcccatgaggctggtagacctggaggtctggggcctcacttggagcaggggggcagctggagcccaggtccccagctggcactgcacgtggctgtcactgcggctcccactcaggccaccgtcttctcctccacagggtcctcactgagcagcgagtcgtcccccgtgtcctctccggccaccaaccacagctcccccgccagcacacccaagcgcgtgcccatgggccctatcatcgtcccccctgggggccacagcgtgcccagcaccccccccgtggtgaccatcgctccaaccaaaaccgtgaatggtgtctggaggagtgagagccggcaggtgagtggggcggggcagggagcctagcgtcctctaagtggggaggctggattcaggcatccattgggggctctggagctttcgaggttgagtttacattccagacaccccctcccccaccctgagtttccgtctccttctctgcaacgtgagggtgacagcggcaccctcctggaggccctgtgcgggtgagtacatcggcccacgcatcagtctgtcagaagaaaccacccgctgggggtgtcccgttattttctcctgttctggaggccacaagttcacaatccgggggccggcagggctggtttccccagaggcctctcctgggttgccggtggctgccttctccctgggtcgtctgtggtgtctccatgtctgggtcctgatctcctcttctcataaggacaccagtcagctggtttagcgcccaccctaatgtccttattctcattcggtcacctctttaaagaccgtgtctccaaatgcagttccgttctgaggccctgggcatcagggctctaacacggatttgggcgggggtggcagtccagttcaagctgtgaaagtggtgtttgcacgctgagcacccggcacactagctgtgactgtcatagtctgtgaactgaacaaagaattgaggtaggaaagatcccagcccagacgctatcagaacaagacatctggtgggttttgtgtttctgtcttacttttggggctcccagcggaggcccctccccaagttttcggggctccttatgtctgtgggcccctcgctctgcactgactggggcctgcctgtgtggaaggagctggcactgggagctgctcttctgccgctgcctggggcctgtgcgccctcaggtgggtacctgcagctctcccggccccccacccctggcgcgcagcctggagtgggcccttcctaattaagagcgattctcaggggctgctgtcacctggacttttctgctgagttcccagagggacagccccacttggaaatactaattaaaccacaaagaaggtggggaggaggggagagtcactcttgcctgaagctccctctcccccaggggaggacatgggtattggagccacctgctcatcatcagggcctgtctgccctctatccccagaggtgtgggaagggagccagcctcagtccacaggtgacagcccccgggcaggccctgatccagggtcccagtgggaatccctgggagctccggactgggacccccggggcctgacgttgcctctgcttcctttcacgccttccctggctgaggggacaaacctgcccagggtcctcaccttgctggacctcctctgcccctgaagcctctcgtagtttgactaatcctcatgtgaggtctggagaccgaggggcagggcgtggcctggagggtggaccctggccacaggggcctccacaccccacagggcttggagcagcccaaggcggccctcgtcctggtttgagggaggctgagggagttgttaccagctccgctgcctccagaggccgccccccagggccagccttgaccccatgggccctgaatcacccgactcaaacagctgaggctccttgcgccccactggtggggcctggctgctggtgccagcgcccgcagctcatgggaggccacttccctgccccagcctggaccaggagcttctaccagccaggaccctgcacccagccactgccttgaccccgaccagagctcctggcctagacccaggacgcctcgaggggattccagcgccttttccggcgactcctccgctctgagctggtccctcctcggagggtccttaccgcctcgggaacattgagctaccccagagcagagcaggggcgcgacaggcccgccccagcagtgtaccaccgcggcgcttaatggaacacggtgccgccagggaaggcgcggggccggcagctggattagcaggtgatgtacggctcctcgctcgggcacagaggctcagcggggcatttaatcctctcggagtggggaggcagagagaggattcccctcccacccggcccaaagctgtggccatgagtctccgaggctgcggacgtgggtggcagttgccgggccggaggcttctcggccccttctcggggtcacccctctctcccaggtgtagtgggagctgcgagaggagaaatgagatgaaaaagcctgttttaaagctaacagggcatgtcccgcctgtctgactatggaacccttgctctaatcaccggagaatgacggatttgctcctccccctccccctccgcccctcctccccctccccctccgcccctcctccccctccccctccgccttctttctttcatcgttgcagctgcggctgcagccgctgctcagaaatgaaaagctgcccacagatgcgccctgatgcgtctgtctgtggagacggcagtgagaccccggctgccgctatcggggtgcctttggggtagctgccgagcctgccgggccttgcctggatggggggcagccctgtgcctcactccaggccccgctgacctagttcccaggtgtctgtgccagggttggccgggcgccagccagacggaagccacagacatgtgggtctggctcgccgggcccctgccccgcctgctggctgccccccagccccccggactccctgtttgtcctcagccaggccaggaaggtgccatctggcctgcgagcagggctttgtcctcggctgaggggagaaggggttcaagggccgtgtctgggctggggacaggcccctccttgtggcggggcggctggggccctgtgctttgccgtttgacccggcccacggcgcgggcagcatgcggaggagggcggcaggcctgggctgttggtagtttgaccctgggtgctgtcctcaggtcgaggtctgtcctccagccctcttctgactctggccacccaaggctgggtgatgattgaagcccctggctgtcgtctccctcctgccctggaggcctccccaccagcctgggagggggagtccaggtaccccgggtgcctgagcaggcgaggcccctgttctgggcatccagagacccactagctttaggcctggtgttcattggggtgctacttggatgctggggggccaggggccactccgtcttgttaagtccatcccagaccctaggaacagggtgtgtccttcctcgtgctccgttcctcagatgtttggccctatgccaggcagggtaggggcgtgaggcaggatctagaagcccagcctggaaatagcctcacggggctggggtaggcaggccagcctggcaacacacctgccatgtccgggcccccaccctgctggtgcgtcccccacatgcccgtgcacagctgtgccatcaactctgctgccctgtgagtcccccgcatgcccgttcatagccgtgccatcaactctgctgtcctctgagcaggtgccgtgacgggcacatgccattgatgtgtgcacgaggcacgacaggatggccaggtctcccaaggtcaggttggcccctcggccactcccccactaccccggttgctgacaccggctggagaccccaaggccaggcgctggctcctcaataggaagttcccggccccacgcagggcgtcagtgcccatgtgtacctcccaccctcgagaccagcaccctggagaggcaggtcagaagtcgtgaacccaggaggaccctacagagaaggggggccggggctcagcccgcgggaagggagcagatgctgcctctcattgaagattccaggcggcggcggcggcggcggctcctccagttaatcctcgctgactgtctcctggagggtggagagaggggaggcgccggcccgggctgcctgcactgcctctgcgcgggtgccatgtgctgctgccgggtcaccgtctgccgctatgaagatggatgggcccaggaagaggggctggcgggtcagggacacaggcacggcccctgggagacagatgcttctccacggtggggcaggtctcagagcccctgggccatcattcctgctgatcttgtggggagacggccatggcctccttgttttttgggtgtttggcatttcgtggctcagggaggcagagcggggctggtgctcttcaggagcactgcccgctgatcagcagtcgttacctgacatggccagatggaacgtgaggaagggccgggttcccgtggctctgcatccctgggaagctcagaggggccagcgtggccatggctctcagacacccccaggtcagggtaggcctgggcagtgctgtccccacatggggaagatgctggggctgagaacggctgccccagtgacagagtgacgcctgggttggcagccatccagagtccagagcacagcccccatctgggccgccctgaggctccctccgcccccctcctcccccctcctcccccctccccctcctcctcctcctcccccctcctcctcctcctcctcctaccccctcctcctcctcctcctcctcctaccccctcctcctcctcctaccccctcctcctcctcctcccacttagtcacacgaataacaggaacaagcaaggccttttcatgctctggtttctccgggctggaccctgcgtgtgtgcggggcagcctctgcgtggctaggggtggcacggcctatccttgaacttggcagggacctcagcccggaaggtgggctttgggccactgcctcctcctgctttgtgcctggagaagacccctcatctgagtcctctggaccaccttcccagctacacccaggtccactgtgtccaggagcctgggacaggcgagctgttgccttccctgccccaccgtgtgtgtgaaggccggtaccccagctggccagtcagggcccagctgctgcctgttctggtgggctccagggccagggccaccccaggaggtggttgggggcagaccagcaccttcggcccaggggcagtgccagcttcctttgcccctgccctccacgtgggcaccagggccaggacatctgcggccaggtgggcagctgtcggcgcagttgacgtcttggctacatcgtggcactcgcttcacggcgtgctgggtgccaacggtgtctgcttccccgggtgtgtgtctggtgtgaccttcggatgtccacaccaggaggggtggaggcaggagcccctgccaccctgcatccttcacctgcacacattgtgtttctggggggttctagttcttttgctggactgaggaggcccagggagggagacggatcccgagacgcacttcaccccagacctgtcgcagccacatcccctttcttacggttctgcttcccacaccacatgcaccatgttttgcgtagaaagccttagggaaaggatgtttctagaacatgaactaaatctagcgccttcccgtgagtcaggagacctggctgtgtcctgtggtcagtggcctataccaggctcctgccctgactggacgctctcctcccgcaggatgccggctccaggagcagcagtggaggtcgggaacgcctcattgtggagcccccgctccctcaggagaaggcagggggaccagccatcccctcgcacctgctcagcaccccctaccccttcggcctctcccccagctcagttgtgcaggattcccgcttcccgccactcaagtaagttggtcggcggggacttcggtgaggtggccaggtggggacacagtgctcagggtctgggtccccaggcagcctgcggtctgcacagatgaggctgtgcctgctagatggttgtcggccgctgagccctggggattgcagccctgtctgtgccccttcacactgaggtggcagtggcagctcgctccccccgctgcttaagccccgtcctcgttcggggtgccaggagtctgggtgccgactgagcgccaggggtgatgcagggagtttagccgtccccccatgcaggagcaggtgtgcactcacctgtccccaccttgcccactatccccgcctgcagcctccagcggcccgtgcaccacgtggtgccccccagtaccgtgaccgaggactacctgagaagcttccggccctaccacaccaccgacgacctccgcatgtcctcactgcctcccctcggcctggacccggccactgctgcagcctactaccaccccagctacctggccccacaccccttcccccacccggccttcaggtgaggcatcccccacgcgccctctcgtctaggtgctggcctgttcctggcaagatggaacctggcggggaaggtgtttcttatgacctgagagccaggctcctaggggagggtctagagtagcccctgaaatcgtccccagctttgagcctaaattcagccctgatggcccattaggggtcccctcctggtagacagtcccccttggtgactgtactgtcatccttggctcctccccttctcaccggggggtccattgacagcaagtcactgttaagagagcagggctttgcccgtgggagaggcgatgctttgctgtgtagcaggagacctcggtggcactgtggtctggcctgggtccgtggagaagctctgcccatccttgtcagaggtcagaggggcctgtagtcatgtcatggaccaccccacgtcagggcagcccagcctgctcgccagccttggaagggcctgggcgcttgaccactctgtgctggtctggctgagccgagggaggtggcaggcggcgccctggaaccccaagctgtcggcacctagcagcctccggcatcaaggggctttggggctagcagcaggcatggtcttcatccccagccattttgtcacgttccccacgctcaggcaggtgtgtgtacctggctgagacacacctgtcgacagggctgggtcttccccttggttcatttgctgctcacagccccgtcttctctgcacaggatggacgactcctactgcctgtctgccctgaggtccccgttctaccccatccccacccccggctccctgcccccactgcacccatcagcgatgcacctgcacctctctggggtccgctaccctcccgagctctcccactcatccctggcagcgctgcactcggagcgcatgtctggcctcagcgcggagaggtaagtgcgtctcgagccgaggagcccctctgccctccctgtcccttgatggcagctgggcagaaagcctgggctggaacctgactggactccttggccatgcctgtcctcacagtttgtccacctgccaaatgggacaatgatcgttcaggctctgctctgaaatagcgcctgtctcggtagccgtggtctcctgcagtaaacctgcaggccgaggagctctcgggcgtgcttgggcattttgtaagccgctttgattgtatggaccttaagttcttcctgcaccagtgaaacccggctcacctcccgtcactgttcagattagcgccctggctcgttcctggttatgctttttaagggcctgccccaggtccgtctcttgttcctggtgcagcagagcccccaactctttccatgtgctgcaggctgcagatggacgaggagctaaggcgggagagggagcgcgagcgcgagcgcgagcgtgagcgtgaggctgaccgcgagcgggagaaggaacgtgagcgcgaacgcgagaaggagcgcgagcaagagaaggagcgtgagcgtgagaaggagcgcgagcgcgagctggagcgccagcgggagcagcgggcccgggagaaggagctgctggccgccaaggccctggagcccagcttcctgcccgtggccgagctgcatgggctgcgtggccatgccactgaggagcggggcaagccctcggagcagctgaccccaacccgagcaggtacctgggcgtgggtgggctgtgctgggcaaggtctcagccacccgcggggaggagccctgaatcgcagcacctgccggttgccgtggtgtaaatgttccccagctgagttcgccctaaaagcgtggtgtggctgaacatggagtagggagcagaggcacgttggcacacgatgtagacacagtggatatagctgaccccaggaggacagttgtgaaatgtagccggggcattaggaagggatgttttgagtgcttcgttgattttatttctctgtaagtttacgaaacaattgtccagtaataacaaccagcttttgcatgtttcccggaaatttaatagtctgctctttgagccagcatgagctggctctggcaccgcactggctgggcaagagttttgccagccagccacggagcgtttccttccagggacaagacatgcttcttgaaagctcccgtagggccccttctgaatatcttggttctggctgcgggaagaaccctttggaagggctctggtttctctgggcagttgggtgagagaggacggggagggagcatgctggcccacgtggctgagatcctgcttgaccgtgtttccccccacagagaagctgaaggatgccggcctgcaggcgcccaagcccgtccaacaccccttgcatccggtgcccaccccacaccacacggtgcccagcctcatctccaaccatggcatcttctctctgcctagcagcagtgctgccacagccctgctgatccagcgcaccaatgaggaggagaagtggctggcgcggcagcggcggctgcggcaggagaaggaggaccggcagtctcaggtgtccgagttccggcagcaggtgctggagcagcacctggatatgggccggcccccggtgccggcggaggcagagcacaggccggagagcaccaccaggtgagtgagccccaggaaggaaggagggatgagccttcacgttccgatttgttcagcgtgtattgagcacctcctgtttgcccaacatcctgccccagcgtttctgcctgcctctttcatttctgttctttcatcttcacgttataatgcctgtcttgcctatggggaagctgagactgaggaagaaaatggattgctcaaaggtatccccaccagtaagtaaagagaccaatcaagtccatgttgagagccagggcactgcacacgcagcctgacctagttcccaggaggccattcacagcagatgaagagtgcaaggtagaagctttaattactaataatacctgttctctccatcttcctctgcttttgagcctggacttctttttttaacaagaaggggacagcttttgattttaaggaaaaaaatgagttttattgcttttgtattaatagtaaaaacacatgcccgttttctagccctttatgaaagcatttcccaggaaactgtgtggtggtcccttggaccccggctgcagacacaggtcttatgagctgggccccagtgcccccagtcctccctgcccctgcctgccctgggattcctgccttggggctgtgctggtcccaggcccccacgtcatatacccccagggctcactctgaagggctgagctaagatcctcagccagagttggtgggaatgacctgccagccttccatagctctgctccaggcccagctcagggacctagggacactgattctgttccctgagcctcactttcctcaactgtccacaaaggagggtgggtaggatgatttctgagcatctttccagctctcaaggctgtgatgctgtcctgggataagaaacccttgggctctgggacggaagcgtgttggtggtttaaaatctgtcctcccttctgcctgcctccgttatccagtagggcagcgagggaatgcgcccccgctgatcagggatgactgggagtgactgtcaccaggccacagctaagtctccctgtggctcacactgcccggcacggccgaagtgagatcccttctgcctctcccagcccccgtccctgaggcctctcaggctcagccttgcctactacccagaggactgagggcagccagctcctacctggcatggcctgataacatcagggtgccctgactcctgtaggcatcttcttcctcagggctccccagggccccagcacaggtgttgtgactttgcccacccatggactgcttccagccagtgtagctgccccatccggacctggggcatgatgggaagcagggcctggcctcccctggctgcggtggttcccctgtggccggctgcacacgtggccttacagcattgtgaacttgggggcctgacagggccctcatgctccaagctagaaaactgttcagtgcttggtgtggcgcatgaaatatttattctcctgcaggtttcattcccttgctgtttacttaaggacacagcttcttcctgtggttccctgttgtattctgctaagagggacagcagcgtcggatttgtcccttggcctggagtctggaataactagggagagccttggtggctgtgtttaaacagggctcccggggcaggctagagatccctgagcccggccgtgtgcctgctgtggcctctgcctctttcttcccctcaagctttgcccagggtctctgcacagtattggtccagacatcctgtgagtatatctccctttaaaaaaaagaaagatagccaggcacagtgacacatgcctgtaggcccaactactctggaggctgagatgggatgatcgcttgagcccgggagttctcggctgtagtgtactatacccactaggtgtcccagctaagtccagcacaaatatggtgacctcctgggagcgggggaccaccaggttgcctaaggaggggtgaaccagggcaggtcggaaatggagcatgtcaaaactcccgcgctgatcagtagtgggattgctcctgtaaatagccactgcactccagcctgggtaacacagcgagacccatctcttaaaaataagctggaaaaacaatactaaaaatagccctgtgagtagattaaatcttgttttaattgcactgaggaaacaagccatttagtgtaactaaggggcagcttcttgtttaatggaagggttctgatgttagaaatcccttctttccctccctgcctcagcaggccttagcctgggtccttgaagacactttgaggcctctgccacaggccacttgggcagtggggtcgctgcagttgtgacaggggccactggggggcagtctcggcacaggccccatcctgactgggaggatcttcatttcacagtgggtttggctctggctgggcagacactggaaggttgtcttgtggctgcctgcggggacagtggggagggaggagtactgccctgtgaaggtggccagcctgccctgtgtcatgtgtccctacaaggcacagcaggaggagagggtgctggtggcagggccacagcccagtatatagagtgggtttccccatggaaagtgcggatgagcgcttgcccttaggggaattcacgcaagcaggtgggaaaatcgaccgaaactggatctgtcccaggcctgagagggtctctgccttccctagcagcttaggctgggagcctccctatcctcttggagcagcctgcacacacctgccgcaggtgttggagggccgggcacagtggctcactcctgtaatcccagcacttcgggaggccaaggcaggtggatcacttgaggtcaggaattcgagagcagtctggccaacttggtgaaaccctatctctactaaataggaaaaattagtagctgggcatggtggcacacgcctgtaatcccagctactcgggaggctgaagctggagaagcgcttgaacctggtaggcggaggttgcagtgagctgagcttgccccactgcactcctgcctgggtgacagagtgagtctttttttttgttttttttgagacggagtcttgctctgtcgcctaggctggagtgcaatggcacggtctcagctcactgcaacgtctgcctcctgggttcaagcagttctcctgcctcagcctctggagtagctgggattacaggcacccgccaccatgcctggctaatttttgtattttttagtagagatggggtttcaccatgttggccaggctggtctcaaactgctgaccttgtgatccaccctcctcggcctcccaaagtgctgggattacagggatgagccactgcgcccggccgagtctttaaagaaaagaaaggaaaagagaaaatgaaagacagaaacaatgatccttggggtggagtgtgtgtcccctccctgcagccctgttggcactggctctctaaggggctgcgccatctgtgtcatcttaggagcggcaggcagccagggaagcctgtggatgactgaagggtcttttctccctgactgaagggttggtttcactccctaggccaggaccaaaccgtcacgagccaggtggccgtgaccctccgcagcactttggggggccaccacctctgatttcgcccaagccccagctccatgctgcacccacggccctctggaaccccgtgtccctgatggacaacaccttggagacgcggcgggccgaaagccactctctgcacagccacccggctgcatttgagcccagccgccaggcagccgtgccgctggtgaaggtggagcgggtcttctgcccggagaaagcagaggaggggccacggaagcgtgagcctgcccctctggacaagtaccagccacctccgccgccaccacgagagggagggagcctggagcaccagcccttcctgcccgggcccgggcccttcctggctgagctcgagaagtccacccagaccatcctgggccagcagcgggcctccctcccacaggcggccaccttcggggagctcagcggacccctgaagcctggctcgccctaccggcccccagtgccacgggcccccgaccctgcctacatctatgatgagttcctgcagcagcgccggaggctggtcagcaagctggacctggaggagcgcaggcggcgggaggcccaggagaaaggtctgcctccccgcgggccccgagctgctcagggagagccgcacagtggggatggggagcctgcatgccagccacctgcccctctccgtccactcctgctttttgcctggggtagtcccaggccccaggtggcaagtgcactggcttctttgtagcagcatgacaccctcgtaggggaggcagaccctagtccccgtgcctgtcctgcctcgatgcaaattgtcccaaaaagccaaatcaaagcccgcctgtgaagatagttccgcagacaagcatgatgaataagtgatgagcggaggctaataagatagttttaaatattaatagtgcagcataacaggagagccggcctgggctcagcgggggctccacatacagggccgctgccacgagctgcagcaggtgggtcaggggttgaggacgcggcggctggcactgccccgggtcagggtaggaggtcaggcacttcattcttatttctgcttgggggtggggcgtcctcagccagcggctccctgagttctccagagagccaggaagagcaaccgagcaggcgagagtgtgcagaggggagcaggggctccagcccagttttcttcctgatgctgaacactcaggtcctgtccagtgctgagctcagcctcctcttcaatagaagctggggcacaggcggtcttcctggttgttggtctaggctggatggagggcccagccaaatttctctcccctactcactttgtaaaggaggagggagataccccagcgcccctgggcaggggctctgctattgttctctgtgtcttagagagctcaggcctgtgtgtgcctgtctcctcccaggagatggactcagatggccacagcatgggggagtgcatgtgcacaagcagccctgtgttgccgtggacacagccccaggcctgtgtgatgaatggttccctgccagggggaggagggaggtcttgtcagcccaggggaccacccagctactgggagccatggatcccagggaagcctggtgtctgcggtcctgcaaagccccaggactgggttaatgttggtttccacctcggttgaaaggaactggccttcagggtgttcaggtgccagcaggcctggcctgataggtgctctgcacacatgaggccctgcgggcatgtccactggacagatgaaggctctttgtctggctgaatacaaccatttctccatcagggtactactacgacctcgatgactcttacgacgagagcgatgaggaggaggtcagggcccacctccgttgcgtggccgagcagccgcccctcaaactggacacgtcctctgaggtactgggctctcctccccacggacatgctctgggctgggctctcgttcctagcgtccacaccctgcagtccaccccactgttgctaggttcctccgaagtcctggcgggttcgccccatgaagctcttctcccaccaggcgcagccagctacggcccacacttcgaggaccccaggaggggaccccgggacagtgcaagcataccactgccagtggcttcaaactcatttgttttctttcccaatctagaagctagagtttttgcaactttttggcttgaccacccaacagcagaaggaggaattggtggcccagaagcggaggaagcggcggaggatgctgcgagagagaagcccgtcgcccccaacaattcagagcaagcggcagacgccttcaccgagactggcgctgtctacccgctacagccctgatgagatgaacaacagtcccaacttcgaagaaaagaagaagttcctgaccatcttcaacctgacccacatcagcgctgagaagaggaaaggtagggcctcgcctgggtaggaaggtgggggctcactggggtggaagtgggtttctgaagcagcaggtggggccggtggactccaggcaggatctgcgatcactgagcctgaggctgcccctttactcctcccggctcccgggaacagcctctctgttcttacaagccctccatagcagccttacctgacaggctttgctctgagagccccaccatcttgacctgaggactacccatgtcactcatccatctcccagcgcccgagaaggcgctctttgagccgagtgctccagtgaccaccaggcgtgaggggaggtgccaggtgttccaggtttgtctgctgcaggcttttcctcttgctggaccgcttaggtggtctgctgggtgttgtgtcctggtggccggaggcctggggaagggctgccaagcagggcagcacacactgagcagatggcttgccttgaaagatgcttccagttcagtctggccacacagggccacattgggacagaccctctgggctcgaatccatatagcagaagaaacaatgcagccacaacacctgctcagggttttggcttccttggcctgcagcgcaggctggcttggtgcccagatgttgacgttcctggccctgccccttacgcacgctttcaagtcctcgtgggcccctggcctcctctctgggagaaagtcgaaggaaagcagagttacttcttggaccttgagcagcttcaaggtgttgatcagggtgtagccgtttactttctccttttaaccagtcagtagttttccctttctcttagcgggctagtgacgtgttgattgccagcccagttccctagatacaaagcatctttttccctgaatttttggaggaaaaaaaattaagggcgatgcagcccttgagtttcacagtcaagaagggccgggtgacatcagggatctgctgcgtggaacatcgtggggtcatctttccccttcaggaagtggcagtaatggtaggagtgggggagaaggcaccctgcctcagaggccaggcctgggtctttggggtgtttctttgtgttggggccaccttgtctgacttgaaataagaatacatcctcgcacgtcaccaccgaggtccgtgggcacagtgattcacagaggcgtcgtcaccgcacggacagctgtctttggagcacgtctaggacattgtgtagtggatgccgagagcaatctgggctcgctttgagatggttgcttcctttcaactgggcctgccccatcacacctgcttttggtttttcgggctttagtgctttgcctgcccctcaaggctcggctagaatcccgctgtccttctctccaaaaaatgatgcaactggctcgttaatctcaggctgcttttctcatagacaaagagagacttgttgaaatgctccgtgccatgaagcagaaggcactgtcagcagcagtggccgactccttgacaaactctccgagggacagtcctgccgtctccctgagtggtaagggaaggatagccccacctgccaccacccaggaccatcccatgggctgcccaggctcagaggcgaccactcgaggtcttcatcattgtgaatgtggcctcctgcaggctgtcttcttccattcttgtaccagcgtacgattcttgcacagttgtgacagtcattgggacggaacgtcagtttgaaggcgggctcagagttgaggggagggtctggcttctgtggagctctacgtgctggtcactatggtcgtagtaaccgttgtccttcagttacggcacagaggctcacatggaggccaatccaatggtaccatcccaggagggagggcgtgctccagccttagtgcccgcagcctggtcctgccactagcctagccgccctggctctcttcctgctctttgtcttcctcactctgccctctgggccctgccggcacctgccgccacacctttcctcctcttacagttctggctggcctctgccctgtcagatgtcagagggaatctttacagtgcgtcccagtcctcggcccctcacacactctcttgtccggttggactgaatacctccatgctgcctccgtggctgggggacttccttcttcctgtggatctgcttcttccttcttgggacatctttcaaggatggacttgccactaaacaccccactgtcttcagagaatagccatgtgcgcggcggttacttaaatgttccccgggtcttggttctttgcgctaggtctttgttaagtgtaagctctagagaccaggatctgcgtgctggacactcagcctgttaacttgcatttcttaatattttccttcactttgtctctaaaagaaccagccacgcagcaagcctctctggatgtggagaagccggttggtgttgctgcttccttgtctgacatcccaaaggccgcggagcctgggaagctggaacaggtccggccccaggagctgtcgagagtccaggagctagctcctgccagcggggagaaggccaggctgagcgaggcccctggaggcaaaaagagtctgagcatgcttcactatatccggggcgctgcacccaaggacattcctgtgccgctgtcccacagcaccaatgggaagagcaagccgtgggagccctttgtggcagaagagtttgcacatcagttccacgagtcagtgctgcagtccacccagaaggccctgcagaagcataaaggtaatgaggctgccagtccctgctcagctctcggctgtggttgaggctgaccaaagttgctgagcgccacagctgctcagccgttcagccgtgggcacaagtttttataaactccaatcaccagaagaaaataatttcgttattatgccaaaaccatgtttgtttgtttatctccaagctctaaaacctgaactcgtaggtgagaaacgtttgtaggcaccagcgctgacgctgtgctgtgagcagggacgcatcgatcggtaagaggtaaaggagtgaacgccgacaggcattggtttttgcagagattaaaagattccccaaaggcaggaagagcacttgagtggatttttacccgcattcatttgaaagaatcatgtttttcaagacagagatgcagatggccgccagtcctcagggtagagcttcccttccttcatggtggtatctaaagatgtcaccaccagccctctggatccgtgggttccgcgtctttggattcaaccagcttcagattagaaatatttgtgggtggggtggaattccaccaagttccaaaaacaaaacttgaatttgccaagcaccaggtactacattgaatccatgcaaatcaagtcaagtgtaggcattgtgttaggtattacaagtactctagaggtgtgcataggtgatacgcagatactatgccactttatatcagggacttgaacatccctggcttttggtattcacaggaggttctggagccagttctccatgacagataccaagggagactatacagtgctactgagatgcctttcgaaacttcagaataccctccctccctgccctttggcagtgcaccttgtagaggcttttctgtggccctaggacactttctgccttattctgaccttgtcctggccttacactaaactgtttcctctagattttagtcactctgccataccagtttgagccaagtcactccattgactgggctggtctcaggccccaccaggggctgccatccccacgggaggccaggtgtgctcctgaggatgtcacccaccaggccacgccatgagacagggcatgccctcttgaaacggggcacaatgaggctgattcctgggggagggcagagccccattatgcctagggatcaaaacagccacgccttgtgagaggatgggctggtgtctgctgagggctgactatagaccaagctcaaagagatggaggcagccgggcgcagtggctcacgcttgtaattccagcactttaggaggccaaggcgggcagatcacctgaggtccggagtttgaaaccagcctgggccaacatggcgaaaccctgtttctactaaaaatgcaaaaattagctgggcatggtggcacatgcgtgtaattccagccactccggaggctgaggcaggagaattgcttgaacctgggaggggaagttgcagtgagccgagatcacgccatttctctccagcctgctacccagaggactgagggcagccaaaacaaaaaatggagtctcagagatgaattccaacaaaaatggtccacgtaccagaatcaactagcactcagggctgcgttgtctcctggctgtctcggactttctcaagtggcccagaggccttgggctaggtccctcctctctacgcgatgtcatcttggtccccggagccctgcagtcatgttgactctgcaccaagggcagagcagagctcccttctgagacagcaccctgtgtcccttcccccaacacactgatgcaagccctgtcccctccacagggagcgtggctgtgctgtctgcagagcagaaccacaaggttgacacgtccgtccactacaacattcctgagctgcagtcctccagccgcgcccctccaccccagcacaatgggcagcaggagccccccactgcaaggaagggccccccaacccaggagttggaccgggactcggaggaggaggaagaggaggatgatgaagatggagaagatgaggaggaagtccccaagcgcaagtggcaagggatcgaggccgtttttgaagcttaccaggaacacatagaaggtaagggggtgctggggaagaggggggagggggtcaggaaagtacctttggaaaggaagctgagtgatgagttcatgcagacctctgccagcctggggactgtttctccgtcctggggcacagtagatatgaatactggaagtttcttccggcttctggtagcggtgatgtcccatgctggaacctgaggccagtcttgctagggcatccaagtaccatgatgccagctctggtggcacctgtcattctttatgtgggccctgctctgtgggctgcatcagtgctgatgtcggcctcagcttcgtgtaagggtcctgggagacaacctagttggttgatttgctgagccctggcagctaggcctggtcactgctccagcatgcctcttgcctagtgacagactccccacactgcaaggattgctctgtggccggtgggtgccagtcatgttttcagctgcctttactttagccaagcactttgcctaaaaagacaggctcctggtaaaggcttagtcgaaggcttgccgcctctcagaatacccaggatgttttgatcccacctgggaatgcacacaccaaccctcctgggaagccacagcaccaggcggactcaggccacatctcccctgccagggagtggggccacgaagttgggcgttgcagcatttgatgctcctgtatactgcacaccaccttctgcctctgtgcctcagtttccctaggatattgcacaggcccctttggggaacagcagaggtacccagccttcattttgcactcaccatccttactgcgtgggcactgctgggtatgcgctttgacaaaagctgggctgggccacagccacctgtaattgatttaacatgtcctagaggactctttatcatcacatatgacagtgttgtaaatatcatcaaacacaaagacttgattatgaatgtcagccacttcaaatacttagaaaagtagtttttttcttttttctcctggtagaactcagtcaggaaaagtattctccaaactaaaaacaaacgcccatgtagccacaaccaggacatcaaatcccgtattttgtttcctttcctcctcccgtggaatctttgagtttattgcgcaccaccccctacatgttgccattcttttagtgcactcgtatatatccagaagcaatacacagtgatttttaactctcctagatgaaatatttccatctttgctggttttgtaggttttttggtgtggtgttgggaattatttccataccccatggctgtcaggctattcttctgtattttcttctgtgagtttggctttttcctgttctgcgtaggattcatgtgtgtgtacagagtaaggcagaaatcttaactgtacctttcccacccaaccagttgtcctggcaatgtgtggggtgccctcttccctgcctcactcccacacctgctgggcctggcttcgcccctgtcaggcatgacctgcgctgaccccctcttctctcagctaccgctcagctgtttttagcccatggctttcccccaaggacttttcccctaaggattttaggatcgccttatattcaccccaaagagtcctgttagattttcagttgcattgaatttacaggcgtggttggcatccttttccatgaatatggtacaaaactattacatcatttttggacgtgaagttttgactagatttagtttcaggtatcacatagattttgggggtctttggatttttgtgttgcctgtgattattccttagatcagaggaatcacagatgatcaaacctgcaaatacaaggtttggttctttccttttgaatttgtctgattgtcttgtcactccagtgctgccaaagagaggcactggtggggcccttgtctgtgaaactttaaagcatcccattaaagagtgaaggttcccatttccggagtttttcatcctttgattttttttttcttgatgttgctccatccttgttgaatttgttagtacttttaggatttttaatgtatgttcgttagtattagactctagttttattgtactttggtatccagattgtgagcactttccctgtttttcatttgctgaaacactgtgtataaggtagggatttgtcctgaaagatgtgaagtcactctcctgttgaaactaggcctggtatcttttggtagagcagaggctttattttattaattaaatctgtgctttaggtgtactctggcctttttccagcagcctaaactgaaagcctatttttttttttttgaaagctgcattttaaggccatcaaatttcttcctaatctgtatcaaattgcctttaggtcctggatcctttgtctttattcctgtgtattgggcttaatttagtgacgtttatgtatttatcggtacaattcaaagggctgggagcattgtggtccacaggagaggccttcgctggctgcactggagagaggttttgggctctgctgggcagggtgtgaagaggagagcacaaagcgggccttcgggctcctgcatacggaaaatacatcaccatctcctgtcttttcagagcaaaatctggagcggcaggtgttacagacacaatgtagacgactggaggcccggcactacagcctcagcctgacggcagagcagctctcccacagcgtggcggtgagttgggaagggatggaaaccttcaaacacgcaaccttttgagtttgggttcagaaacacccatgcagataagtttcagagaggaaatgtgctcttaagagatcaaaatttggcggatcacgaggtcaggagatcgagaccatcccggctaaaacggtgaaaccctgtctctactaaaaatacaaaaaattagccgggcgtagtggcgggcgcctgtagtcccagctacttgggaggctgaggcaggagaatggcgtgaacccgggaggcggagcttgcagtgagccgagattgcgccactgcactccagcctgggcgacagagcgagactccgtctcaaaaaaaaaaaaaaaaaagatcaaaatttggactgcatgcaatggcttacacctgtaatcccagcactttgggaggctgaggcaggatcacatgagcccaggagttcaaggctgcagtgagctctgaccacaccagtgcactccagcctggttgacagagcaagaccactgtctcctgaaggggtaaattcagacaccagttgattatctaggatttacttatagaatatcgatcctggaagggtagggatgctgtttgtagaatgaattattgcctgtatcagtctcctctaccgtgatttgctgaggagagcagcagggttttattagagaagggaagctgaagcaactgaaaccatctcacgtggctcacagccacactagcaggattggttcagcagatgtccttggggggcagggatgggaagcaggtctcagatcactcccaaagtttttacatctgggggttccaagaactccgagtttgagccaagacagcagcagatgccgattcttaagactctggaagagccagggacagaacacaggctgagaagtggactttgtttctctttttgaggcgaagtctcactctgtcacccaagctggaatgcagtggcgcagtctcggctcactgcaacctccgcctcctgggttcaagcgattctcctgcctcagcctcccgagtagctaggattacaggtatacgacaccatgcctggctaatttttttgtttagtagatggggtttccccatgttggccaggctggtctcgaactcctgacgacaggtgatctgcccgcctcgacctccaaaagtgctgggattacaggcgtgagccaccacgcccggccgggacattttcaaatgtaggtttacccttccatccagcatgtttgtactctacatgcttgtccttacagaggaaacgggttggttttgacacaaatttccctctctccaggagttgaggagccagaaacagaagatggtctcagaaagggagcggctccaggcagaactggaccacttacgaaagtgccttgccttgcctgcaatgcactggcctaggggctacctgaagggatatcccaggtgacggtttcccttgcactaggccgaacctatagtatagaaatattatctattttattaccttgaatatttaatatttttcactgggaggtttgaagcttacaaaatgagaatgtgccatgcatgaagcaaaggattccaggctccagaaaaaatgaatgaactcaccttgacgtcaatgcaattgaatcaccgttgtcattcagcgagcaaccaatgtaggattgcccacagtttttctttttaaaggtggttttcgcccttcctctcccacattatttcttaatctgaacatgaaggctccattagcaacactaaaacttgatcattaacagccccctgtgcatatgagtggatcaaaccggttctgttctttcttgtgttgccatgttactatgcctcaagcccagtttgcttttgccgcagcgatggggccagtctcattcctccccaggagtgaaacttgcttcagctgaaaaggttgggtgcattgtcagtaaaaagggcttatttgtttcattttactttcctgcaaaattttcttcaaagcaacaagtcctaggagcacacaaagcaacccaaaggcttttccctggaaaagctctttcttacctaaagataaaaccaattcacaaactgaaggtagctttttattactccgtggggagcatgtacagagctctgtgtatacacagcttcacacccaccagattgttactacagtgggttgggttttcatacagacgtaaattttgagagaaaagtcaaaggtgcttcagccttgtactgtgtatatatattaaaaaaaaaacaaagttttgtatgtttttattactttaactattgttataaaaagcctgccatttttaatatgtggtttgggggatttttgtttgtttttcctgtttgggggttttgtttgttgttttggttttttttgggcaaaaaaaaaaaaaaaaccttgcttttagtgtttgtactgctgctggtcaggacattaaaatattgaagtgtttttaaaaattaaagaagaagaaaagtaaaagagcttaccactggcgcctatgcgatcacttcatttttagtttgagttgcaccagaagctgccgtagaaagccatgcgctactgcttacctcctccactccccctgcctgcccccagcatctggacaagctaatagcaaatattacccattgctatcaagggaggagggggtagtctgtagaacccatgtgtgacagtcatgtgcacacatgggcgggggcttttaaaaacctttcaggaagtcaatgatttctgtgattgatataattctaaggtgtctgagagcaggtacagaataggaacttcagaggctttgtttaaacgcaaagctttgtaaaagccacaaggtctgagctgaacccctcctttttgaacttactgtgacaagcacaggaacggtcagaaactgggctcatcacaccaaggcaaagcaacgggcgagtcttcctccttgtcctagttactgcctatggaggcagtgtttagatcaagaaggcctctcttgctcccaagggccctcaccagaggccagggctgccagtcactggtctggggggtggaggcctgagctgagggcagggtgcctgacctgtgtgccggctgctcactgctgtgaccagcagccgagcccttggccctagcccttgctgcgcagaacagcttgctggcagctggcatcgtgtcgctttatctgcccccgcacagtttgctttgtacgtctgccaagaatcttccagttattagcaaactcagacgaatgtaccgccagtattatcagcagtcaacaagcaccttcctctccacagaagcagctggaagagaactcgaggggctgtgctgcaggcctcccctcgaaagacactgggaggtcagcatgttccacaggtgttcagagggagtctgctacaaactatcagggcaaaatctcactggatttctccactgaaaacctacttgaggtttctggtctgaaggcttaagagtcacatcttagcacttccgctctcaggcctcctcctccatcacagatgtctggatgcttttggaaatggccttggctaaagtaaaagggaaaagtagatccgataacttaaaaacgtagctcatcccttaccatccaaggggcactcccttggttggattttctatgacagcacaggggacaggtggcacaccatgagaggtctgcccagggtgggagcagtgtcactgtgctagcaatagttggcttctcccctgtcagtggaaaccccacttctgcccggcccttgagcttcttgcccactgtctccccatccttccacctacttgtggcgatctgagtactctactcttgctcaagaagtaatacgacaatcagaatacaaaccagtaaggcaacacgaataaactaagaaaaaggtaagaactgtctcaaaaacgaaagcacaccacccaagacacagtacccagtcatggtttccccatccaactattagtttcatactttgaaaacttactttcagattattctcaaagaacacagtagcacctaaatctgttttcaattgggcttaaaaattgacatgcaatctcttaagttttttgttcagctacttcacactgagtacctcaaatctgctctggagtcgattatgccacctgtgtgtcaggatgcacctgaaagccctcggctcggtccttagaccatcttcctacattacctggaagggagctgccatctgtccctctgcagagggataccttccaatagtaaattatctggttcctcactgaaacaagttatttttgcttcatatagtcagagtcagactgacatgataaaatatcatgttcctaatctgttgtctcagataagtgaccaagacgggactttccacattttagtctacattctaatcttaaaggaataaagcactgaattgggactaacattctgataggttgcacccttaagagtattcagagagcatcaaaaggagcccacaccttcagcagtgaaggattctaacacagggaatctgcagtttgtagcagaatggtattttcctcaagtagctcataatactgccaaatctcaaaagttaagctgaatttcacaccagatcctacccctttccctgagccacatgtttcacacaagtgtagaaaatgccagggatccaccacaagatggagatggtcagcacaaaccgattctgttcctctttaaagtgtatattagccacttagcaatctctatattctttcaagtaaccaagctgttgactttcttactacttgcagtagcctgtccccaacttttccatccagtgcttaacctaaaaaactccttaactctgccttgacctgaggaagaccatgctaactggtgttattttgtatgtaccctgtgcttaattctataacagtaaaccccatacgcaggtgggagggaggaacaccggtgcctcggtcactctgggggcagtttagatgctgtgaaattaaacctgttctaagtgtacttgtttgaattaattgtattgtaatattatttgttgaatgtagtaattaggtatttatgaatatattgctgtaatttctgacaacatccaaaaaataaaatcttcctaaattatgttaagaggaaaatcttttttatgatataaaacaaagccaaacaaagaaaagctcaataactatacatctccgcagacggagctgcctccactggctcaggctctaagaggagggcattaggaccccttgccctccacaataacaagtggtttcattctaaaagatccccagatgaaagcaggaggattccaaggaaggctgagatgaaagaacaagtcctatgagctgaaccaagtctgaacagcaccttaaattatggagacctcatcttttggtcccagtcttccaggtctgacccttcagtgtccaaataaccaccaaaacctgcctggcggggacacgtgggcagcaacatggagtgatagtgtgcagcatgctagacactggagggcagatgctgggtgataagtctttaggctcagcctgtcacacatgcgcattctcagagctccccagacagcaccccactgcttttggcccactggtgtccagccaaaaataggctggccaggcatggcggctcatgcttgcaatcccagtgctttgggaggctgtggtgggagaactgtgtgaacccaggagttcgaggctgcagtgagctataatcacgccactctactgcagcctggatgacagaacgagaccctgtctaaaaaaaaagttaaaattttttttgtttgagacagagtcttgctctcgttgcccaggcaggagtacagtggtgcaatcttggctcactacaacctccgcctctcgggttcaagcgattctcctgcctcagcctcccgagtagctgcgactataggcgtgtgccaccacacctggcaaatttttttttttttgtatttttaatagagacggggtttcaccatgttagccaggatagtctcaatctcctggccttgtgatccacctgccttggcctcccaaagtgctgggattacatgcatgagccaagccaatgtgcccggccaaaaattaaagttttttttaaagctgattacagaaccttctatccattgcatgatgctggacgatcatttcacctctcaaggtaatgtaatttctgtaaaggtcctaacatttccaaaatgctacgaataaagtaattttctcttaggaaaaaaataatttcccctgagcccactgttacctacaacaaagaatccttccccaaatccatcaagagcagcactgaaagtgacttttcttctagcattgtcactcatgctcaatacattgtcactcatgctcaatacattggattcgtttttttcctgactctcctcttgataagcaacccattaaacctgagctagaagtagccaagagaaggagacaccccaggtgttggtctgcagtttccacttaactgccgtgtgcctcagtttcgttgactgagtcatctcagccacaggctcagtccttttacttggtagttacgcagcacaaaaacctagagagtcagagctgagttgggtccatttttattgtggatcagggc

SEQ ID NO: 246 - DNA, 23159 bp, Homo sapiens
  source 1..23159: mol_type = genomic DNA
aaccttcgcctcctgggttcaagcgattctccagccttagcctcccaagtagctgggactacaggtgcccgctaccatgcctggctaatttttttttttgtatttttagtagagacggggtttcaccatgttggccaggctggtcacgaactcctgacctcagataatccacctgcttctgcctcccaaagtgctgggattacaggcgtgagccaccatgcccggctgggcttgtatcttttagcttgtgttagtaaaaggattctagaaaattatgaagtccagattcaaagggatctctgttaattacccactgacaggcattatgacctaacaggaggttggtagcagtagatccaagcatgcatgttgcctggcctgtagattggccttatcaggtttctgggtgcctctgccttaagatcctgaaggcaaattttgtttcaacagtttggaagtcatctgtgggtccagcttgactttggaggaataagaagatacttctagagtatgggaatgattccagataatttctgggatttgaatctacttgagtttaagggcctgggacctaatttggtttagtatagaatttgaagaattaatttataggcagctgaatacccaaaacttgggtggtggtcctgtggtttggctgagctgtccgggcataacctggttctctgttatgttaaggctttctgggaagccagccactctgcgcaggagtgaaacatgaagttgttttctgaggacctgttttggtgggattgtttgggcagaggactgtgtttatgcagggcaaatcccagaaagataagaggaagctagagaaacttaatgtacctgaattcttcatggtgtatttgcaaactaacttaacatagattcttttgactatggtaagtttgaatctctccttgccaaacaacattataagtttagttttcttcttcctcttgcagccggtacagaaaggtgtaagtggtggctgaaaattgaggaagcttcatctgaccaatgtgggtgctggtttcttgtgaaatgtgtccctaagcctccttctccttgcaggcagccacccacccaggtgtctaagataggacatgctcctttctttctctaatcccatcctgaggttgccggcaaagccaatatgaccactactgagaaatagtaatgacttctacaaatgcaagggtcttaccctcctctttcccttaaacaccctcccttttccttagaccccgtttttgccatcccccaaatgtgtggtatggtgaaactaatcccctgaatgtgaattgctatccttattgccctattaaagaagagccagctggtatattgtcaggaagcactatttaaaatgtgaactgttatagagtaaataaataaatactctacaggaatacacttgtgtgccattctcattcgtcttagtcatcaaggatggtttgtttccccatatggaaaagagaacgggcaagtagatgggtggcattcttttttttttttttttaagttctagggtacatgtgcacaacgtgcagatttgttacatatgtatacatgtgccatgttggtgtgctgcacccattaactcgtcatttacgttagtatatctcctaatgctatccctcccccctccccccaccccatgacaggcccggtgtgtgatgttccccaccctgtgtccaagtgtttttattgttcaattcccacctgtgagtgagaatatgcagtgtttggttttctatccttgcgatagtttgctcagaatgatggtttccagcttcatccatgtccctacaaagggcataaactcatccttctttatggctgcatagtattccatggtgtatatgtgccacattttcttaatccagtctatcactgatggacatttgggttggttccaagtctttgctattataaatagtgccgtaataaacatatgtgtgcatgtgtctttatagcagcatgatttgtaatcctttgggtatctacccagtaatgggatggctgggtcaaatggtatttctaggtctagattcttgaggaatcagatgggtggcattctttatgaaggaaataatagggtacatttctcagaagggatgaaaaggtgggatccagagaggagcctatgcccccttgttcactgggaagtccctggtgtgactgtccagaagggaaccacagtccaatctgaatagccttggtgggctatttctagaagtgaccctgaccctgtgtgctgttggcgccttctcatgttaaaccactctcctaagggctcctgggacaatatttaataacacttttactgggtacctactgtgtggatgcaggacactgtcccaggcagtgtggaggacttctgtgctatatgacaaagcactcaggggcgcttctgtcttcccatctgtgacttccagaacaattcgcgcgtaccatggaaagttgagccacagtcacactaccgttaatttgctcacctccatttctccaatttccagaccaataactagatgtatcagatccttaaggtcgggaagtgtattttactcttctttttatctccatggtttagcccagaacctggcacagaaactatcagtaaagaagggaattctggatgtgtgagatgtggggtgggtgaaacaagatggagctgtagaggaaaagagagcagtggcacccaggaatcccttaggacttaaagataacccttattcatagccttattcgtagcctctaaaaaccatgctcaagagacggatgttggcttaagcacatgttgataatcagcagacgtgtaaggtagggctcaagcctactccccaaacccgcttaactcctaacactgctcttcctctacagatgacctaactgcttctttcagctcctggctggcccctctttgaaatcccttgttccgcagctcggagtagaagtcgactccctcagagacagagtggatgggctgattatgatactggtggtagctggtcaaaggacccacggtgggggctgcacttgacagccgccgagggaaacactgatggtgatgtggtaggcagttcgggttttccttgaagctcttactatgcttgcacttgaactccagcaccatcctggtgtacgtgttgaaggtggtgacagccgacgccatgcagcaggtgaaggagagccaggccatgctagggacaaatgcacaaaaagattggacagtaagaataggactttcttgagagaaaaatgccatgacctcttcctactagtggactagcttattgccttgtagggatttagggactttccaccatgtttcaggtaaagaactgtgggaagagaacttactggtttctaaaaagagaatgactcatgtagtcctagtatcagacaaggagcttaatggatttgttttcactgaattgatgagttgtcggtgccatgcccttttctatctggtgtgcctattgtgtgtgtatgtctgtgcatatttggactcctgtttcccaagctgcattgacccttgtaaaatctccaagattccccaggcctgaagctgagctgtatgcagtggacataacctactgcataccctccctctcccaccccaacacacacacacatgccctgccaaagatgtccccccactcagatgctgggaggaatcatccctcttccatcttcctttgttttgaacttagcagtcttagggtccaaaaaggtgagcctctgaaagtcattcaggaaaacatttactacaaatcaggaggtattataggttgtactagtggaatttgcttcatatggaaacagtgtggttttggcttaagggagtttgtaatgggtgggagaggagctggagattaagagaatgtggatggattcaagaaaggaaaagaagacattaggcaaccatattaaacacattcctgaaaacttggaaagtcaaatccctaaatctccctgtggttctgggaagctcaggaaacaggaagttttgtgaggttagggagggatttcatgaggccaagtgatggttaaagccaggtcacatgcgggcactgtgtgttcatatctgctgcctctgacaaatgcagtaggttcagtctgggatgcttctgggagttgactaatgggcgttgcctagcctgagctccacagccgttaatgccaagaatggcctgaagacagacaaaaggtgagaagtgctggatctgggagctgcattgagctgatgccctggctggtgtagtagactcagactcccaaattattagcgcagattgtaccacaggaaaggggatagggcctcacaacagacttgcaggcttccttccccgaatggaaacttgagcccatcactgtgtcttttcagtgctctcaaagtacttagcacttagacagtaaatatcagtacaagttggcaacttgctgtgaataaagagtgctccttaagggagaaagtaagagctctcaaagataatatttaacttgaatgtgttgctttgtgatggttgctgtcgctctctttttaagagaactctaaaatgactgaccccttagttctttaagggttagagaatgaccctagggtagtgaagttttatttccaacacggttcagtagaataaaaatggatatagaaggaagtgaagaggagaggagtaagccatttacagagaatgcaattcaatccaaatttcaaagcgatttctctatttctctgttctctaataccttgaatcataaaaaaaagaaaaaaaaagagcacatttctataaggcctacagaatcagtcttgtttccccagggtgacaaatataccaggtaaagaggcaactgccacagctgatgagcaggaaaactggacaaaataacatcctcccaagacacactcgaggaatccttcctgtaccccctcagaaggcagggaagaatggatgtgccctgatgatgcagccctgtgtggttgacaggctcttgggatgagggatgaagagaaggcagggcttcaccgaataagcatctagctgagggcagaaaatctcgtgaaggttggctggggctacaaaggttcaggagatgacagcacttactagaaggcccagccataattccaaacatgtggtctccagtcttctggacccaagttgacagtcgcttggaagacttgtgaatacatcatgtgggccaccatccccaggagacctaccaaggaaacaggaaggcagagcccttagagaaaggctttcatgccatctgccaggagtacgattttggatcacccttcttgcagtcaggcgcagcctctgttggagtagcccattaccctatgccaccacatttcccgaagactaattcacaatgggggcttctccttaaatacacatctttgcaataggtgaccccagactgtaggctgagagctatggaaaaagtctgagtcaaggctgcacccaaggccactgcacaccacccctactccttcccacccacaccccaatgttggcttaattcttcatcttatatgtgcatctttcactttatccaatggagactggtcttgaaaagctgtgtgtatgtcacaactgaaaagtaacccaaacaatagattttacatattgagaaagcttgcaaataaaggaacctagaggtaaatcattttgtaaagtacacggtgatccaatatacaattttgtatgttacttcaatttaaaattaaagatgcctacctccattctttaaagagcctttgggctcctccccttcagggcaaagactcaagccctccagctagggcttcaaaagtggccagggccaaccaccctctctcactccaggagcaactcacctgacaggacagaggaaacagcagcaaaggcgctcagtttgagcccacaggcagggttcccagtgagtagcaagtctgttagtagcaggaggaagctgatgaattgaagtccgatgtaggtgatctgcgttcccagggataaccataggatttctgccagaaaccagaggaagagggagcgctcaccctgacagttaaaaaactgaataagcggtgagcataggatgcctattaggagttaagaccctagcagcatctgagaaggggagaatgaggcacagctgaaaccagggaggaacattacttcatttctagtcctttgacgtcactcacagctcccactccataaccaatatatacccaagtaagcttgactgactgtaaatactgttggggagatttgagaagaaatcatcgaattttcataaatcctgcagggaaataatgttgctctagttatcattttttgtctttttcctcatttaattttggggtggttccctccctgcctcccttcttcactcttttcctttcattttaccaaataataataataatagtggagaaaaaggaggaaaaagctaagccttcctacatggttacttggcaacaagagtaggttagcactgttggtggttttctatttgtgaatcttatttatccctgctgttctgtttttgcattcctgcatatgaatgaaagtcagctcaaggaggaatttgtgtcaccctttggggctcagaagagaaaagtgggagatcacagtgcagtttagatccggagaggcccaagtcaatggtaactactgtaaattccttatcagacacatacttgccacaaagccccaagggaggggaggggagggaagccttctccatcaaccgcttccctccaaatcggagagtggggtgacatgggccttgcaacgtggcaaattccagtagtcctttctcacctctcttggctggtggtgtaagttcaatgaaacttcggcacctctcccctgaaacatacaaggtacaacgtcatggagctactccctgggatggttggaatgaaaaccttccccaccccataactggtactgctccctctgctctgacagcacctgccccgcatagagcaggaaagcaggaaagaatgcctgggtgaatgaatggcacagccaagagtcagcccaggtgaatttctctcttcagtctctgataatgcagaagatgtttccatgagagcacctacatagcttagtgttcccatttcccgtgtccagaagagttaatgatcttagtgttaactaataccttttgctgccgctgtaccactggaccgaagggctctaaattgtttccaggactggggatggagcagtgctaagtggcacaataataaatataaatgtaaatacacacatttttttaattcctcttccatctcgcttttagctgaaatagggagaagtagcagatatcaaattgttcatgattctgggcattagaagaactttagtaccaggtgctttcttcccaggccggtcacctttcagtgctcttgggcagggaagaggaggtgtcttcagctcattcctccaaacctgaggaacgcacatcgaccagcacctgcctgctttgctagtgtgcactgaggggcaggagacctggcagatctgccttcagctccttgagggctctcttacatgatcagttaccctggctggctggcttcggttcccccacttttaaatggtagcggtaatacttagaatgagaaaatactttggggccaggaagaggctgtaagatgatctgctgtgatgctttcatctcacaaatgagcaaatcaagacctatagaaacgaagttataggctgggcatggtggctcatgtctgtaatctcagcactttgggaggccgaggtgggcagatcacctgaggtcgggagttcgagaccagcctgaccaacatggagaaaccctgtctctctaaaaatacaaaattagccgggtatggtggcacatgcctgtaatcccagctacttgggaggctgaggcaatagaatcgcttgaacctgagaggcggaggttgtggtgagccaagatcacaccattgcactccagcctgggcaacaagagcaaaactccatatcaaaagaaaaaagaaatgaagttacttgtatgaggtcacagttgagcagagctagggctttcctacaatattcctctcccttcgttttgtttctaaacagcaattctagctccctagaccagaaattctcataatgtgaaaggtctaaatgaaacttttaaggttaattctatttttaacatgctattttgaaccaacaagtctactacagagggaggaagtgaaaatccagaggactttcaaccttattaaaaggggctcctatagagaaggacactggacggaggtggaaggttctgtgctgggagaagggagtgaggcccactggggtgtgggcagtgctgcacttccagggcaacgccagccctaagcgggcctacctgatttccatgcctgcattagatcccttgcccgccctgaccccgttgctcttatatcccagaatgtaggctacctggttcttccacagtttcctcacaggatagccacatgccactccggaagctccggaaggagaaccggtcatccccagtctcccagttgtattgtaccacctcctgggtggatgtgttggtatctccatccagggacactggcatgtcaaagcacttggctgccagacctttctcgcacaggggcttgggcaccttctgtgtgcccacaaaccagtagttgctgagcagggatgttgtggagaagctgagtgatagcatgctgaggatggcagataggagtgtccgctggccagagaaggccttcgagagctccatctgtaatagacaagcacaagtggaagggaagggagcaggggagcttgactcagagccgcctcggagatgtggccatccttccctgcactccctccgctcaagccatactcctccaaggcagataggcacaacccgcctctgacatttttctccaggggccgcatggaagccccgcttcaggagtggtctgcagcaagcaccctgagggcgtaagaaaaccatacgcccaaatgggggcctcagaagcagctctctctgacattctcctgtcctcctgtctcagtcccactctttcccaaggctagccacagaaactagaatccctctttctcaaggtgggttgtagaaaccagagtccctttccccagagccagccataaaacctaaaaatattactctaactttccctctgccttcccgtgtccaaactggccctaaagaggttatctgacctagcttgtgtgactgtaggtcataagactcccattccagagagggtcctgccccacacccagaaggaagaaatgcacgctcagagaggccaaggagaagcagcccttgctgggtttccccactcaatctattaacattattagatcaggccagatgcagtggctcatgcctgtaatcctagcaccgtaatcccttccagaggtgggaggatcgcttgagttcaggaattcatgaccagcctgggtaacatagtgagaccctgtctctacggaaaataaaaaaattagccgggcacggtggcgcacgcctgtagtcccagctacttttgaggctgaggtgggaggatcacctgagcccaggaggttgaggctgcagtgagccacgatcatgccactgcactccagtctgggcaacagggctatctgtctctaaaaaataaataacaacaatagatcatggccttgatgtccaatcatatttctatgtgactgtccatactttgttgaacctaagcataaaaatagacaattttcccttcatctttgtgacttcattctgaaggttcccacgtcacgtgaaactacgatcaaataaacttgaatgttttttctcctattaatctgcctcttatcagtggttttcagtgaaccttcggagggcaaagggaaagttttcccctggcttttacacaacacggggatgatgcatctttaagttgaaccttacacagatccaactacagaaaagtggtgatttgcatagattgaatgacaggggctggcctctgggcatgatatgcagcaatacacagaagtaggataaaggtgatccaccagagaggacaaattagaatgaggaatgcagaagtcagagtgaattggaagtgagtatgttaaaatcttccatttctgcctcaaatggtgagagtggaatcaacatagcctccagccggcaaatcctagggaggatgtatgtgtgtgtgtgtacctttatggtgagtgccataatgaccccaccaacaaacagcagggggatctttctgagtagcagtgatggatctgccagcagccactacctggagttcttggaccagcagattgagcgagagagagagaaggtggattgctgcacatttgataccactgctggccaggccctgtctactgaagtcctgccccttctgaggctcaccccaagtcccaactgcttcagggaggtcccctaaccagcaccttccatgggaagtgaggcttggaagggcttcaaggactgtggtgtgtgccttcttaatagtactcttttcacatttatttttggtcatgtcttatcttccctccaagatttcaagctgccattaggtagcaaaaacgtgtctttgtaatttttatctttcccacagcaactagcacagtattttacacattagacactcaacactaaactgctgagtaaattgagggtgttctgaataagcatcagatagcaataacctcagtcagaggatatataaactttttcttttttttttttttttattgagacggagtgtcactcttgttgcccaggctggagtgcaatggcacaatctcggctcactgcaacctccagttcccgggttcaagagattctcctgcctcagcctcccgagtagctgggattacaggcgcctgccaccatgcctggctaatttttttttgtatttttagtagagacggggtttcaccatattggccaggctggtcttaaactcctgatcttaggtaatctgcccgcctcggcctcccaaagtgctgggattacaggcgttaagccaccacgcctggccggttatataagcttttaactttatgtaaaataacattaatacatataaatatataattatataattaataattgacaaggcaattgataacttctggaaaagttttatgtaaagtctaaactttatataaaagtttagaaaaaagaattgggagcattccaaatgctctttgtgataatcgtttttggctttgtcttcactgacaggtagtagcactgacttgctgaagcatttgctattgtaacaaagtgagctattggtgtccttttccctgcattacagattcctctgaaaggagtcatagcaatgaatattaaactggaaatctccgggggaagcagatggatgctttggggcctggaggataaaagagggcagtgaacctactgggatgtggggctattgaaacctttggaaaggagatggggcttatggttctgggagaggtagcagtcgggcccagcttccatccactgccacagagacaatagagtttcaaatgcgaggtggctgtgtggtgcctgtgtaggctggacaccaggtttggtgtccacagagccatgggtagggtgtcggcagccaagcccttggtcagtggagaggaacctggagggccgtgtcttccagcctggtgcagaagtgcctgcctcacagtggggacataggggaggctgccgaaagaactgaggccccagatggctctggcaggagcccctactctccatgtcattttcagcctaagagaagaggaggcaagctaaaatatgactggtattagacggccaactttgctgagtggtggcttggagccagatttaattggacttagagaagtaatttggcaagtctctcactttgtgttagagcagtttatacagttatattaatgcacatggaacagaaaagaagcccatggttagttgctgacagacgcttcttaaagtaaaccttcttgagctttccaggggatccttcatatcagaattaatcacacttaaatctgcttatcttaagagccataaataaaaccatagctaaatggacaggtccataaatttccctcccttatcacacccagcttactgtttctacatttaagagagaactttacctgagaaatgaaacaatttgttcttcagaatttccagggactaagacagtgcatatcacaaaatgcttattatttatggcaataagaaatacacaaagatcatatgtatgtaaaaccaatatgtaaaacatgataaagacaacttctgaaaagcaatctgctaatatgattttacttttaaaggcactcaacaaattaactctgccaagaattgtcagttcttgcaagactctgggtgaccttgactaaggacaaaaaatccgcagcatctgggaggaggaaagattttctgttggtagacactgaagtcgcgtgttgcccagttcccctttcctaaaatgttttcatcttggttttagttatgaaaatcctatgggttttagtcatcattctcttactgtgagtcatcctttctaataattcttacattgcttgaataagaaatggacttccaggtaaaacatcttcactaactatttggtgtaaagactgacctaaagacttaggcaattctaacttttgtgacctcagcattcatttttcaacaatcattttcattctggtttggaaatttgtctattatcacatcagattttaaccccacactcaatccatttcaagttatacttgcaagatttttactccacattcaatccacttcaagttatatatatttgcaagttattctcggggttattcagaaataagaaagaataacgaaccccatactaagatacacccactttgtggcaccaaggtgacaaccaatttaaggaagaggcaatttgagaaacaaagaataaaaaagagcttggactgaagctcaaagaggttccttccagaaggagtgtccaccagggagagacacaaggaacctcattcaaaaatcatcttcttgatatcgaatgatcatctcattcaagaattttcaagaattatctccaacacctatagtaccatgccctttgtcacatactttactcctttccccaaacatgccttttcctgctagggtcgggatacctcttgaattggaagaacaaatctaattttgcaatggtttccataaagtgatcctgaagaagtaatggccataagaacaactctatctttgtgtatgcaacagatcccatgccaaggtgactctttactcgctagaaaagggacagagtggtttctctaacacttgggcccttagatcattaggaagtgcgtaggcgccaatgtataatcagtaacccttacatcagcatatattaacagagtaacccagaattagcataggctaggaaggacaacagatcgatgaggcaggtgcacttcttaaaagagccaggtacaaaatagctgtagactgcatcctttgagcaataggaggggaagccggttaccttggccatggtcagcgtcttgcagcttgtctggaagaaccgaaggatgccatctgcactccaagtccctttggtttaatgttgcaagaatgcaaactgtcttcctaccctcctccctctcctcctacccctccccttctatctcatattctttggagtgcctcatgattaaatgctgccttacagggaacacgggcatttaataattgacaaggcaatcagggcccagctgttctgggagattacaccagagagcttgccaatggggatctgggattaagcacaaagaagcaaggacctgcaatttgcagaggaaattttctttaaaaagtaaatgatggtttagtttccactgcctgccattccctaggtaactggtgtgaatggattgggcttggatttatgacagacgaagatatggcaggtcaccatcactgcagaagtttaccttccctcgagtagggtttcctatccctttgaagaaactctattctctgcaatgtcggggcctcatggagccatgaacaggaaatagcttccttgttccatgggtggtctccaccttccagttagaacattagaataagtactattgccgggcgtggtggatcacgcctgtaatcccagcactttgggaggcctaggtgggcggatcacaaggtcaggagattgagaccatcctggctaacatgctgaaatcccgtctctactaaaaacacaaaaaaattagccgggcctggtggcgggtgcctgtagtcccagctactcgggaggctgaggcaggagaatggtgtgaacctggaaggcagagcttgcagtgagccgagactgcgccactgcactccagcctgggtgacagagtgagactctgtctcaaaaaaaaaaaaaaaaaaaagaataagtactattaagtatctccctctacacatggaatgctgagtgagaatgttggctggggatgtggcaaagatgcagatagaataggattggagataaatgaattccaggatctggaatgccatggctatttaccattcctctcccaaccttcaggcaaaggaatgacaatattttatatttcaaaaaagagtttctaaaatgctgaaaaagtaatctaagaaaccagtaaggggtcgtttgcatatgttcttgccaccagtcagccagaagtacaagttgttctttctctcctcaaaattgtacaaatagctgggcgcgatggttcatgcctgcaatcccagcactttgggaggctgaggcaggtggatcacttgaggtcaggagttcgagaccagcttggtcaacatagtgacaccctgtctctacttaaaaatacaaaaaaattagccaggcattgtggcaggcacctgtaatcccaactacttgggaggctgagcaggagaatctcttgaacctgggagatggaggttgcagtgagccgagattgtgccactgcactccaacctgggccacagaacgagactccatctttaaaaaaaaaaagtgcaaattaattgggacaccaatgttgaaagagattctgccgctgtttgtgagtccctaaaccctgcatggactttcatcctccaagcctttgctgatgctcttccttctgcctggactgccttcaatctctttttacctggtgaattgcctgcctttcaacgaaattagtctaaaaagtcatccactctttgaaaatgtttcttttctccctaggacagacagctccctcctcatgatccttgtcacactatatcttgcaacacttattttttttttttaattttaatagagacagggtctcactatgttgtccaggctggtctcgaactcctgggctcaagcaatcctcccaccttggcctcccaaagtgctgggattacaggcgtgagccactgcacccggccttctcacaacactttctgtattccattataactactgcatttgtctgaaatgtaacttcctcaaaggtctcactttcattttagagcagtcgttctcagttctgatgaactgagttcagaacaatctttggaagtttggaaaatatgccgattcctggacccaccctgagatttcatagtagttctgggtgaggcccaggaattggtaattttagaaagttcttaatatatacccagggaattcatgtaaaatggcacctgttcaactcattttgggcttacatttaataaaaccctctgtatccgcccccggccgttcctccccctcttccagactagccatgaggtcatgtttttcccattctatatttgtgcagttcgtttagggaatcaaaggcaggttcttctgaacttaattgtttgaattagtccacgttctagccaaatgagttgcttcggatcctgcttttgtcacctgtaatgtctgctctcctcagactgatgttaacaagcaaatttgataaacatgtgccatgtgcaggtacattttctgcatcgcccaaacaaccctttatttgttgtgacagaactcactctcctttggaaggagaagcaggaattttgtgttctttgttttttttttttttacggttgcattggcggttggtttcctggctagtagtttcatcacaacgctgggtggcgctatctcctcgtcgtttccgcttccgtcacgtgcttcccccaccagtcggcaaaatgtgggtggaagtggctgctcctccccataggatccttttatttatttatttttaatttggcatcctccctgcctgctaatctacagaatgccgtgtgtcagctctatggaattcagggctcaggctgaactttggggcatccagccactccctataggagtcttgtaggattgtttcatgtagcccattttttttttttttttttttttttttttttttttttgggcggccagttccagcttcagtgactcagtagatcctcaaatacttcccatgggaaatacaactccacggtatcagaaaatacagttagccaatgtttcctgatgagttttgtgcacatttttcttgattgtatcttcagtccctttccaccccagaacagtgaacaattattttcccctctctgtgcttacacccttcaaatacttgcagacacttctcatagcccgcttgagtcactgtttggcatggcctgatgtctttggtttttattgcctctgctcataaactgcaccccctgtgccttaatagcctgaagttcgccttctccagggaaatggggatgggagtggcagactcttaagtgtgttatatgaggaggctcaggggtggatttagagtgaagctaatgaaacttcagcttccatgtcccctactcactccacctcttctaaaaccttgttacctaatttacacttgtaattgtgtactctttttcttaaagagggcctccgaaattatattattttaggcctccacaaagcctgggtccaccccttaggaggctgtgcattttgtgtgtgtacttggctgcctggctgctgaatgtgaccagtcttgattccccctccccaaggaccctgggccacaacgtctaatttcctctttttgacaaaacatgagtttctctgcctggccacaaacatcagagcccagcatcccactcacttcctttcattgtaatttgggcatgttaatatttttttcttccttttcctctcttagaacagaagaagtaattgctagtcaatgtgacataaatataattaggttcggctcagaagctcatgactcagcacagacacgaagattccacacctaaaaacagtatttagctctggcatgttggactgtgactattccaagatgacctccgcaggaatatatatgcacttcaccatttatgacaccacaaggccaacagtggggactaacccatatttgctgaggtcctcagtcactgtttcctgtactggacagaaccacatttactaggctgtgcatcaagagaaaacagtggtgttggggcacctacacatacttcgtaaatgggaatgcaatttattgttttgtgagttcactgcaggttagaagtgattaaatgacaagcgtgaatgctgagccggagagcaggttatataccacaccacttctctaatgccaaggcctggggctaagggatccggtgtttttttttgttttttttttttttttttgttttttcttcatgtcatccatactggcatcttcctggaaaggtttgtttgccctccctggcaggagtatctctgtcctcccaggagctagatttctgacccacgcgccattagctcctttctgttactcagtagacaaaggctggagtgggttgtaaatgtttcggctatcgccggtctgatgaccatgcatgcccctggccctgttctttgcttctgcatgtcctagcatgtgcctctctcgtgtaactcatcacatggcttacttgtctgtcatgctcatttgactttaagttgcttgatatagtagcagctatgttttattcattgttgatcctcagagcctagcagtgttttaacatctatgaatgaatgaatgaatgaatgaatgaatgaatgagatttgtaatgcaaaaaggtttatggatacaattagaaatcctgaatgaagatgtgaataaagaagtgtgtccaaacagccttctgttgctaaaggaaacaggacgcttctggattcacgtatgtaagagcagcgagaagctacaaaggaagccctgggtccacaggcacaccctaagcctttccaggcagatgcacccagagtttcatcaaacagattctctgccaatccatttcctctcacctgtggaaacattcctgcttttaaatgagcaaagcgcagaaaacagtgatgatctcatgaaatagtatattatctttagtgcacagagatcaggagacagattgctcaaaaaccagtgacagattggaaatgttatgtccttttccaagctgggtggacccctactgattagagccattttggataatgtatctccaaacttctgagcttttgctgctctaactgcaatgtttacatcagtgcctgaccttatactctttcactgatgaggacaaagatggtcttcacacgggacattttcacatttgtttcccagcccggaagggaagagtaatgccaccaaaatgcccgtgcttagtgttcaaaatgactacatcactgtagggcacttagctccgggatttattctcagctgtaaccacgtttaaggggccacatcacctcaaatggtcgcacaatcaaatgactctagtcttcctaacgtaggtcccgagttttgggaacacttcaattcagtgggaaggaccctggaaaagcgtatcggggcctcgttctcgtctttccctttccgccttttaatggaattgtttgaggacttttgctaatgcagtcatttccaggagaggaagccgcctttcttccaggccccaagcagctggagtgaatcagaggggcagccacatctgcacatcctgtggggcaatcgctcacgcgcgggtgacggcgccagcaggccggctggggccgggggcgcttggggaccgcggggcggggcgggggcgtaacgggtggggcctctcgggggtgcctgggccgcgccatctccacttccgagcgcgccctcccaccctgatgagtaacgcgccgtctctcccgtttactacggcgcccggtcgcctagcagcggggcgcgttgccgcggcgacaggccggccgtgtttggcattgtttgcgaggccccgccccgcggccgccaaccacccatggcttcctgaccgggtcgggcgggggtacccgggctgtttcttcctctgggtcttcctccgtcggttgagaacggtgtcccgggggccctcccagagagcagggactgccagggcaggccagggacccggcgagccgcggagggcggggccacatgtgtcccggagctgggccggggcgctaggccacctgaggcgcgtcccctctgccgcctggcgaggctgcgcgggagggcggagagactgggtagtcggagggattccttacacccaggccggtgggccagggctcgggatgtgtcgagctgctggagtccaaagtcaggcatttccctgcctctgcccggtaaagctatgggtcccaggctcccgttctaagggaaggggatgtctgcgtctcattgggaagaccccagggcgggacttcaccacccagacccctcagcagatccgagttctatttacgacccaatgcacgactgcactgaggattttggccaagttacttaacctcccagagggttaaatttaccctcaggggtaaatgagggcaaagagttgtccttcttagttctgtgaaaatcgaaaacaggtagaagaagagtgcctctaagcagaaacgaaggggaagtgcacctgtgctaccagcagacaccttgctagacccttcagacatcttccttaatcctcacaaccagcctgaaagggacgtggcatccccattctacaagtgagggttccgattcggagggtttgacttgctcaaggccacaaagctagtaaatggtaaagtcaacactggcaatctttgaggactgttcgcctgactcatcaccaggctgccactcagtaaaagccaaggcacagtcacctttaacaaaatgtacagattgcaggccagatttatgggacctcctgcagattgaggcaatggattaagtgtactttatacttctcaggtacatattagcaaccagacgctcccatattccctctgtgtctctcctggaaaaccactgataaagaacaataataaaatttattctaagccatgactggctttttctgtcatgttcacatccacttctttgtcatctattcacttggggctgcttctgaattagggaagctgcctgaacccacactccgatggctcttcagaaccaccagctcagctctgcagtcccagaagtgcctcttaagttatcctgttctttcctttgagatcctaacttccagctggtcaacaacataccacattgctccctgtgttggagtgtatgtacgtgtgtgtgtgtttgtgtatgtgctagtttgctggctaattgcaagcttcatttttctctcctgagaaaggcaagatatctgagaatgaacaccatttgtttttttaagtaatccttagagctgaaagttgggaggctggtcgtttctgaatgtaggtcaaatgctaaacaagccgcaacttctctgcagagtgtgagagtcttcctggtctggaaggatccctgaagattctgctggattctctgagacgagaaagagcttgactgtgtgttgtccttcccagttccagatcagagctgccttccagcaggaccttggggatgccccactgttctctggcatagagcttgatgtctgctctttcagctcactggggtgacacacagctctattgttgccaccgctactgggcctttaccaggctccagattttggcaacgggaataatgcagatgaaaggaaaaaaggagaggcatagggagccctgggaacagaaaggagaaggaagatgatgagacaagggaagaagaaatggaagttttaatgaaggaagatgaaaaggtaataggccaaggtatggacataccagttttatctatgaaaactgggctgagtgacacattttcattccattttgtagaaccctatagtgcatttccaagctctttactgtgaccatgtgaaatacatgaaattgatgagttagtgtaacctgtgttacaaatccagcagtaaagatatgtgtatgagatgttcatgagatttcaaaatcactgtacctacctcctgggtgaggcaaacattttgagtcagttgagagggatcgctcattcactcttgcagcgggaaggcagagaagtttcagtttatcttctgttctgtctcaatcagttgggtagaatgagtgtttagcgtgaggatgaatcaggtcccctcttgccagcagaggggtaaggtggtgtgtggtggattggagaggatgtcctgagggccagacaccagccagggcggggttgggtgacccgtggggtttattctgtgatgtcacaacggcagtcaggggtctccctgttgctccctcagcctcctcccataaggattggggggggtcatgctgggtacctaccagtggctggatgtcttctgaggtcgtccagatcagtgcttatcttattgtgcataagattcacctggggaacttagtcaagtgcagatcctgacttagtcaagtgcagagtctgggatggctctcacgtgagtccagccagaccacactgagttgtgagactctagaccagtgctgtcaaagcaaaatgcaatgtgggcagcatatgtcatttaaaattttctggtagccacattaaaaaaagtaaattggacacacatactgtgatacagcaatcatatgttatacaatactatgtttaaaatgtagccctccccacacaataaagttgggtttaatgaaaaatattttatactactttcattttaaaattaaaatttagtgaattcaaattacataaaattagaaattcagttgctcagttgcactatccatatcataagggctccacagccacacatggcaagtagctactgtattggatggcacaactcaaggccattccctgaaaaggtaacaatgtacagaaattaccattctaaagggctagtatctggaaacccagcaaacattcactaacatcattttaatgaatacataattagtgtttggggactgttaatatggaggcataactctcggagactggaagagggcctcatccaggattccagctaacagtctggatggggccctctgccctgtgaaacctgtcacactcagtcctcctctgagcttttgccagggttcccctcactgggatcccttccttctccttgctgccctgcctaaatcttacacaacctcagggcacatgattccagtctcactaccttgtggctctagccctccttactccccatttcctctttgctcatacagcatgcctgctttgcttttggtgtgttagtctgtttctctcgtgaaattctaagctgcttgaggacagaatctggttttttacttctatcgtgcttaatatagtgccaagggcatagtagctgctcaagaaatatttattattttatttaatgacctaaactacctaaggaagtatctaagagagaacatcggatctcgaagtgccaataacttccccaatggaacaacatgccttatttttggcacatcttaaattgatcaagatgtccgttataagttaatttataaatttaatacaaataaccatgagtattttaaaagaccaacacaagttgatattaaagtttatatgggaaaaaaatacacaagactagctaggaaaaccctgaaaaggaagagctctgaggtggtgctagccctaattgatataaagcatactacaaagcctctatgattaaaacaacatggcacatgtatacatatgtaacaaacccgcacgttgtgcac

SEQ ID NO: 247 - DNA, 82707 bp, Homo sapiens
  source 1..82707: mol_type = genomic DNA
ctagatcttcatttctgaaatgaattttagacaaaataactgaaatcaattatcaggccagcccacgaagtactgctgagcacaggcattgctagaagtcacaaccaataacacaactggcagtaagcgccttatcacagagatggagaacctgatcacagagcccacgacggaggccctgatgcccatctccctgcaaagcagatgagatgtccaaactgtacttccagacctggcccataaaataagatggagtgtggagatcacaaaagtaggtacctacctggagataagctaactctagattttttacaggaaagctagtttcatgccataagatattaaagctcttccttaccagaaaaaaaccttatacaaagcaagacaggctgtatttcctgtgttctaaattatcgtgggaacctcagttacatcctctcctgccatgttttggggcttggaggtaagaaagaggtaaagcaaacagataacactgtaaagggatgagaggtaagtagaaaagagaaaacaactgaaaaagcaaaaaaaggttctttgtcgtctgcacaaagcacttcctgctctgggtttccatcatgccttttctgagaaccaacacctcgtttcctaatccactactatcccatgctgtgacgggaggaccatgaccaccagcacaaaggaccacagcagaacataaacagtgcaggtgaggaaaatgcaaactttgccgtagaaagcagaaccatgtgaatttcccgtgagtcaccctcactctaaagaacactcacatatttggtaatggctctcatgagctgggccggtgacagagggcatctccaccagaaccatctccggtcaggccacatgagggtggaggcatggtatagctgacgttcaggttgacgaggagacactacaaaggcttgccatcctggaatttaccaaacccaagaagctggacactgatactttttttttttttttaagacggagtctcgttctgtcaccaggctggagtgcagtggcacgatctcagctcactgcaacctccgcctcccgggttcaagtgattctcctgcctcagcctcccaagtagctaggagtacaggcacatgccccaacgcccagctaatttttatatttttagtagagacagggtttcaccatgttggccgggatggtctcgatcttttaacctcgtgatccacctgcctcagcctcccaaagtgctgggattacaggcgtgagccagcttgcccggctgacactgacgcttctttttaaaagaaaacattaacaatgacatccagcacatctttattgctctgcttgctaacaagcagcacacctgtgttccagtggtgaaatccatgtgctcagcaacacagtgcagactgcaggcttcatcacatccccagcacgtgacccatggaaatcagagactggagctgcttcctgccatttccgagaatgaaaagaaacagaattcactaacatcttaaaaatccttctacagtgattttattataaatatgttcttttggaataaacaaatattgcattcaagactatgggcaaacttgctctaaagtaacaaacgaggaagaaaggaaccaggaaccatttagaagtggagaaaaacacagcaaagacacctgcatgccacgctcagcgcctttctcccagggagtaacagaaggttaacagggaacatcacattgcccatgagcccattctactcaaataagctttgagtttggtaatttgcacttgttttgtaaactgaactgctcctctcctcagccgcaagaagcagataggaagacagtcttcagaccccgagcatcagcaagaacactcttgattgtgtatctgtaactctgttccagggcaaaactgttccctatttgctggaagtaatgtcagagtaatccttcagcactccagccaagtgttcgttatgagtcttaaagcgtcgctttttctgtgaagcaggctttttccttctctgaataggggcctaaaggaaaaggtaaaaacaattagaaacaacagctgctctgaggggtggtgtggccaggatgttctgagcatgcccagatgccagtggctgaggatgccaggttcggacccttctcctgctctgccacccagcagcacacatggggcacagcacacgccctgaccagaccccgggcctttgttcccctgagatgcagatgccatcgggaatgaaggagcaggcacaaaaacctgccaaaatggttctaggcactaagtcaaacaaaagggacgatgaagcccttcagctctgtctctgtcatcaggtttaaaaacgtatccaccattaccgattttaaaaagatctgaagaaaatatggcaaaatcctgagaaaggaggagcacatgaaggtctgtaatattctctattcttttctatatacttgaaatattagcatcacatgatgaaaaaaattaacaaatgagacaataataggaaatcatgaagggctgcaattacactcatttgtggaaagagattgacaataaagcttccctttaggtgagtcctaaaaattcaccaaacacacatgcccaccccacaccccagaaagacacaggtgacaagctatgaagcatgacggtggataaggaaaggggggaggagcacagcactgctaacaagggtgctggtgaatcatccccccgggctttgttcttagactacagattttatttgctggtgcaaggcaatgtaaaagtcatcatttaattactaacatcccctgtgagcaggatttagagactatacggacaaaaatatctggttcctagaggacctgaaagttactatggcagaaccaggcaccaggacggcgaggctcacggagcaggggagggccccgttcaagtctgaaaggttgtgcagatcaaggcacagcatccctttaagaatagggagaagggcttgtagcagcttagagtgggagagtggggaacacacaggccctggaaggttccatatggctatacctcaagagcaggactgcttgggaggagctgggtgtagaaaggcactcacaggcctggagcagcaccgagggcgggtctgcaggcctgcaatacctcagatgtgacctgggctgcggacactgagaaacaatggcgggggaacaactcccagctcttcagagggcagaaagcggagcaggctaacagttcccagggcaggggattaagctgctttgctagagattacgcaccactttctttggtccagattcctgcatggaagaaataccctgtcgcttcagatattcttcaattttctcctcgtccatggaatctacagtgacactcctccacagtttctgaaattctgtatcaaacagacactagttattttacaatccatttttacaaactatagcatcttgatcaaaatccaggtttcagtgttatctcctctggatccaaatgagcacatctgatatgtcatcatgaaacaagtcagggcagaacatccacatgtgggacacggtgcagggaaaggcctggagacagaactgcacccacacagccccgacagtggggctgtttcttgaggccagcaaatgagggctgccacaatgaagccgccctgctttcctgggccgtcaacaccctcctttaattcctctatttagggctaacagcttatttcctgctcagctcccctaagcatgatatactcattcctctctcattgataatagaaaataagaaacgtgtagggagacgggaaccgaagtttcacatggaaatgaggttattcaacaatttatctgcaaaaaagacttttgaaatcaaataacctggtaactggtgactaaggaggcatgaaagggaaaggggggatggctgaaatagaaacactgtctcacctcctctctgtaatacaaggagaaaggcgacagtcctgcctgcagcttgtcttcagaaacctgtagtccctctgccacatcactatttttgcaaccaagagagaccacaattgggaagcattccaaatgaacattatttacatcttacattctgctcctgaagacaggttctgatcactggtttcacttaattatcagaagctactttcagacacaaaatcctaagacttacacgctcaggaacgaaaaaaggaaaagctctctgagccccgaggcttcacagagcctcacactcacaactgccccacgcactgaggggatgcaccttcccttcctttcttcccaccccagaccctcacccagcgccgccctccttttcttccagagccaagaacttcccacggtccgtttacaaatgataaatgaagtaggcatctgatactgtgctaggccagatttctttccttttccccttttccttccttccccctttctctctcatttcagtacacgctgcataaagcaaatgatgcccacataggcaggactctggtgataccatggaaatcggtttactgccacctaccctgaagcttttcattgcaggtgaccaatggcaaaagtggcaaaatctactacaaagaattcaacctgagcataaagttatttaaatccaaaatgtctctaaataagattttttaatttccatagatacattaggggttctttctactacacacccactgaacgttcatctgcacacattatggacatgacctaactgataacaactgtgtgcatgattgtctcggcctctctaagctccttgagagcagggagctctatttccatcttgtttccatgatagtcggcgtatttccatctcgtttccatgacagtcggcactgtacctagcacatgacaggtcctcagtgatttgactactgaatgtatgaaacaccatcactgtctactacagcctagacaagacttcaacgatttgactaccgaatgtatgaaataccatcattgtctactacaccctagacaagacagactgttttctttttttaaaatttatttatttttgagacagggtctagttctgttgcccaaactggaaagcagtggcgcaatctcagctcactgtaacctccacctcctgggcttaagcaatcctcccacctcagcctcctgaggagctgggaccaaggtacacaccaccatgcccagctaagttgtttctgggggggtggggggttgtgtagagatgaggttttaccatgttgcctaggctgggctcaaactcctgagctcaggcaatccatctgccttggcctcccgaagtgctgggattacaggtgtcgagccaccatgtctggcctatatttttctttttacattttttagacttttaaaaaataattttacactaacaaaagggttacaaaatgagtacacagagttcctatatgccctttatccagcttcccctaatgttaacaccttacataactgtataattattgaaactaacatggacatattactattaattcatcaacaggccttactgaaacttcacaagtttgaagtgaaacttcaacttcaccgatgctcttttcttggcccaggatcctgcctgtcacatctctttggtctcctccattctctaagtgtggccagtctttgtttccccactggtcagttgttttacagaaacttccatttgggtttgtctagtatttcctcattactagattgaggttatgcaattctggcaagaacaacacagtaacgagcttgtgcccttcttggggcacagtagcaagctacatagtgtcaacatggacccggtaaacgctgaccatcaggcaaggtgttatctctcaggtttctctgtcatgaagctatcagtttttcctttgtagttaataattaatggagagatattttcagactatataaataccgtttctcatattatcactaattttataatagcatccattggtagtgcttacctacaaaaatgactacttgtaagtaactactgacaaattatttccatcattccttccatatgtactaattagaattctactataataggctgggcacggtggctcatgcctgtaatcccagcactttgggaggccgaggagggtggatcattcaaggtcaggagttcaagaccagcctggccaacatggtgaaactgtgtctctactaaaaatacaaaaattagctgggcatggcagtgggtacctgtaatcccagctactcagaaggctgaggcaggaaaatcacttgaacctgggaggcggagggtgcagtgagctgagactgtgccactgtactccagcctgggtaacacagcgagactccatctcaaaaaacaaaacataacaaaaaacacaaagagctgctcttccttcagttcactgtttgtttgttgagacagggtctcactttgtcacctaggctggagtgcagtggcacaatcttggctcactgaagcctcaacttcctgggctcaatcaatcttcctccctcagcctcccaagtggctgggactacaggcacataccaccacaccaggctaacttttgtatttttagtagagacagggtttcatcatgttgccaaggctggtctcgaacgtctagactcaagcgatccacctgccttggcctcccaaagtactgggattaccagcctgagccactgtgcccaacctccaacttgtttttcaattatttaatttagcagactcatggatattactgtacagatttatatctacatatttattacacagataatccatgacgatcagtatttatttatttatttattttatttatttattttatttattttgagatggagtctcgcactgtcacccaggctggagtgcagtggtgcgatctcggctcactgcaagctccacctcccgggttcacgccattctcctgtctcagcctcccgagtagctgggactacaggcgccagccaccacgcccagttaactttttgtattttttagtagagacagggtttcaccgtgttatccaggatggtctcgatctcctgatcttgtgatctgcccgcctcagcctcccaaagtgctgggattacaggcgtgagccaccgtgcccagccgacgatcagtatttattttgtggttcaaacatcccagctctaatcactaagatttccttcatgttggttcctatgtccctgacttgcttccctttttttttttttcctccagtttttcttctttctctcactttctggcggtactaaaagatgttccaggctcatcttgtatttcccctcatttggaatcaatgatttcttcaaggattcctgacttgttttattatagaatggtatttaaaaaccaagatctacatattttgggtttttaaaaatagcaatctcttttttgaaaacaaaatgatcaagggacatcaaatttaaaggcagacactttattatggcagaagacagccaagtatcatgaaagtcaggcacactctaaaccgtaagggtaaataaaatcagaactgatttagaaatctactctcttagcagaaaagaggagaaaacagactagaatttaaaagctcagatttgatcctttcatttcaaaagacccttccttgtcccacatgagttaagaataaaaaactgtgtaactgccatagaagggaagaaaatgagccaacttaccaatgaggctttgcttaaaattcccaaataacgcactcacattttgtctgtgcttagccctttcccgtaaatgcaaaagtagcacaacagtgtggtgcaggcctcagagccagatggcctggctgtgacctcagttaccacatttcctgcacaaagtggtgcaaacatcttaatttttctgcctccatttcttcatctgtaaagtgaggataataataatacctgcctcgccgagcgtggtggctctgtaatccaagcactttaggaggccaaggcaggcggatcacctgaggtcgggagttcgagaccagcctgaccaacatggagaaaccccatctctattaaaaatacaaaattagccaggcgtggtggcacatgcctgtagtcccagctacttgggaggctgaggaaggagaatcgcttgagtccggaaggcagaggttgcggtgagccgagatcacgccattgcactccagcctgggcaacaagagcgaaactccgtctcaataataataataacgataatagtaataataatacctgcctcatagaatagtgaggattagaggagttaataaagcaccgaaaataatgcctgcaaatgaaacagcattatctacacctattactgttatcatcaccatctaacacccatcataattttctgtgtgctggtgtctttaataaaggcaatataaaacatttaagaagaggatcagctactagacacaaagtgatctcatttatgtaaagcagaagaaacaaaacttctaaaaatttcttaaaaagcaaaaacacatacatattaaatacatcgtaaagatgtggaaaatacacaccaataggtatccccagagaaaagaatacagtttgcttagagaattttcatttttttgttctgcagacttgacaaaggttttattaataatatgcagaaatatttgtgtattgctagtgtaaaattttaaagaaataacctaaaaataaggaggatcatacttactaataattcacgcacttgccactttttctcagccccacattaggctatggtgttctagtgttagcattaaggtacatctttgccctttaaaaaaaaaaaaaaaaaaaaaaaaaaaaaaggccaggcccagtggctcatgcctgtaattccagagcttagggagatggaggtgggaggactgcttgaacccaggagctcaaggccagcctgggcaatatatagagacaccatctcaaaaatttaaaaaacaagccgggcatggtggtgttcacttgtagtcccagctactcaggagactgaggtgggaagagagcttgaacccagtttgacgttgtgagctacaattgtgccactgcactccagcctgggagacaaagagagaccctgtctctaaaacaacaacaacaacaaaaccaaatgcagaatctcaacgagcaacacgccatgccttcctcccttttcctttaacaacacgtgttattaacgtgactttttatcctcaaaagtgtcattatatccactttgcagttccagaaaataggacatttctcaatttacctcatcttctagtgatcttacatttgagacctatcaaaataatttcttgtgtgctacacagaaaaatgcacccccacccaagatgtccacaacgtaatccccagaacctgtgaatacgttaccataaaagagactttggtgactaagaatcttgagatgaggagatctcaagatttggattctgaattggaagaattaatactgttaaaatgtccatactatccaaagtgatccacagattcaatgcaatccctataaaaattccaatgtcatttttcacataaatagaaaaaataattctaaaagtctaatggaaacacacaaaaaaactgaatagccaaggcaatcttgagcgaaacaaacaaaactagaggtaccacactacttcaaactatattacaatgctacggtaatcaaaacagcatgggactggcataaacaaaagcccagtaatgaacccatgcatttacaatccgctgatctttgacaaaggtgccaagaacacacaatgggaaaaggacagtctcttcaataaagggtgtcgggaaaactgaatatccacatgcaggagaatgaaatgaggccactgtctcacaccatatagaaaaatcaactcaaaatggattgaagacttaaacataagacctgaacctgtgaaaatactacaagaaaacacagggaaaacaacacaacactggtcagggcaatcattttttggatttgaccccaaaagttcaggcaacaaaagcaaacatagacaactgggattacaacaaaccaaaaagctgcagcatggcaaagtaaacagactgaagagacaacctacaaactgggagaatatatttgcaagcaatacatctaatatgggtttaatatacaaaatatagggcaggtgccacaactcatgcctataatcccagcactttgggagggcgaggcaggaagattgcttgagcctaggagtttgagaccagcctgggcaatatagtgagacctcgtctctacaaaaaatgttttaagattagccaagtttggcagtacatatctgcagtcccagctacttaggaggctaagatgacaggatcacttcagcctgggaggtggaggctgcagttagctgagatcatgccgctgcattacaatctgggcaacaaaatgagacgctgcctctaaaaaagaaaaaaaaattatatatattttccatatatatggaactcaaaataatagcaaaaaaaaaaaaataacctgatttaaaaattggcaaaagatctgaatattgtctgaaaattcagaaatcctgaaatgtcagaaatattcagacatttctcaaaagaagatatacaaatgaggccaggcacagtggctcatgcctataatcccagcactttgggaggccaaggcatgtggatcacctaaggtcaggagttcgagaccagcctggccaccatggcaaaaccccatctctactaaaaatacaaactcagctgggcatggtggcgggcacctgtaattccagctacttgggaggctgaggcaggagaattgcttgaacccaagatacggaggttgcaatgagccaagaccgcaccactgcactccagcctgggcaacagagcaagactccgtcttaaaaaaaaaaaaaaaaaaaaaaccacacaaatgaccaacagatatattgctcatcattgctaatcattagggaaatacaaatcaaaaccacaatgatttccaactggggcagagacttaaaggaaaaaggagaaagagaagtacaatgagccatcacttcacacctgtgagaatggttatcctcaaaaagaggaaagataacatgcactgatgaggatgtagcagagggaacacctgtacactgttggtggaaatgtaaattggtgtagccattatggaaaactgtatggagtccccccagaaaactaataactagattatcatttgatccagcaatcccacttctggatatttattctaaggacttgaacttagtatgttgaggagatgcttgcactcccatgttcactgcagcattacttacaacagtcgagataaagactcagtctaagtgtctatcaacagatgaacggataacaaaaatataatatatatacacacaatggaattctattagccttaaaaaagaaaggaattctgtcatttgcaacatgaataaacctggaggacattgttaaatgaaataagccaggcaccgaatgacaaaaaccgcatgttttcacctctacgtggaatctaaaacaatcagaactcaacagaagcagagagtagaatgatggctactagaggctaggagaaggggaatgaggaggtgttggtccaaagaaaaaggaatcttgaaaggcaggttatcctggattatttgagcagacctaatgtaatcacaagggtccttataaaggaaagaggcaggcaagagagcctgagtcaaggtggaagcagaggtcagagtgatgctgggacacaagccaagaaattcgggtagcctctggaagctgaaaaggcaagaaaacgaattcttcccatgagtatccagaagtgcagccctttttacccatttaagacttctgacctccagaacagtaagataatacgtttgtgttgttttaagccatgaagtttgtagtaacatcttacagcagcaacaggaaactaatacacactgcttgaaaattttctttttaaaaaagtactggcctggccgggcacagtggctcacgcctgtaatcccagcacttttggaggctgagggaggcggatcacgaggtcaggagtttgagaccagcctgaccaacatggtgaaaccccatctctactaaaaatgcaaaaaaaaaattatccgggcgtggtggcacacgcctgtaatcacagctactcaggaggctgaggcaggagaatcacttgaatccaggaagcagaggttgcagtaaccaagatcgcactactgcactcaagcctgctgacaaagcgagactccacctcaaaaaaaagaaaaaagtattggcatggtgcaatgactcacacctgtaatcccagtactttgggaggccaaggtgggaggatcacttgaagccagaagttcaagaccagtctgggcaaaagcgagacctccatctctaccaaaatttttaaaataataaattggccagacatggaggcatatgcctgtagtcccagctaagagactgaggtgggaggatggcttgagtccaggggagttcaaggctgcagtgacctatgactgtgccattacattccagcctgagcaacagagcaagacgctgtcttaaaaataaaaaataaattttaagtataacttaagcaggcaggattataaagacaagtgccacttcatcctcaacatttcaacaagtatttcttgagaattctgtcactaccacagtatgacctgctatctggacatctgtaaagaacaggcatcgtctgcccaaatctgtgcagcagaggctggacagaatgagaagaacttggcagcacttgctgttcttggtgatcctgctgaaatctacactgagcaattgcactttttactcgggataaacaccagacaccaaaacaagaaggggagaagccgtggggtaactctttaccttgaaaactgctttacaatgggagaaacaccatattcttttgaacaactactttaaattgtccttttattttactaaggtataatttatgaaaattaaaatcctgcacattttactgtacaattcctgaagttttgacaagcatatggtcatgctaacaccaccatgataatgatatagacagttccacaaccgcaaatcaccctatgctcctctgcagtcactctctccacgggcagcccctgatctgtttctatggttctgtttcccaggaatatcataaacatataaataaaatcacacagcatgtccctttcgaatctggcttccctcatgaggcacgatgcctctgagattcatccatgttgttggaatgtcagtcctttgttccttttcattgctgagttgtattccactctaagtatgtgccacagttaaggggaagttaagggacagttaaaggatgtgagttgtttccaattgttggtggttatgaagaaagccagtataaatacccattaatttaatgtgaatttgggttaacacccaagagtgggatggctgggttatacagtagtatatattacaatgtagagatctatacctactatttagctttctaaaggacactggacccacgtctcacaccataaacaaaaactctaactcctagaggaaaaacccctaactcctagaggaaaaaacagaggtaaatcttcatgaccttggattaggcaatggtttagacatgacaccaaaagcacaagcagcaaaagaaataaagataaaggacttgattgaaatcaaaaacttttttttttttttgagacagagttgcactctgtcacccaggctggagtgcagtggcgcaatctcagctcactacaacctcaccctcccaggttcaagtgatcctcctgcctcagcctcccgagtagctgggattacagatggggaccaccatgcccagctgatttttgtatttttagtagagacagggttttgccatgttggccaagctggtctcgaactcctaacctcggatgatccacctgcctcggcctctcaaagtgctgggattacaggtgtgagccactgcgcctggcccaaaattaaaaacttttatacctcataagacaccatcaagaaagtgaaaagacaacccacagaatggaaaaaaatatctgtaaagcatgtatctcacaatggccttgtatccagaataaagaattcttacagctctgtaataaaagcacaaaacaattttttaaatggacaaaggatttcaatacacattttgccaaatgaaatatacagatggaccggatgtggtggttcacacctataattccagcactttgaaaggccacggcaggaggattacttgaggccaggagttcaaggtcagcctgggcaacagagtaagaccctgcctctataaaaaattaaaatattacccaggtaccgtggcacacctgttgccctagctactcaggaggctgagaagggaggattgcatgaccctaagagcttgaggctgcaatgagttatgatagcatcactgcactcaagcccaggaaacagagtgagaccctgtttctacagtaaaaaaataaaataaaaataaaataaaatataaaatggccaatcagcacataaaaagatgttcaacatcattagtcattagggaaatgcaaatcaaaatcacagtaacacttcacatccaccagaatggctaaaatcagtgttggcaagggtgtggggaaagcagaaccttcctaagttgctggtgagaatgtaaattaatgtagctgctttgcaaaatagtatgacaattcctcaaaaagttaaccacagaactaccatatgatgtagcaattctactcctaggtatatacctaagagaaatgaaaacacatgtccacacaaaaacttgtataggtatgttaatagcagtattattcacaacagccaaaaagtggaaaaacccaaatatccatcaactgatacatgaaaagtgtatggccatacaatagaatttttttttttactataagcacttaatgctctttatttccctataagcactgctatagctgcatcccatgaattttgatacactgtgctttcactttcatttaatgcaacaatgtttttacctccctgtgatttcctccttgaaccataggttacttaaaggtatttaatttcaggctgggtgtggtggctcacatctgtaatcctagcactctgggaagctgaggtaggcagatcacttgagcctaggggttcaagaccagactgggcaacactgcaaaatcccatctctacaaaaaaatacaaacattagccaggcatggtgacacacacctgtagtcctagctactggggaggctgagataggaggatcgcctgtgcccagggaggtcaaggctgcagtgagctgtgatcatgccactgcactccagcctatacagtgagactctgtctcaaaaaatacataaataaaataatttccaaatggacagtctccaaatatagctactagctctgttattgatttctagcctaattccattacggctcacacacatcgttcacgtatagtcagcctttggtatccatgggggattggttccaggactcatacagataccaaaatctacagatgctcaagtctctgatatcaaatggtatagtatctacatataacctatgcctatcctcccatgcactttaaataatctctggattacttacaatgcctggtacaatttaaacaccatgtaaatagttatactgtattgtttagggaataatgacaaggaaaacgtctgtatgtgtttaataaagacaaaatttttttccaaatattttcagtctatagttggttgaatccacagatgcagaaccaaaagacatggagggccaatgatactttcaattctttcaaatacaattaaagcttgttttgtgggccagaataccatccatcttggtgaatattccagatgaacttgaaaacatacacacagggccaggcacagtggctcacgcatgtaatcccagcactttgggaggctgaggcaggcgggtcacttgaagccaggagtttgagaccagcctgacctgaaaccccgtctctactaaaaatacaaaaattagccaggtgtggtggcacgtgcctgtagtcccagctactcaggaggctgaggcaggagaatcacttgaacccgggaggaggttgcagtgagctgagatcacaccattgcactccaaccagggcaacaagagtgaaacctgtctcaaaagagaaaaaaaggaaaatacatgcacagtattctgctgctgcaggacagtctgttctataaatcccaattaggtcaaattagttgatggtgctcttccggacttctatatcataattttccatctatctgttcaatcaactactgaaagaggaatgctgtagtctaactgtggatgtatgtatttctccttttagtttcatccatttttaattcatgtatttggaaggcctgttgttagatatataggtatttaggactattatgtactcttggagaattgatacttttaccattatgtaacgtcctttttctttttgagacaggctgtggctccgtcacccaaactggagtgcagtggcacagtcatggcttattgcaacctccaactcctgggttcaggtgatcctcccacctcagcttcctgagtagcactacgagactacaggtgcacaccaccacaccaggctgagtttttattttttgtagagacgaggtttcgccacgttgcccaggctggcctcaagcgatcctcctgcctcagcttcccaaagtgctgggatcacaggtgttagccaccatgcccggcccatgtccttctttaatccttggtaattttcctggctctgaaatctactctgtctgatattaatatagccaccctagctttcctgatagtgtttgcacagtatatcattttacatgcttttacttttaacctgtctatatttattttttatttttttatctttctttcgagatggagtcttgctctgtcacccaggctggagtgcagtggagcaatcttggctcactgcagcctccgcctcttgggatcaagacattctcctgcctcagccccccaagtagctgggattacaggcgcatgccaccacactcagctaacttttgtatttttagtagagatgagggtttcaccatgttggctaggctggtcttgaattcctgacctcaggtgatctgcccacctcggcctcccaaaatgctgggattacagctatgagccaccacacctggcctaacccatctatatttaaagtgagtttctttttttttctttttttagacagagtctccctctgtcacccaggctggaatgcaatggcgcgatctcagctcactgcaacctccacctccccagctgaagcaattctactgcctcagcctcctgagtagctgggcttactggcacgcaccaccacgcctggctaattttggtatttttagtagagatagggtttcaccatgttggtcaggctggtcttgaacttctgacctaaagtggcctacagtgggtttcttatagacagtatatactagacagctgcaggaatggatctttaaaaaaaaaaaaaaaaaaagtggccaggcacggtggctcatgcctataatcccagcactttgggaggccgaggtgggaagatcgcctgaggtcagaagttcgagaccagcccaaccaacatgaagaaatcctgtctctactaaaaaatactaaattagacgggcgtggtggtgtatgcctgtaatcccagctactggggaggtgaggcaggagaatcacttgaacccagtaggtggaggttgcggtgagccgagatcacaccactgcactccagcctgggcaacaagagcaaaacttcatctcaaaaaaaaaaaaaaaagtatatactagagtcttgcttttgcacccaagctgaaaaatagtgtgtttagaccatttacatttaacacaatgattaatgtagttggaataaaggctataatcttcaccactgtttctatctgttccatctgctccttgtgttttccttctgtctccgtgttcatttagattagctggatacatttgtatgattccattttatctccactattggcttattacatttttttcaaaaaatgtttttagtggttgacctaggtttacaacatacatatttaattaatcagagcctagcttagagtaagtcatagcatttcatatgtcatgtaaagacattagaacagtatactagaccaattattgatcccttctgacctttaagctaatttgtcataaattttatttcccataacacgccctaaacacaaaatatattgttaatatttttgatttatggtcatctttcagagaaattagaaaaatatttttaaataataaaaactctatctcctagaaacgtatttgtatagatccaaatgtctaatgtcatacctcttcttcctgaacaacttcctttaatatttccagtagtgcaggtctgatggcaatgaattctctccatttctgtttctctgagagagcatttgtccttcatttctgaaagattatttttgccggatgcagttgctcacacccgtaatcctaacactttgggaggctgagaagggcagactgcttgagcccaagagttcaaaaccagccttggcaacatggtgaaaccccatctctactagaaatacaaaaaaattagctagatgtagtggcatgtacctgcagtcctagctactcaggaggctgagatgggaggatgaattgagccctggaggcagaggttgtagtgagccaagattgcaccactgcactctcgcctgggccacagagtcagacaagaaaaaagaaaagaaaggaaaggaaaaggggaaggggaaggaaaagaaaaaagaaaagaagagaaaagaaaagaaaagattatttttgctgtgtacggaattctgggttgaaaggattttctcccttttggccatttaaagatgtgctgcattatctttcggtctgcatgggttctaataagaactctgcattctttttttcctctggaattagtctctttcctctgactgccttcaatattttccatctttcatattctgcaatttgaatatgatatgcctcggtgtttttctgtcatttgcctggtttgggggatgatctattggtgttctctgagcttcacagatctttggtgtccatcattaattttagaaaattcttggtcattacatcttcaagtatttcttctgccccgttttctttcttttccttctcagactttacaaattcagaccacttgatattgtctcacagcttatgggttctctgccctatttttttcacacttcagctgtattcaagttcacagactccttctttggctacaccaagtttaataatgagcttgttgaagacatttttcacctatgttactgtcattttcatttttagcatttattttattttcttacagtgtctatctctctgctgaaatatcctacctgaccatacaagttgcctgccttttctactagagattttaacatactgaacagttattttagattccatgtctggtagttccaaagaatttggtcttaaaaatgtcctgtctcaattccatgtctcgtagttccaaagaatttggtcttaaaagtgtcctgtctcaatagtgtgttgttcttccttccttctttttatgcctcaaaaacttttttgaaagcaggatatcctttgtaagacagctaagactgaggtaaatagtttttatgcctgggaaatgggcccgcctttccttctgccagatctttagtgtgtggaggttgagtcaatctattgtcagaacagaagcgtggtttggaatttgttgctgccatggttacccacaatgtaccaccagcttcgaactgtgttagggtagtggctggtttgccagaggatgttttcctcagtgtctgttcgaccttcagcttttttggtcttccttttacgctgcatctgagctggtctgcctccacgttcttgcgccttacaccgatctccagtgtcacctgtcagtccacagctgttagcctcgtatgggtgggaagattctctgacattaggattaagccttggtcttgggcaaacactgtcttccttggtgactggggtgtggccttctcagtgctcctgccctttctcctccactaaagttctgggcctagcacatattcctgtccctcgccaaggacgaaagactttttttctgttctctttccacagtggtttaaggctcttatctcataggagcaaagaagggaagaaggactcagacagggcttcgtgtctttccaaaaggatctactgtccctctcctccagggggaacagtaagggacactttctcagtacccacacccttgcctcaatcttttttgtaagcatccaatgaaatctgtggagaagagcctgtgagtggatacaaactccccctgtgtctgcagccccccaggcgatctctgttttcttgctggtccacactaagttcattaaattttaactgaattctcctgcgggatgttcactttgtctgtctcaggtaaacaagtgctcaggtcttacctttccaagggggtgcctgtctctccttacagtttgggttgggaggttgtcctgcaacctcagctcactgatgaattcaagaagatatcagcatgcagacttctggggtttgttgttgctgtcaaggtaggaacgatgctctctctagctttctccattctaagtagaagctaaaagtccccaactatctgcttttcagccaaactttaaaggctgtttaatgaatgtggctagctttgctcactataggcatatatgaaagaaaataatttcaggtcaaacttccaactcagcaacaaaaatatctctgtaatcccaataaagcatgcaaaattactgttttaaaatgtaggcaatagccagaattttacatgtcaaacttattattatagctgttaaagaaactatatcctaccaaagaatagttctggtattttgatcatcaatttgttaagttctaatttatcaacatgtgaaaactgtatccatttctttagaatatgtattacatatctgtccaacaagtcaactgtgtacttctctttgtataacaataaaggcaaaatgggaaagaagtacataggaaaaacataccttttactcactggttaatttcattcaatacactttctaccactgcaaaatttcagttccttgaaaacagaaatttctttgcctttctacctgatatgcaaagaagcttacatactgcggacctcttatgacacaatcgcagaggtaatattacctacttaaatagtggcagcaatggtctggaaagctgatctgtatattactgtatagaaagaacacacaacactataaattttcatggcacaatagaactgaaagtacactttaaaatttttaatttaactagttccttttgtttaaagtcacttgagctattttcagagaaaaaccctgaataaaaactcttcaatttttttcaataaaacatttatacttaatccctgcctttccttagctcaatgctgttgcaatatttaaacatgacatctactatgtaaatgtaaatatatgacatctactatgtaaatcatttaaatatgacatctacgtaaatgtattacagctgcataaatacttaagatgaatactggaacacgggtattttagaggtacaatctcacagaatctcaaatttaattactttttaaaacatgtggggacaaaatgttcagttgacaaagagaaataacctggttttctttaattttataaaatgcgtgaaagaaaatgaatttttaaaacaagacaatctttggctgggcatggtggctcacaccagtaatccctgcactttgggaagccaaggcaggaggatcgtttggcccaggagttcaagaccagtctgggcaacaaagcgagaccctgtctctatttataaaaattaataaaataaaaaacaagatactctttatgttctatgaggttggcaaagtcaactaaaaacacccaatcagtatttatgaggacatgaagaaataagattccttctcatttattactgtggaggtataaattggcccaattttacaacagacatttggtaaggcattagtattttcaaaaatatgtctatcttttgatccagcaattcaacctcaagaaaatgtacacacagcactatctgtaacagcatagagcaaaaaaataaaaccaaaaaaataaataaataactggctgggcacagtggctcacgcctgttatcccagcactttgggcggctgaggcaggcaaatcacttgaggtcaggagttcaagaactagcctggccaacatggtgaaaccctgtctctactaaaaacacaaaaaattagccaggcatggtggtacgtacttctaatcccagctactcgggagtctgagacaggagaatcgcttcaacctgggaggcagaggttgcagtaagccgagactgtgccattgcactccagcctgggcaacagagcgagagtttgtctcacaaaaaaaaaaaaaaaacttcccatctgtggagtttgtatacctggaaatgggccagaaaaaattgttttagagtatatcaacaaaatagaataccatgtagccatttaaaaaataacgatcaggcagggcacggtggctcacacctgtaatcccagtactttgggaggccaaggtgggcagatcactaggtcaagagatcgagaccatcctggccaacactgtgaaaccccatctctactaaaaatacaaaaattagctgggcgtggtggcacccacctgcagtcccagctactagggaggctgaggcagaagaatcgcttgaacccagggggcagaggttgcagtgagcggagatcacgccactgcaccccagcctggtgacaaagcgagactctgtctcaaaaaataaataaataaataatgatctaaaacagtatgagagccccagagcacagactcaaaagtggtagctactataagaatcctgaattcttaagataaaggtgaaactgtttaagcttccagtaagtaaaaaagttgccagcaatgaggaaaaagattgtccattagaattctcatcagaaacaccaaaaaccataacgtaactgcaaaaaatcagcacaaatgtggcctgagactgctaaattggctttctttgctatctgtttaaccaaacacaaaactataaaaccagtgagtcagtgacagatggataaataaataaccaggttaagtaggattaaaatgactagcaccatgggtactattttatttttccgatactaataatagttaacattaccatgttcttactttccaccagattctgttccaagttccaagcacttttatttatattcactcatttaatcctcaaagacaatgaggtaacaatactattatttctattttacagatgaggaatctcagagagaggttaagtgtcttgcctaggctagtaagggactgagctaagataaaacctacatggaatgaataaatctttttttagagtaaaaaataataataaaaaataaattaaaaaaagataaaacctacaatctaactcctcagcaccagcctcttccccatcacatttatactacctttaaatgaataagcttctgacttaaggaaagaaatgcctttgaaaaataagttgcctgcctaggtccaactactctgtgttcacttctacactggattaaaaaattactacaccatcaactctctccttgagctaattctcattttaggacaagtgcttctattacagacagaaccctctgtgtgcctgaagtgtgcgcactcagagttcctctctatggctaaggttgccacctagtggaacgaaacgaaaatcttcacacaaagcataaagcattctgaggctagagatgaatgttaaaacgtgtccgttttcaatgggtcttccctggaaacacacattccttatatcattaacaaaaacttgttttgttttgtttttgttactgatttacgtaatactggcactttcaactaaaagactggtggtaccttacccaaggttcctgtaaatggctgttccctctggtgtctctacagcaccgtgtgaacaccaaaatgacaaaatgcaaacagctgaactatgcttcctatgccattctacccgctcagcctggaaggtcaaggacagcaacctcattcactgtgatcttcttccaccaccaagtgtgcggaatgacaggagccaggaaaaggaatctgaaaacagtgggtctcaatcttcctctattctatcaacataaactggacctttaaccaagttcccaacaaggggaatttgttctccaggtgacatttgataatgtctaaagaaagttttggttgtcacactgcagggaagctaagctactggtatctaaacaagccaaggatgctgatcaatgccctacaaggctcaggacactccccacaccaaaaaaaaactactcaaccaaccccaaatgttaacactgccaaggtcgaaagccctgcttaacccccaccatccttcttaagagggacacagatcagtgaaaaataccagtttataacaataagctgagcctacaaacccaattctatttaacatatataaacaaagtatttttggcacttttaataaacttttctaggaatatacaatgtatactgtacacagaatatagcattattaaccttgataaatcacagaagaaatgtactttgtattttcagaactttaccaagaatcctttaccacttaaggaagagaccagttatgacatctaagttgccaatacatcgtaactatattggcccattggtggctatcatcttcatggtgactctacaatagaaagatatacaactgtttcaattccattccatttacattctagggtaactgcctgagcacttatacattttttaatctttttttttttttttgagacagagccttgctctgttgtccaggttggagtgcagtggcacaatctaggctcactacaacctccacctcccaggttcatgcgattcttgtgtttcagcctcccaggtagctgggattacagacacgcaccagcatgtccggctaatttttgtacttttaggagaaatgggatttcaccatgttgaccaggctggtcttgaaatcctgacctcaagtgatcgcctaaggcaggcctcccaaagtgctgggattacagtcatgggtcacagcacctggctgaagtaaatttttaaaccataaaaaatatattttaaagaataaaaatatattttcattctttacattacacttagggtattacactgactttttaagaaagtatgtgtatcagtaggttatattatctatgaacttaatttcacaaaagcaaagatgacgttacaaatcatttgttataagagtgttcactgactttgggaggccaaggcaaacagatcacctgaggtcgggagtctgagaccagactgaccaacatggagaaacctggtctctactaaaaatacaaaattagccaggcgtggtggcatgcctataatcccagctactcgggaggctgaggcaggagaattgcttgaacccgggaggcagaggttgttgtgagccaagactgcaccattgcactccagcctgggcaacaagagcgaaactccgtctcaaaaaaaaaaaaaaaaaggtgttcactgaatctggtgaaacaaaagccactctaggaaaaaaactaaagtccttcccacaatctttgtctttgctattccctctgcctggatactcgccttacagtcccacacgtggacactattctgacccttggcaaggctagctccaccccatttttcctgttttggcttatttcaccttttttcaaaggttgtatctgaacttcaccacccacaccttaccatagagctcatttattttcttcctagcatttcatacaatccgcagtattttcaaattttgtatattgtcctccacttcagaatggaagctccataaagacagggactggtctatcttacctctatatttagcaaaatgactagggcacttaggaggagaccattaaatatttcttgaataaacaggcttacgaataaacattaataaactgtaacaaaaatcccagaaattgtcaacaagggaataaaaagacaacagaggataagagaatgaaaataaattataccatttccaagtaaatgatggggagattacaacatataataaagacggtaaatgtaaaatgacagtcagaactgattcaaaagttaaagccagccatatgccatctagaaaggaaatacttaaaacaacaacaaaaaaatacagacagaaagtaaaagatgggaaaaaatatataaaatttttaaaaagccagaggttatgacagtcagatgggaataaagccagacatcaaggaaaagaacattaaatacaacaaagggggacacattataatgattttgaacacaattcttaaaataaactacgactgccaagaacgtttataaactaaaaactctgcatgaaaatataaaaagcagtaactacaggaaaaataaacaaaaacataaaagttgtgagagattctgatgtttgctcagtcactgcttagatcaagtagtcaaaaaataaatatgtatgtagatgatgatctgataagaatattttctgttaaaatgaaaacacaacaaacaacagagataaaataagtagttcacaaagaaataaggaaagaacaaatacaaaagtgcaccatagagaaaataacagtgagaaaattaagtccgagggccacgctctgaaaaaccgcacactattaaatttgaaattttaaaaagaatggttttgtagaaaaacacagaattatcaaaattgacttgcaagatagaaaacttaaggacataagcaaataaaacattaagaatgttgccaagaaagcaattagccagatacattcatgggtatatgccttcacatttttaaagaatctactattctcataaggaatgagggggggagaggaagaaaaactacttttctttttatgaacccagcataataaccataaccaaaatctgacaaagcacacaaaaaagaaaagtgaccatactgaaacaattgtcctaaatacattaatattaaaaatttagaaatacatgaagccaaagaaaggttatctaggagtgtaagggtggttaaatattaagaaacctagcagtacatttcaccatatattaaataagttagcaacaacaaagatctgaaaagatgcaaaaatattttctcaatttacttctgcattatcttcctgatttctatgactacttcattaaaataaaaaatacatagccaatgtgtaagatatgtaaagacatttgcttcagcattgttaactattttaaaactcattaatcaggtacacacagtggaatactaaccagccatacatcgttatggaatatttgtaatgctgagaaagcaaactaaaagaataaacatcaaattatttacagaacttgttcctgattatgtaagatttaactaccaagcatatgttatcacaagacacggaacacatatccatgatgcatgtttaatttctgcatcacatatgctagagtttaatattactattttactctatgtatttctagattgttaatgttttctaggggggaaagtgaaaattctcattttacccctataagctatgcaataaggaaatagaaaagagtttaggccaacaaaggccatataaaatgacaaatgaaaacgggtaatattaaggaagtatagataaaagatacacaaacaggaaaaagcaaagttaaaacaatagtatccacagaaagagcacacaagggccagaaagtgacagcttagcgtgcagattacaagaacatctgggcttcccactgctaaacacacagtgtactcctaaaataaccccaaagaaatgctattaagaaattctagagcttcatgtacactcttacagagctactgcaatctctttcctatcaaccacccgcctcaagttaaacatctgcttacacaacagacatgctacactatgctgccatctgcagagcagacttaacactaaaattcccactgagaacatttaaatatgtttgttgaaggcatcaaagtaaatgacggagaaactaaaacttaactagagatacaactatattgggaggagagagataggtataggaaagagaaatgacagtaagtcacacaatgtttaaagttgaaaaaaaatcaagaaacaatagcataagcatattattagcaattgggaaaaaactgaagaatccaaaataaaactagttaagcagctgccacaaaagaaagggactgcagctagagaagggaaaggcacatctgccttttagtataggctcttactctctatctgaacttgtaatacttgtgataggtttttttaagtactgcaaatatttttcaaaatgattgttattatacctaagaataaaggaatcggttatttcttagatttttttttttttgagctcagaaatatcttaaatggtttttaactttcttttttaaaggcagagtctcactctgtcacccaggctggagtgcggtggcacaatcagctcaccgtaacctctaactcctgagttcaagctatactcttgtctcagccttgtgagtagctgagaccacaggcatgcgccaccaagcctggctaatttttcagtttttaatagagatagggtctcacttttttgcccaggctggtcttgaactcctagcctgaagcgatcctcccaccttggcctctgaaagtgctaggattagaggcatgagccaccatgcccagccttaaatgttttcaaaagcaagaaatataaaaattagcataaaggcaacattgcaagtaacgaagactgaaagcaatataaaaatcgccaggcagtactgaagtctttgttcaacaggcacctatcactacaatggatagcataagttcactacatacttgctttgttatataaaagcttattagaaacaacaacatcaaagaactggaatattctgcacatttttatttaattaacatttattgtgaaccaattacatgtaagatactcaattgggattttcacaaaaatacaatttcctaaaacaagttcagggaaactaaagccctatctaccagaaccacaagcctggatatctatagacagataacaaaaggaaaacttaaggttactgcacaaatcacaaaatcaattaaattgatgtccaattattttcctgccattttataaaacttcaaaagtaatacaaatttacagtaaaataccaccaacacttgctaaaatggcaattggtaaacttgaataatacatttttcatcactaaacccttgtttaatgacaaattattgacaaaaatttaaaactaaagtccaaacatacgtatcatatacttagtaagagattcaatatacagcttagcatccaactccacaatttccagaaagaaaaacatcatctccttccttattcaatttgataactgaaagattcataagataagagaacactattcaccaataaaagtttattctttttcccatcctgtatcaagcttttgtatcaggatatgaacttacatttgtaaaagtctaaagataaagaaataaacccgtttggttcagttgagctataaacattaagaaatcctgaactgcgattgtaagtataattaacctaaaatctttcaaatcacatatttcaaattgcattctaagcaacaatatgttagacacaggggccactggctgtgttctaagaaatgataatgctaaaaaagcaatataagatttaaattataattgtattataaatattaattttaccaccctaaaattgtaatatacttgcaaactaaagtataatacagaaaagctcaccttcatccacagaaaactgacagctcttatcattgaagaaaagtattttcttcttatcgggacgatttacaaatagtatctggtcccccaaagccttaaagatagataaaataaagatttttcagttaactccaaattacctcaccaaaaaaaaaaaaaatttaaacaataaaggagtttcatttccttaacacactcagtataccaccatagggtcctccaccataggtccactggacccaattttagttttagttttgtttttaagagactccacccagactggagtgcagctcactgcagcctcaacctcccaggctcaagcaatcctcccacctcagcctctggagtaactgggaccactggtgcattgccaccacgtctagctaatgttttcaattttttgtagacaaagggtctcactatgttgccagggctggtcttgaactcctgggctcaagcgatcttcccacctcagcatcagaaagtacagggactataggtgtgagccactgcactcagccccaattttagtttttgagtttctttcttgagtagttcaattttttaaaaattgatatttccagacttgtattcttagaggtcttccaaagaacaaaaataaaacgtgtttcacttaaaacggaaaattcaatctttgctgcaattactatttgggtccatggggctctttcactaatctaagacacataatagaatcttggtgttcttacttttcctctaccttgagatatttcgctccttactcatcattacccatcaattatttccaattgtgcttttaaaacgctaaaataataagaaaatagaagaatgattaaatcacctagaaatgtgatgcaatagtgaaatacatgggcatccttcagttttcttactgcattgcccaaaggattacattactccttttcaagagatataaaagattggaagagtcttcttgttgtcttttaactttcattgagtacacctgacaaaaaaaattttgtattttctacccttgagagcaaagacaagaaaactgaccaaagacatttcacaattattagatgaatcaaaatatgaatgcaaaaagccaaatagcagcactctagactatctggcaaaaattcatcataggaataaagtctcaagctatggagtctttagatgacaataactcaagtgaagattctcaagcttaagaatcaacaagcgaacaaaatgcttctcaatacaaaatggaaacaatattctcatcccgttattcaccagaagattatcacacagtattttgtgaaaagaatctttatcatctcactttgctaaaaggatatatgacagtattcttctttttgatgtgttttccaaaaattacttgatacagaagtttgctgtgttaaattcttactaaaatctctaataaagctgttttcatcatcccattattcttacttatgtaaattattcataaaatgacttaaagtagcttaaaaataatagtccactagatcaaggtggtaaaaggtgataactacaggatgagcaacccaaatcccaaaatctcgaatccaaaatccaaaactttttaagtgctgacatgacatgccaaagaaatacttactgggggccaggtgtgatggctcacacctataatcccagcactttgggaggcaggaggatcatttggggtcaggagtttgtttgttttgagacggagtctcactctgtcaaccaggctggagtgcagtgacgcgatcttggctcactgcaagctccgcacggtggctcacgccattctcctgcctcagcctcccgagtagctgggactacaggtgcccgccaccacgcccggctaattttttgtactttttagtagagacagcgtttcaccatgttagccaggacggtctcaatctcctgacctcgtgatccacccgcctcggcctcccaaagtgctgggattacaggcgtgagccactgcactcggccgaggtcaggagttttgagaccagcctggtcaacatggtgaaaccccatctctactaaaaatagaaaaattagctgaacacggtggcaggtgtctgtaatcccagctacttgggaggctgagacaggagaatctcttaaaccaaggagacagaggttgcagtgagctgagatcaccccactgcacaccagccagggcaacagaaagagactccgcctcaaaaaaaaaaaaaaagagaaagaaagaaagaaagaaatactcactggagcattttggatttcagattttcaactctggaatgtttaaactggtataatgaaaatatcccaaaatttgaaaaaaatcccaaaatctgaaacagttctggtcccaagcattacagataagggacagtcaaattgtacatacataaaataaatgaaagaacctgaaggcattgctaaaaaaaattaaagacatgaataaatgaattctgtgctcatgtattaaaaaacttaatacagttacgatggcaatactacccaaagttacctattcaaggtaatccctatcaaaatcccaatggcattttttgcagaaatggaaaaatccatccaaaaatttatatcaaatctcaagggacctcaaaaagcctgaaatggtttagatctgtgtccccatcaaatctcatgtcaaactgtaatccccaatgttggaggtggggcctggtgggcggtgactggtatgaaggtggatttccctcttggtgctgttctcctgataatgagttctcatgagatctggtcatttaaaagtgtgtggcaccttccccactctctcttgctcctgctccggccatgtaagatgagcctgtttccccttcaccttctgccatgattataagtttcctgagacctccccataagctgagtagacaccagcatcatgcttcctggagagcctgcagaactgtgagccaaatcaatctcttttctttataaattatccagtctcaagcattcctttatagcattgcaagaatagactaatacatagccaaaacaatcttgaaaaagaacaaaattggtgatctcactcttactgatttcaaaatatattacagagctacattaatcaggccaggtgcagtggctcacacctggaatgccaccactttgggaagccgagggtgggcagatcacttgaggtcaggagttcgagaccagactggccaacatggtaaaaccacatctctaccaaaaataaaaaaattagttgggtgtggtggtgtgtgcctataatcccagctaatcaggaggctgaggcaggactactgcttgaacctgggaggcagaggttgcagtgacccaagattgcatcactgcactccagcatgggtgacagtgtgactctgtctcaaaaaaaaaaaaaaaaaaaggctacattaatcaaaacattgtagtgctggcatgaagaaagacatacaggcagaatagagggcccagaaataaaccttcacatatatggtcaaatgatcttccacatgagtaccaagactaagactattcaatgggcaaaggacggtctcttcatcaagacactgagaaaactggatatccacatgaaaaggaataaagttggactcttacaccatatacaaaaattaactctaaatacctaagacccaaaactataaaactcctagaagaaaacataggacaaaagcttcatgacattagatttggcagtgatttaaacatgatactaaaggcacaggcaacaaaatcaaaaatagacaagagtgcagcaaactcagaaactggcaaattaaagagcacaatcaacagagtaaaatggcaacctacagaatgggagaaaatatttgcaaatcatgtatctgttaaggaattaatatccagaatatattttttaaaactcccacaattcaacaacaaaaacacaatggaatattattcagctttaaaaaggaagaaaatcctgttgcaagtacaacatggatgaaccttgagaatattatgctaagtgaaataagccagtcttggaaaaagattccaagattccaagcaaacgggctaaggctagaagaacagaagagacatatcatatgctacctgctgtagggcagacaaggtttggagtaactgcccacttaaccacaaaacaaaacaaatagaaacactcttgggaggaatgtaacagaatcctgagtctttacacatattaatataatccacaaggtctaagacccaacagaaatgtattagatatatgaagaaacaggaaaatatgacccataaaagagacagtcaatgcagaccagctctgagatgactcggctgttagaataagaagaattttaaagcagctataagaaatcatacttaagggtgtaacaaaagatacttgtcacgaatggaaaaaaaagaaaacaaaattcagcaaagaaacagaaaccagaagaaaaatttacaaagaaagactagaactgaaaaatacaattaaaaaattcaccaactgggcttaacaagttggaagtgaagaagaaaagtgagtgaacttgacaatggattaatagaacagaaaaaaaattgaaataaataaacagagcctcagggacttgtagtacaataccagaagatctgacatgtataattccattaccaagaagaagagacaaaggggcaagttttcttctacaggcagcaaaatgaatgaacctgcttaacaagttaacattaataatgagcaactgtgacaaatggaaacaagcagctttccccagtgagtttcaaatttaaactggaaatgtcatctgtatcagtaggactttcatagatagcccctttaggacttcaaaacagccaggttattaaccaatgctttcatgttttaatgcctctagttcctcaggtaaggaacatctactagtattatagaagacactcttatttacaaacagagcttacaagagaaactctattgcctttgaggaaaattttccagaaatagcctgaacaatcaaacaatcatatagtaacagcaacaagaacccgtcaaagttacacagagatggctgctccctttcctgctaggtggcacaagacaaatttcaaaccttcaagtggctcactgtaacccatgtgtatataatagaagctttaaaaacaattgtaaaatgtttgatatttttaaaaccaagaagtcattattcattcaaattatattaagacatagaaagaaaagagagattaccttgacagctttctgggaattgggcagtgcttcttctatgtcttctaaaagaattcctcctaatcctcgctggtcatgctgatctaagagcctaagtagggccttcttatctctcacgttgtacttgggcttgaaagcatacttcccatctattacttcaattttgggattgttgactaaagcctgtaacagtgatacaattggaatatattaacaaatggaacataaatatatatatatatttttgaaacgtaatcttgctctgtcgcccaggctggagtgcagtggcgtgatctcagctcactgcaacctccgcctcctgggttcaagcgattctcctgcctcagcctccctctcctgcctccctccctctcagcacctgggactgcaggtgcgcaccaccacacccagcgaatttttgtatttttagtagagacggggtttcaccacattggccaggctggtcttgaacttctgacctcaggtgatccacccacctcagcctcccaaagtactgggattataggcgtgagccactgtgcccagcccatatacacattcttaattctactaattattttaaaatacaacactagccaatacagtggcaaattaaaagtaccttatgaatacaaactggcaggcctaaaatcctggacatccagaattccagaacagtagatcagcacggtgctcactttttataaaagaaactgtgttttatttacataaattctttgaagagaaataaaccattttatcacaactactttgaaaaaagctgaacccatattcttctagtagtcaaaatgtgtaggaatcaataaaacacctacaaatattaatagacaaagtgaactgagtagtgcccactccatctgcaaagtacagcttatcacatactggcattataaagtaaggaacataacccttactagtcaatggtcttccccatctgctatcaactggcaatggcagctgtggaaggaactgaaaaggaccagactagtgcatacaagaactttacctataatgtcagcttgagaatgaaactgagtaggaatgcaggaattactgaatataattatgtttctagtcagttctgttgtacagttagtatcagaaggaaagctcttcaaaaagagcaaccctatatattttcttctgcagctgccagcctgaccctgaaaggagaaagagaagaaacacagaaagaagaaaaaagggagaatagaatagtaaaatgatcaaagtcattgttaactaaatgttggtagtctatgaattctcaaggttagctaaaccagcaaatttaaatgtggattaccattgtttgtgtatcactaatacaatgaactacaattatactgattaatggtcatgttacattataaaagtcaagacctgtattttgcttggtaaaaaaataaatgaattgtatgttaggaattttacatttggtttctagaatctatctctggtcctagaaagtagtcttcttagttttcacttcatattttaaagcggtaaacatttgaatttttaaatgctattcatttccaaattagcatggtcactgactgcgttggggtttcttcaaatgatgtgtgttcatacacagcattcgcgactttttttccacatcaagccataatagcagtaattgtgcaacaaaatatcttcctatccctgcagtaccttatgctttaaatttcctaaaacaaaaacaattcaatttacaagcacacaaactataaatctggcaatacaaaataagcattaatctgtaaaaacattaagtcgaattggtacaatgacttctttacaactattacacaaagtcttacctttaacattttgaaacagataacataaaattatatgaaaaccaacaaatcaatcttataaatgtgtacattcaaaaaacaaagaccctacaccatttcttttaagaaaaagtaaaaagcattatcagatttcaccatattaaaacattctaggcaaggcgcagtggctcatgcctataaccccagcactctgggaggccgaggtgggcggatcacttgaggtcaggagttcaacaccagcctggccaacatggtgaaaccccgtctctactaaaaacacaaaaattagcctggtatcgtggcacatgcctgtagtcccaactactcgggaggctgagtcagcagtgggctgagatcatgccactgcactctagcctgtgcaacagagcaagactctgtcttaaaaaaaaaagaaaattctagttacaggaaatctctcttgataatcaactaaattcttacctcagtcattagccattgtttctgcttgagtccaatatctaaatgttgtgtttcatccaaaatttcatctaaggttagaggatgcgtatctcctcgctgatgccgtgtctatcaagtgaagaaattgttattagaagacagtttcaaaatgctagatgcattaaatcatagttacatgtaaacaaaccttcaggaatgaaaaacatgtattattccaggtagcataattatagtgacgaagagccatagaccatgaaatcagaatggggttgaaactcattgctctataaaatcaaaagacaaactgacaaaaaaatatatgcaactcgtatcaccaagagctatattcttcctaacatttcaagagcttcaaaaaactaacaaaatagaccaggcacagtggctcatggctgtaatcccagcactctgggggactaaggcaggtgggatcacttcaggtcaggtgttcgagaccagcctggccaacatggtgaaaccccatgtctactaaaaatataaaaatcagccgtgcatggtggtgcatgcttgtaatcccagctacttgggaggctgaggcaggagaatcgcttgaacctgggaagaggaggctgcagtgagctgagatcatgccactgcactccagcctgggaggcaagagcaagactctgtcttgaaaaaacacaaaactaacagaaaatgacccaaagacagaaacgcgcagattgcaaaaaatgaccttaaacataggaaaagacactcaactttcaccaaacaatcctatttctagaaacttatcctacagaaataccagtaccacacagaaaagtgacttatggtcactgtagcattgttcataaaaggaaaatattagaaataacccaagcgtccatattagaagacagattaactacagcacatccattccactacacagatgttcacaaagtaaatgtaaaagttctctatgtgctaatttgaaaagatgtccaagacaaattaataagttaaaaaacatatgtatcatgcctatccaaagaaaacacacacacacacgtagataccaaaagctagagaggatgcaaaggaacaggagctgtcattcattactggtgagtatgctaaatggtacagctactgtggaagacagttcagcagtttcttacaacactaaacacactcttaccatttgatcaatctagcaatcacgatccttggtatttacccaaatgagccaaaaaattatgtacatacaaaaatccactaaggatgcttattacagctttatccataattgccaaaagctggaagcaaccaagatgtccttcagtaggtgagtgggtaaataaaccgtggtatatccagacgatggaatactatccagtgctaaaacgaaatgagctatcaagctatgaaaaaaacatggagaaaccttaaatacatattactaagggaaagaagccaatctgaaaaggatacatactgtatggctccaactgttgacattccggaaaaggcaaaaaccatggagacaataaaaagtttagtggctgcaggccagatgcagtggttcacacctgtaatcccagcactttgggaaaacgaagcaggccacaaggtaaggagatcgagaccatcctggccaacatggtgaaatcccatctctactaaaatacaaaaaattagccaggcgtggtagcgggtgcctgtagtctcagctactcgggaggctgaggcaggggaatcacttgaacctgggaggcggaggttgcagtgagccaagatcaagccattgcattccagcctggcaacagagcaagactctgttttaaaaataaataaataattttaaaaattaaaaattaaaaaaagtttagtggctgccaagggttgaggggagaggatgaacaagcagagccctgagaatttttagggcagtgaaaatactcaggaggatactagagtggtggacataggtcattatacacttgtccaaacccacagaaagaacaccactaagggtgaactcatgtaaactatggactttgagtggtaatttgtcaacgtaggttcattgactgtcacaaatgtactcttctggtgcaggatgttgatagtggaggaagctgtggggggatgggcagggaatggatgagaattctgtattttccaatcaattttgctgtgaacctaaaactgctctaaaaaaaaaagtgttttttaaagtaaataagaaaaaagtatgtatgttaaaaaacatatgcactatgaacccttgtatatagggaagggtagaaataagtatacatttgaactttgtttctgcataaagaaccactggaaaaaaaatcacaagaaactaataaaagaggttacctgtagaaagcacaagaggggagaaaatgagtaggatgacaggtgagaacaagactccttcattgtaccttattatacaactttactttttgtacaaagagatatgttatttatccaaaacaaaaataactcttcaaaagaaaaaaaaacccaagctccaagttccctcacattgagcaggttactgaacctcattgggcttcagtcaggccctggaaaactaaatagccacttcgccaaactagaaggtacagacagcagatagagacataagcttaacacaccacacaaaagaaccattcattgagcgtttgctgttaattcattcacttattcattcaaatatttagtggtaactactatgtgctgagagtactgcaatgagacacacaataaaatgcaaactacttctgcctttagagcagaagagctcccaatagaggggagaagctaaacatacaagctacaaaagttagatatggccgggcatagtggctcacacctgaatcccagcaaattggaaggtcaaagtgggcaggttgcttgaacccaggagattgaggccagcctggacaacatggcaaaactctgactctaccaaaaaattgcatatatacaaaaattaatcaggtatggtggcacacgcctatagtcccagttccttggcaggctgtaacgactgcttgagcccaggaggcagatgctgcaagtgagctgtggtcatgccactgcactccatccagcctgggtgacagaaccagatcttgtctcaaaaaaaaaaaaaaagctaggtaaacaactatctgtcaggaaggcatcttcaatcagaagaaatgaaagagaaaactggacagaccttgaatgacgacatgattaactagaatacggggaaacgccgggcagctatagtacagcagtggtctcctacgtggggtgtacacaccccagggacacaaaagtgggtacctcgtgatgattctttagaacatttattaaaattgtctttaatttccatttaaaagttatgctttacttaggctgggcacagtggctcatgcctgtaatcccagcactttgggaggccgaggcagatggatcttgaggccaggagttcaagaccagcctgaccaacatagtgaaatctgtctctattaaaaatacaaaaaattagccgaacatggtggcacatgcccgtaatcccagctactcaggaggctgaggaaggagaatcgcttcaactgaggaggcagaggttgcggtgagccgaggttgcactattgcactccagcgcaacactctgtctcggggggcgggggggagttacgctttactaatagtgaatatgtggactgacaaatactattagtaaagtggctccttcatcactagtagtaaagtggctccttcgcttcatgtcaggacatccacatttccaatcgtgacatgcatgtaggaatcctgaggcgggcctgggaatctcacatgacaaagggcccagcatgcatggcctcgctcattccttcactttcaggattctgcaacacagtgagactggcctgttataagatggattgtggagaatttttttttaaagacctttcaaaggtagacattgtacaatggtttcacaaagctgtaagaaatgaattacaaatttctccttacaaaaaggcaaaatgtttcaaatctgctcaatattctatgattatagcagctatttacagtttgctaacaattatttttaaaataattaaaataagccatctattccttcaaagtaaagctggcatttaatgatgtgtaaaagtagctgctttttgaaataaattcatgccatggaaagagcattttgaaaagactgggaaatatttccatcattatgtgatttctgagtttaaaaggtataagaataaaaactgtcatatctgcatatcttaaaattttgataaactattttctaaccttcactattatcttctttgagatgtagtctcgccttgtcaccgggctagagtgcagtggtgcaatcttgggtcactgcaacctccacctcccgggttcaagtgatcctcctgcctcagcctccgagtagctgagactacaggcatgtgccaccacaccatgctaatttttgtatttttagtaaagacgaggtttcaccatgttgtccaggatggtctcgatctcctgacttcatgatccacctgcctcagcctcccgaagtgttgggattacaggcatgagccaccgtgcccagtctacttcaatagttttacagtactttgagtgctgttttataatctttatttttaaaaagtcttccagacaaaacccttctatgagtttaaaatcaaaattgtcagtaatttaaaaattataatccattttgatatattttgcataaactgactttttttttttttttgagacggagtttcgctcttggtgcccacgctggagtgcaatggcatgatctcggctcaccgcaaccgccacctcccaggttcaagcaattctcctgcttcagcttcccaagtagctgggactatacgcgtgcaccacaacacctggctaatttttgtatttttagtagagacggggtttcaccatgttggtcaggctggtctcgaactcctgacctcatgatctggccacctcagcctcctatagtgctgggattacaggtgtgagccactgcgcctggccaaactgacatattttttaaaatgggagtttactagccaaattgtcgggattaaaataaatcagtgtcacaattttctaacaatgatttatagccgctgagtgaataatgcataccctccctccaaaaacatgcacatccaaatcaacctgtggctgtgttaccttgcatgacaaaagggacttcattggcatgattaaaccaaggatccagagataggagacattattgcagatttccaggtgtcccttaaaagggaaagagggaggcaggagagtccgagtgaatagcaagagatgtgacaacagaagaggatggaggaaggactatgagtcagggaatgcaggtggcctgtagaaactgacagagtaaagagatgctcccctttatgtctccagaaggaaccaaacctgcctatactctgactttagcccagcaagtctgccttttgaacctccgacttccaaaactggaagataaccaatttctgttgttttaagccactaaagttgtggtaatttacagcagcaataggaaacttatacacacacacaaacacacacacacacacacaaacacacacacacacgtatacatacacacattcattcctttgagatctataaatctttgctaagggtctttattgctatgacatcaattaaaaccaaggttccaaacaaactaaacctaaaacgagaccttcatcactttgtaagaaaaggttaaatgaagatgtttgacacagcactcattcaatcatactgctttcagtcagaaaaagagcttcttatactgttaaaaaaattattttaaaatagtgtattttaccttttatctctatctttttcatttcttatttttgtgtaagcttataacatatacaatgtattgatagagtaatacactagcacatgtacaaacagtaagctaagaaaattttaataagagttagccgagctgggcacggtggctcacgtctgcaatcccagcacttggggaggctgacgtgggtgaatcacctgagttcagtaagtagttcaaggccagcctggccaacatgatgaaacctcgactccacaaaaaaaaaaaaaattagccaggcatggtggcacatgcctataattccagctgctgaagaggctgaggcaggagaatcgcttgagcccagcagacggaggttgcaatgagccaagactgcgctactgcactccagcctgggaaacagagtgatattacatcttggaaaaaaaaaaaaatgaggtagctaagaaaaaaacagaggagagcagtgcagtagacttttggatatatggatctggaagcacatagcctaaactagaaggaataatggaggttacttgtctaaggagagccaatacaaccctttcaaaatatttttccatattctccattatcattattaaatttgatctattttcctttgtttcctttacattaaaagtttttttccccattacaatcaagtacaaaattaccaaaaggccaacctaacctggaaaataagaatacacctcaagaaaaatttaaaaattactagccttgtactattgtttttaaatcaaaaataaatggaattattggaatcagaaaaaaatcaatgacagaagtaataatcaatgcatgaaagcctaaccattttcactgagctttgtaaacacagaagccaaaaatccaactatcaagttgctaaggggaagctactggatcaaaatgagtgatgaacaataaaagatcaagagaaactgaaaatcccttcctcatagatcaggaattaaaaagaaaaatgaaagagtgcttacagagagtacatacataatgccctacaactagagacttgatttagttttcagcaaagaaaacatctttgttaaatttcttcctaattattggatgacttttggtgtgctgcctttcgtactttgtttcactttcttatttttttattgcaaatttgtagaaattgatttttgtagattcagctttatttggtaaccttactgaatatacctattaattccagtagttcccagattcttctagcttttctacatacttaatcacatcatctgtggttttacttcttcctttccaatttttatgttactacttccttcgtgccttactgcaccaggaagaacttccagtacaatacagaacaaaaggtgtgacaatttggtatccttgtctttttcctgacctaaagaaaacacatttgctatctcatcgttaagtatgatgttaaatctagggggttcttatatatatatatatttttttattatactttaaagttctagggtacatgtgcacaacctgcaggtttgttacatatgtatacatgtgccatgttggtgtgctgtacccactaactcgtcctttacattaggtatatctcctaatgctatccctcccccctccccccacccacaacaggccccggtgtgtgatgttccccttcctgtgtccaagggtattagggaacctgccccaatagtcatgtaggttcttttctattttccctaagtgttggccagtttgaaaaataaagggacagagtacaaaagagagaaattttaaagctgggcgtccaggggagacatcacatgtcagtaggttccgtgatgccccacaagctgcaaaaccagcaagtttttactagggactttcaaaaggggagggagtgtacaaatagggtgtgggtcacagagatcatgtgcttcacaagataatagagtatcacaaggcaaatggaggcagggcgagatcacaggaccacaggaccagggtgaaattaaaattgctaatgaagtttcaggcaccattgtcattggtaacatcttatcaggagacagggttttgagagcaaccggtctgaccaaaatttattgggcgggaatttcctcgtcctaataagcctgggagcactatgggagactggggcttatttcatccctacagctcgaccatagaagatggccacagccaggggggccgtctacagacctacccccaggcacgtatttgctttctcagggatgctccttgctgagaaaaagaattcagcgatatttctcccatttgcttttgaaagaaaagaaatatggctctgttccacccggctcaccggtggtcagagtttaaggttatctctcttattccctgaacattgctgttaccctgttcttttttcaaggtgcccagatttcatattgttcaaacacacatgctctacaatttgtgcagttaacgcaattatcacagggtcctgaagcgacatacatcctcctcagctgacaggattaagagattaaagtaaagacaggcataggaaatcacaagggtattgactggggaagtgataagtgcccatgaaatcttcacaatttatgtttagagactggagtaaagaaaggcataagaaattataaaagtattaaattggggaactaataaatgtccatgaaatcttcacaatccacgttcttctgccatggtttcagtcggtccctccatttggggtccctgacttcccgcaacacaagtgttctcactgttcaattcccacctatgagtgagaacatgcagtgtttggtttttcgtccttgcgatagtttgctgagaatgatggtttccagcttcatccatgtccctacaaaggacatgaactcatcattttttatggctgcatagtattccatggtgtatatgtgccacattttcttaatccagtctatcattgttggacatttgagtgctgcaataaacatatgcgtgcatgtctctttacagcagcatgatttataatcctttcggtatatacccagtaatgggatggctgggtcaaatggtatttctagttctagatccctgaggaatcgccacactgacttctacaatggttgaactagtttacagtcccaccaacagtgtaaaagtgttcctgtttctccacatcctctccagcacctgttgtttcctgactttttaatgatcatcattctaactggtgtgagatggtatctcattgtggttttgatttgcatttctctgatggccagtgatgatgagcattttttcatgtgtctgttggctgcataaatgtcttcttttgagatgtatctgttcgtatcctttgcccactttttgatggggtttttttttcttgaaaatttgtttgagttctttgtagattctggatatcagccctttgtcagatgagtagattggaaaaattttctcccattctgtaggttgcctgttcactcagatggtagtttcttttgctgtgcagaagccctttagtttaattagatcccatttgtctattttggctttcgttgccattgcttttggtgttttagacatgaagtccttgcccatgcctatgtcctgaatagtattgcctaggttttcttctagggtttttatggtttttggtctaacatttaagtctttaatccatcttgaattaatttttgtatacggtgtaaggaagggatccagtttcagctttctacatatggctagccagtattcccagcaccatttgttgaacagggaatcctttcctcattgcttgtttttgtcaggtttgtcgaagatcagatagttgtagatgtgtggtattatttccgagggctctgttctgttccattggtctgtatctctgttttggtaccagtaccatgctgttttggttactgtagccttgtagtatagtttgaagtcaggtagcatgatgcctccagctttgttcttttggcttaggactgacttcacaatgcgggctcttttttggttccatatgaacttgaaagtagttttttccaattctgtgaagaaagtcattggtagcttgatggggatggcattgaatctataaattaccttgggcagtatggccattttcatgatattgattcttcctagccatgagcatggaatgttcttccatttgtttgtatcctcttttatttcattgagcagtggtttgtagttctccttgaagaggtccttcacatcccttgtaagttggatttctaggtattttattctctttgaagcaattgtgaatgggagttcactcatgatttggctgtttgtctgttactggtgtgtaagaatgcttgtggtttttgcacattgattttgtatcctgagactttgctgaagttgcttatcagcttaaggagattttgggctgagatgatggggttttctagatatacaatcatgtcatctgcaaacagggacaatttgacttcctctttcctaaatgaataccctttatttctttctcctgcctgattgccctggccagaacttccaacactatgttgaataggagtggtgagagagggcatccctgtcttgtgccagttttcaaagggaatgcttccagtttttgcccattcagtatgatactggctgtgggtttgtcataaatagctcttattatttttagatacgtcccatcaatacctaatttattgagggtttttttttagtatgaagcgctgttgaattttgtcaaaggccttttctgcatctactgagataatcatgtggtttttgtctttggttctgtttatatgctggattacgtttattgacttgcgtatgttgaaccagccttgcatcccagggtgaaatctaggttttcacagttaccctcttaccactgggtttctcaaccagcattccacaaaactctaaggttccacaagaaatcgtgattttaaaaaataaacattttctaaatttctcacaccaggtgatgctggtgctcacagtaacaggcaacgaccgaacagccaaatcaatggtttcataaggaatcttttagcaccatgtggcagtgtgcaagtagggctatgttcactttgctgagggcactgtctgttgttttttgttttttgttttaagggacacccaggcaggagtacagtggcacgatctcggctcactgcaacctccacctccagggttcagacgattcctgtgcctcagcctcctgagtagctgggactacagccatgcgccatcacacccaggtaatttttgtatttttattagagacggggttttgccatgttggccaggctggtctcaaactcctgacctcaagtcacccgcccgcctcagcctcccaaagtgctaggattacaggcgtgagccaccgtgcccagcctgccactatccgtttttgatgcaataggggcagttaggccactgataattggtaagctctatatggcacaaacaaaagcatagtaggctgacaatgtcagcagctcccttcccaaattacatcctccaaccttccttcacacagtgccactgacttataggaccaaacaaactctactggtataacagaaaatctaaggaaaacattcattctaaacaagtaatttttacacaccaagagtcaactgcttcttaccactctgaaatgttgcaaaacatggattatgtagcaataaaagtaaaatgtagctgggagtagtggctcacacctgtaatcccaccactttgggaggccaacgtgggcagatcacaaggtcaagagatcgagaccatcctggccaacatggtgaaaccccatctctactaaaaatacaaaatttagccgggcgtggtggcacacgcctgtagtcccagctacttgggaggctgaagcaggagaatcgcttgaacccgagaggtggaggttgcagtgagccgagatcacgccattgcactccatcctgatgacagagcgagactctgtctcaaaaaagaaaaaagaagtaaaatgtattgtgaagttttcatattttttgcaactttctcagttactattccctttagttttataacatattagcatctatgtcttataaacatgtctgacagtgcagcgtgatgatttctgaagatacaatttacaagagaagagaattccaaacctaggcccaggaacaattctaataaggcaagtaataaagaactataatcttctgggtcattttactgcaccagtgcagcaagagagagagaacagcctaccactacagtgaaaactacttatcaatgaacttcactaggttagtaatccaaagagtcctattccattgtgcagcatctgtggcaaacaatttatgactccagcaaaagtgaaaaatcactgaaatagaaatcacagctactggacaagtcaaggtacttactggaatctcagagtaaagctcttcatctttttgtttttaaatcacattcagtgaaaaagctcataaagcacgttattagtagcagaatttattgtctaaaaagggggtatagtggatagaatcacaccactgatgggaacctaatcatgccagcatgttaaatgacagtaagtaaaatgcacagcatgagaaactgaaaaggctccactctcaaacagtgtaagttgacaaattgatgacatgtcacatgatgctaagaggtttaataaactgacaaacagcttgtttatccaggctgacaaaccaacatatttcactatatatgtcttgtaaatttttttaaacaatgctgaatttcaagaaaaatttttgtgctgcaaaaaaactaccataaacaaagggcatgacattttcaatgtggtgtcttcatatctggaaacaagaagtccatcttagagaaactgtgttggcatccacagtgatgttccccattagtgactggctcacggcaaggttttacctctcttgcaaaaaaaaaaaaaaaaaaaaaaactcaggacatcgcttttttcagagaggtactagcagcaaaaatcctcggaaatgaaatttaagatgtcttgaatgggccagatgcagtggcgcacacctataatcccagcactttgggagaccaacacaggaggattgcttgaggccaggagtttaagaccagcctggcaacacagcaagacctcatcactatttaaaaaaagtcttgaatgatgtttaaaaatgatttgctttattaaacatagaccagtatacttgagcacctaaatctcttgctacatacagaaatccagtggcttagcagaggaggtattctcaacagaacactgaagctgaaagctgaattacaaagtactttcaagaaaatagtaggccatcctttactgagtgctttgaagatgaagagtgactgcaggagctagcctcttggcagactttttaaaataatatgaaccagttgaacaagtttagaaaaaaatgttttgacttcaagtgacaagacattggatttcaaaggaaaactgaatctctggaaaaatcatgtggcaaaagaaatcttgtaatgctgtttgggcttgaaagtgaggaaggataccagcaactctgaagcattctcgaaaaccacctggaagaactaaaacacaaaattaaacagtactttctccctctttcaacacaaatgtgaacctgggtgaaggttcctttcttatcccaagcttctgcccaactgagaacaagtaagttgcctactttgatcaggtgagaaaagaaatcaagtagaaaattttaaaaaagaaaaaaactgaggtttcctctgcctatactactgacttgcacaagagtggagatccttcctggggagtagggagcaaccacacacacaaagagcaggctaataagctgggcgaaataaatgcaaagacaaaaatattctcctgtcaaaagagcactgacaattattattaacttatcatgtccacaacttactgattaggttaataaatgtgaactcggaggtatagcaattctttgcatgggttctctgagacctgaaaattatttcaagggttcctccagagtaagaagattgagaaaggctgctctattgcattgaggaactttgcctctactaatttgctgcaagtttttataataaattggtattaaattttaccagaggctgggcatgttggctcacgcctgtaatcccagcattttgagaggccgaggcaggcagatcacgaagttaggagatcaagcccatcctggctaacacggtgaaacctcatctctactaaaaatacaaaaaattagccgggtgtggtggcacacgcctgtaatcccagctacttaggaggctgaggcaggagaatcgcttgaacccgggaggcggaggttacggtaagctgagacagtgccactgcactccagcctgggcaagagagtgagactccgtctcaaaaaaaaaaaaaaaaaattttaccagcaactttttctatatccactaagagatcatgatttttctttattctgttaatataacttacactaattaattttcaaatattaaccactcatacattcctaaactttactccatcacaatgtattatcagatctatggacatatatattcatatcttatatttgaacagattaaattggttcatatattttaaaaaatttttatacctgtatttagtagagatattgtcatataatttaaatacttttatttaaaactggaaatagatccatattcttgacccagtcctactatggaccagaactgtgtctatgagccagtcatttaatgtctatggactccagagtttctaaattcaaaaataattgtcagaagtaattcagacagaagttaggccagtgattctcaaacttcagcatgtatcacaatcacttgaagggcttttttaaaaacagactgttgctcacgcctgtaatcccagcactttgggaggctgagacgggcagatcacaaggtcaggagatccagaccatcctggctaacacggtgaaaccccgtctctactaaaaaaatacaaaaaaattagccaggcgtggtggcaggcgcctgtagtcccagctcctcgggaggctaaggcaggagaatggcgtgaacccaggaggtagagcttgcaatgagccaagatcgcaccactgcactccagcctgggtgacagagcaagattccatctcaaaaaaaaaaaaaaaaaaaaagactgttgagctatactcccagagtttcaaattcaataggtctggaaaggggcccaagaatttgcatttctaacaagttcccaggtgatgctgatactgctggctggagaatgacactggagaaacactaagctagaataagccaaattaacccagatttttcaacatagtgttttacataaccgagacataaggaataatgctgaaatcaagagaaaaatcattttatcaaaaataaagtacacacttaatttgtcatctgagaattaaagtgctgtctcatatgaagaaagaggcatcctaaggggattttcgagataacttggagtgcttttaaaacttactcctttaagcaataaaatttgttttacattaaccatttctgtaaaaatcctcctaaaataaaccataaagttcctctttcatcttaaccaggtcactgaacataatttaatcttttttgatgtctcagttactgttccaacgtaaattactgagctatggtatgatagtaaccatctcaggagctggtgagatgaggtgggcagtttgtcccctccactgcatgttctcagtattatgactctgaagttcctgtatctgcctttcatctttctatttagtactttgtccaaagttatgactatctgctataaatctcactgtacctatctaatgcctcccctggaactttttccacagtttctaaatcattcttattaagcaattaaacagtttccctattaaatgaatcaactataaggagcatttctgttgcctttcttttgctttctttctaaaggtacacaaaagacagtgggagactttccaagaatctgtttacagataccttccaaatgtacttcttccctttcaaaataagcccttctctttaccttccacctccccccgccatgaaaaagtaatctcacctccattcagaatttgtgatgcagagcctgaaggaataataaactccagggacccaaacaaacagacaagccaaaaaaatggtttcagggaagcattcgtgaatggtaactgaggtgccgtaaactatccattactgggcttcttgtcttttccagtcacatatttttcaaagagtttaaaatattttggcccctgctggaacattctaatctatcataatctgtgagcaattgtttaaagtttcctctaacaaccattccccctacacccccacctccattcagtattgtccaagaacgcattgctcttaggggacagtatgataaaagtaatgcacagagaacactggttaaaaaaaagataaaaagaaatatttttttcaagaattcttatttttttattagcgacaaggtctcaatgtgtcgcccaggctggagtacagtggtgcaatcttggctcattgcaacttccacctcccaggctcatgtgattctcagcctctaaagtagctgcggttacaggcatgtgccaacacacctggttaatttctttttgtatttttagtagagacggggtttcaccatgttggccaggctggtctcaaactcaagtgatccacctgcctcagcctcccaaagcgctgagaatacaggtgtgagccactgtgctgggccgagaatttaaatataagtaattctcaaaactcattccctgaatatttattagcttgaagaaaaagcatatttagagagctggaacaatatcaattagggaggctgattcctttaaatataaaagaaatactttctaggactgccaagtcattcaaattgtgctatataaaagctgtatagaaattactttagattgagtgtgcattactcaatatggtagttaaaatctattttgtcaaatcgtatcattaaagttttattctaattagtcaattctcattatagtttttcaacagtttaatatttctaccttctactgacaaaaaataagatatgctagctgtcatactgagtagtttgaagcagtaggtatctctttcattaattacccaaataaaaatgtaaggttacttctgattcattcccttttatttatacctaatagctgagatcagagatcagaagatgcaggaacacacatttaaaaaggagtaacaggccaggtctagtggctcacgcctgtaatcccagcacttcaggaggctgaggcaggcggatcacttgagggatcccctgagcccaggagttcaagaccaagctgggcaacactgagagaccctgtctctacaaaaaaaatacaaaaattagccaggcatggtggcacgtgcctgtagtcccagttacttgggaggttgaggtgggaggatcacttgaggctaggagatcgaggctgcagtgagccaggatggtgccaatgcactctagcctaggtgacagagttaagaccctgtctcaaaaacaaataaataaataaaggaataacacaacttttatcatatcccttgcttcatattttaactgatttaatttttaatctaacatgacaagcagcgcagaaatgtttaaattattacaaaaattgacaaattactgtaattctttttcagtcatataattttcagctcaaataccttagcagtatcttttagtatgcattccataatttattcctcagtggttttcatattatccaaaatatctggtaatctatttatttgaaatttaaaatagaggaaaattttatgattcaaagcaagtttgttatggctagttggtttgacaatggagactggctttgttaactaggagatattttctaaaaattgaataagctaaaccttcatactaaaagttttcacaaaaatatattttaaacacataaaacaattataataaaaattcacaaagctatattaaaattaacagtatttctattttctcaactgcttctgaatatatcagattttaaagaaagtacctatgaagggagggaggggaactgatataagacatttgataagcctttttgatatgcttcctagaagctaagaaaataaatggttaagcactaggtaacaaatcctttggcaagttgggtggtttccattcttttgctttcaataaaactgaaggaggacctaacagaagcattaactaatggatgcttgatgataaaatcactagtgatttttgacatataacttggaagattctgatatcacaaaatttccattagaattaacttatatatttgaacatttatgtctaagcacttaaattctacaaaatctcaaaacacgaacagatttgccaaacacaagaactaatgaaggaagagaggagacagctgcattcatttaagaataaatttctgatacaaagtgaatttaatcaaaattttaatctatgtatgttattctaatcaactgtgcaccaataattgtaaaaataactcaaaccgtaagttatttttaacacttagagctttacggtcataggaaaaacattttaaattttgatttatatttcaatttatttacatattattgtggcagaaaagtttgatagatgatcaataaatgatttgaaagataaaaatacataacatttggataaaattcaaagggagtaacagatgggacacaaatattcaaagaaaaaataattaaaattcccaatcattaagggagtttgtttttatacttttaaataatgacatttagattccattagataaatttaaaagtgatatattttattgaaatactacaatatgccagaaattctgtatttctggtcatcatttaaatttttgcttgaatagtgccactatttaaactttgctaacagagtgtagttatcaacttaaatatgtacaaaggggtacacagtttttcaaactgtagggagcacaagtaaaaattctgaagttcactgttctaagacagacaaagttataagtaagccacatagggaagtgaagaccatattaacagagtagcaaaaacatgacacttaaatgtcagtgtccctcaacagagtgacagccctgagggtggcatttttttctgggtattcccaccattagtgccctaaacagccaatagattttcataactgcttaccatgtgggggaataaatggatgaaatgaatcaacagtgaatacttacgtgtcaaaatacattatttaataatggggagttatatactaacatatttatactataacccaaatacaaaccacagaatttagactcagctagacactaagtctattaaattacaaaagaaaagccttagcacagttaaaaatctgatttatattttaaccaatagatggatgaaattaaaataacaaatatagtactgtctttttcaagagatgcaactagtaactaatcgtgaataagagtttggcaaaagaagggagcaaatttgaaattacttagccatcttagctaaaaatgaaatcccgctttaataaatttagttaagattcaaagtcttggtcaggcatagtggctcatgcctgaaagccaaacactttgggagaccgaggtgggaaaatcacatgagcttaggagttcgagaccagcctggacaacacagtgagacttcgtctcttctaaaaataagaaaattagccaggcatggtggtgcatgcctgtagtcccagctacttgggaggctgaggcaggaggatcacttgaccacaggagttcaaggctgcagtgagctacgatcgtgccactgcactccagcctgggtaacggagcaagactgtctcaaaaaaaaagaaaagggaaaaaaaaagattcaaagtaaagccaaaatcttatatgatcaaaactttgtattcaaaaaatactaaaccttccatcaaacattaaattctaattcttttgtgagtcaatgtttttctaagactctcagtaaatgtctaattttctcctccaagatgcagagaagccatcaccatcatctgcctgaactatgtactttttacttctcacatcaatggaagtaataacctgaaaaatcaatcacatcctcccattggttttgccagcctgtattcattaagaggtgatatacctactgcctaggcacactcttattaagtgaaatggtgagcttaaactgtacccttgagttaatgcagattaaatatgctttggtaactcgccacaatgccaaattaatacaatgtaaaaggcttgaggtataattggcatacaataaactgcacatactgaaaatgcacaattttgataaattttgatgtatacagaaatttaacttctgaaaaccctaatctccttcttttgccaaaaagttaaataggacttttgctatctgagaaaagtacttaccttcatgtaattcacaatcttagcaagaacaccaaacttatatccagagcttcctgacaaagctttcaagttaaatgatccattgctatgatctgcaaatgaagttcaaaataacatcgtcatattatgtgtgattatgactcttgagcagctaaaataattttaatgctggtaacatatttcttgagtttttcatctagtatattctaccctgtaatattctggtgaaaaatacacaatctttgagtatatacattaaagtaccaattttctcactaagggtagaaacaaagtataaataacttaaaacaccaaaccacaattcttttataaatatctttatcacattattttttattatattttttgagacagggtcgcattcccattgcccaggctgaagttcaatggcacaatcacagctcactacaccctcaacttcccaggctcaggtgattctcccacctcagccttctgagaggctgggactacaggtgcacaccaccatgcctggctaatttttttattttttgtagagatggggtttcgccatgttgcccaggctggtctcaaactcctggactcaagagattcacccatctcagcctcccaaagtgctggggttacaggtgtgagctactgcaccaggcccctttctcctttatctcattcttatcttaactctgattagactcgctccataatcagaagtacactttattaaacaaggaaacaatacaaacctcaatcccatccataaagctaacacaaggagtggattacttctgagggaagaaaagttcaatataccactttttacatcaatttctgcttaccaatttaagaccaaaaaaataggaattaatggaaactaatagaaaaaagatatcacaattattttaaagtaaactttacagataaattaggaataaaaagccacaggcactgccactgcatgaacatggatgcttactttaaaaagcatcacagcactacccacccactttgagaaacacccccctctccttctctatctggtgtggaaaaccctgtacaaaagatcatttgtttcaaaatatctatcattttgttgcattcttacaagcagaaaccctaatgtcaccactgcatcacaaatgcattccattagtcataaccaggaacagtaaaaaatccatcataaatactagaaaaacattttagaagtacacattctattagcaaggcatgagatcagatattataaagttcccatgtggctgatccacaaagagagaggttaagtaaaaggggagaggagaaccaatctctggcaccaggttggtaataataatttaaacaaaagattgcattagaacaaccacaagtcaaatgtaacaactgtcagagatccaaaagaacagcttctagatggcaataccatactcctttgagattagtgaagtctttattgagtatccttttttgagactaaaatgaaacttcatatgcaattttcctttaaaactaactttgttacaatcttaattaattggcacactgaagtctaccatgtttccaaaagtaacaataacattaagaatgccttacagttgggaagcccaggtgggcagatcatgaggtcaggaaatcgagaccatcctggccaacatggtgaaaccccgtctctaccaaaaatacaaaaattagctgggcataatggcacgtgcctgtagtctcagctacttgggagaatcacttgaacgagagagttggaggttgcagtgagccgagatagtgccactgcactccagcctggcaacagagtgagactccgtctcaaaattaaaaaaaaaaaaaaaaagaatgccttataggtgcttttccattcactgtttcaattatgaaatattacctacgtagttcattctcccaaggtgttcagcacatctgtaataaaagtaaccaatatttattatctgctaaacactatggtaaatattcatacgtaatccctcccaaaaaatccaacttaagaagtattactgtccccttttaaatataataaaattgagggtagtaagcagcagagtatagattcaaatccagtgtaaaccctgtaataaacagcctttacacagattattccatctgaaactggccattttgtcaaagtacagaaatctgtgactgcacatttaatgcttgtttaagtaaaataatattaagcttaccccacgcaactgtataaacaactgggaagactatgaaaaaagagatgacaatgtgttaaggacaaacaccacacaaatggccaattatgaatcacaaacagttgtgcttatgagacatgatgcttatgtctctggcatctactactaactcaatgtcaagcttagtaaacactcaataaatatttgttgaatgaatgactataatacagatatttctatgcattcctttatggccccagaaactaatgtaccaattcatctataattttattttatttattttattttattttatttgagatggagtctcactctgtcgcccaggctggagagcagtggtgtgatctcaactcactgcaacctctgccattcgggttcaagcaattctcctgcctcaacctcctgaatagctgggattacaggagactgccaccgtgcctggctaatttttgtactttagtagagatggggtttcaccatcttggccaggctggtcttgaactcctgaccctgtgatccacccaactcagcctctcaaagtgctgggattacaggcatgggccaccgctcccagccttcatctataattttaaaaaagaagtctacatagcatgtacctggtctgctgctgttgttaacagccactcccataattaaaaaccttcattctgttgtgcttagaccataactctaaataatacacagtaactaaaaatactctgtctctaaagagccaacctggagatcactttgccatttacattttagagactattttttgaatgcaggtagtgtatttacctaaatgagccctcttccaacttgcagagctaaaagccaattattttccttcataattcctcctaaatcaaaccaccacatggaaataatcacttccagagtgcaaaaattatatacggaacaagtaatgaaagaaaaggaagaacaagaaaaatttataagattttatgcacacttcctgaaggaaatatcaggctggcaaacctggactgtttgtttcctaggttactacctttcccgacattatcttccagccctagcactgaagtattcactgaaggatctgaaattttataatgaaacactaaagaatcatcaatttgttagtaactcacaaattcctatataggaatttagcttaagaacaaaaaaataaaggagaagggatgacagttgataccccagacagctctattcaagtttatgaatgatttactcttaagggtggcaagacttaatgcaaatgaacatagaggaaactgtcagctccattgtggttcaaccaatagaagcacagctccatcttggctgtgcactagactgcattacaaacagacgataccatcgcttcagcagcatcctctcagacaagaggtaggtttatatgatcttttttatttagtggtacatgtccttatgatgcaataggaaaatattttaccctgaaaaatcaaccagaaagctttgctcctactaaatatcaagaaaaagcaatgtattcgtttcaccgcttggtaggattttattatgaaaatatgaagactgccttgtgctatttgataagcacccttaccatctgtgccttaatggaaaattcattacattttacatgaacctgatctatatccagacctcagagtaaaccatagctttttattttaactggttacttgctaatttcattttctctgagcgatttcatttctgcagtttggtctgtcttaacaaaggatttttcttaaagaaaaacccagatcaaaagcgaattccagactaaagctttctgattctatgtgcaaatgatattggctgctaaaaaatagttacttataagaaagtttgttatattttttagaatatgagaaaatagttcaaaattatttttattttgctttgaatgtagatgcagagaatgccaagaaattatcacaattttaatttttatataaaagatcataaaaggtatcactatatgggctgcattatactacactgaacagataatttatacagcttcagacttccttaacatttaattaaagtatttcttcactgtgaaatttctctctcgtaatataaagtcatgctattaaacaaaaaccttcttaaatagcctttcatttttgatatcaatttatcacaccatttaaatataatgttgaagtcattcttaaactgatcctcaaaataaatacaaagtaagtccttttgataaactgcattttaaaataaaaatatgtcctaagaagaactggttaagaaaggagagtaagtacctttctaggtaacaagattatcttcgtggctcagagcaatcattcatgtctattaaaaattaatattaactgctgaccaaatttctaattttatactattcaagcatgaaaatttagttatttactagatgttagaactccatctatatactatatcggacctaaagagccagcttctgtccttttaccttgctggtaagtttatttaatctttaaagggtttttgttttttttttcttcataatttctattccttttcttagtcggcattcagctagcctgagcaaagtatcccctgcaaaacccaaaggttgctgtaataagatactagatctgtccaggttcagcacagtggggttaattatctagaaaccatttgtgcttgctacagaaagtacagaagcaccaaacaaaagtctcagataaaataaaaataactttgtcaaataaaacagttaacttacaaatcaaatttcaggtaaactgtcaacagaaacccctaccacccacattgttttaacactctatcatcagcctgcattttgcttggaatatgtctattgttagcacagatggaggctcattgctgtttcaccaaactgactggagacatggcctaagttccagagcttaaattaagtgagttgctctatatttacaggctattaggattaactgatcacatttcaaagtgatatgcttaaaagcacctgagaattcaattcaaaggcttttaccataaatacagcaaaagcataactttattctcatctggcaacccaaaggttccagaacagttccaagtcccatccccattaacactgcactggggcctttgggagtaaacatatcaaatgggagtaaacatatcaaaatgggagtaaacatatcaaatgggagtaaacataccaaaattaacataaaacaaaactaaaacacatatgctaaaaaaaaattatgtgatttactttaaagctccccattcctgtaatcaaattttaaggcatgggtagggaagtccagaaaaagattgttttacctttttttatatacaccattttctcttgcttttcataaagaatgtttacagcatttgcttaatataaacttacattttaatttcaaaactaagtcgcaggataggagaaaatcctaatgatgtatttctattttttggcggggggacggagtctcactctatcgcccaggctagagtgcagtggcgcaatcttggctcactgcaacctctgccgcccaggttcatgagattctcctgccttggcttcctgagaaactgggattacacacacccgccaccacaactggctaatttttgtgtttttagcagagacggagtttcgccatgttggtcaggccagtcttgaacttatgacctcaggtgatctgcctgcctcagcctcccagagtgctaggattacaggcctaatggtatatttctttctgcatgcttaattatgcctaatccatgaaagtaagatttagcctttaccctaaattaaacatcaaaagttactagagctctaccacactttgaaagaacatgccacactaaatttaaggtggaaaatgactccatattagagagtttacttttttcagatatgcccagaagctaacaaacaatgaatgttttgagccgctcggttatcaatacactcacaagacaaatcatcatcatttacaacataaacctgacctatacactttcttaaactgcttagacacttccagcaaagcatgtaagtgcctttggaggtggcctatggtgttacctatagttattattaaaagcgtaatttgttttggtttggtttttttgagacagggtctcactctatcacccaggcgggagtgcaatggagaaatcacagctcactgcaacctcaacctcctaggctcaagctatccccccacctgagcctcccaagtagccgagactacaggcgcaggctatcatgcccagctaatttttatttttgtagagacagggcctccccacattgcccaggctggtctcaaactcctgggcttggccaggcgcggtggctcatgcccgtaatcccagcacttttgggaagccaaggtgggtggattacctgacgtcaggggttcaagaccaccctggccaacatggtgaaaccccatctctactaaaaagacaaaaattagctgggtgtgactgtacatacctgtaatcccaactattcgggaggctgaggcaggagaatcacttgaaccaggatgcagaggttgcagtgagtcaagattgtgccactgccatccagcctgggtgacagaacgagactctgtctcaaaccaaaaacaaactcctgtgctcaagtgatcctcctgcctcagcctcccaaagtgtgggggtgaaggcataggccacagcacccagccaagcataattattaaaagcatttttatgtgtgaataaagtatacagtctaacaaaaatgacagtgtttcctaatcccaatttgaattttttggaatccagaatactcaataaatgtattaaatagatacataaacaacaggctcttttaagtgaaagtaagtttattaagaaagcaaaggaatactcagcagcactttagaagttttattaggctaacgttttgtattacagtgcattaaataagtcaatattgacagctgatttaactagatgtgttacattttgaaagcacaaagggattttatctttttgaattaaaggagaaaagccaaaaaaaaaaaaaaggaaaggaataaaagaatggttactccatactactccataagcaggaataaaagaatggttactccatactaatccatattgttggctaacaatagacttttaagagagccaagaataaggaatagtgctttttatttctctttttaaaatagatgatttactttggtttcaaataaataatatatttaaattgttgaaaaaacaaaagaacacaaggtacaggttaagaagcctcaaacatatccctgtgcctcactctcctcccgatggatccccatccacaccatcattgtgattaatttcttgtaggtctttctaagatttctctgcagatacaagcaaataagagtatatgttttccctcttcctatatacactatcctacaccttgttcttttcacttaagaacatatcctaaatatctttcctaaaactcagttacctatgattcaattgtgtgaataaactatattaatttaaccagaagaatagctcattaatggatacaagttaaacctcaaataactgaatttagttatgtatctgtctgccttcctgactgcctctttctatttatttttgaggtaaggggacctgaaaatattttaagcagttcacttatacctcaaaagtagatgagatatctcttttttggaaatgggagtttcactcttgttgcccacgctggagtgcaatgtgcattttccttcaaaatgcaggaaaaaaggaggcaagtccatccagagaggtgaagtgacttaccaagcaaacctaagaaaacaaaaaccttagaaaacataattttatcaaccccaaagattttattaagaaaacaaaaaaatttaaggaattatattgttatggctttgagtttggggtgtgaaaacaatattgtggttatgtttaaaaatagagtcctcaccattgggagatatatattgaaatatttctaggtgaacgatgccttgaatttgctttaaaacaaccaatggggtggaagcaaacaggtacaggtagagatgggccaagagttgatgaatgaagttgcattataagtacatgggaggccaggcgcagtggctcacgcctgtaatcccagcacttcaggaggccaaggaaggtggatcacaaggtcaggagtttgagaccagcctgaccaacatggtaaaacccgtttctactaaaaatacaaaaattagccaggtgtggtggcacatgcctgtaatcccagctactcaggaggctgaggcaggagaatcacttgaacccaggaggcggaggttgcagtgagctgagattgcatcattcattgcactccagcctgggcaacagagcaagactctgcctaaaaaaaaaaaaaaaaagacagtacatgggatactctggtttctcttcagatcatacaaatctctcaccttttactaaagatttcttcagagagtaataattctaagtcttaacccaatttttgaggccctgcatctgcaaggctagtaagaaagaaaaaaaaaaaagtacatggggttcatactactttgtagttttcgttaaatgaaacactctcacacaaaaggtatctccagaatttacaaaaatatttggtacacattaggtaatcaataaacatttgttataaaaataaaatcctgtttacaactatgtagtaaaggaaaagcatacagaatgacaaccgataaattaatgaagtagaactacattttttctcttatttccaaaatgttcttagtgcacaggttatcttataatttttaaaactaaatgttaaaatatttgttagagatcaagacagtaaaaactaatttagttcctcattactatagttccatactgacaaatctttgattctaacagtccccatttaagagctaacaagtaccaggtcaacaagagctaaacttaattcaagaatactgaaacttgaactcaccagcttcttttgtgaaatggaataataactgatacctttgggagggctgaatttgtctgtttttttaaatatttatgtctatgggtcactcaggtatacgaaacacttaagactatcatttataaccccaagattagggtctcttcacagatcactctaacctaaaattttattatcctcattctgaaaattggcattatttggttttctttctctactatttttcactcagccactatttctgattcagatcacctgtcatcgaagtttaaagaaggggaaacaggagacagaaatacactgaaccaaaaaggtaagaagaatccacaaggctaatgataaaagcttttccaggggcagtttgaagaacataaccttaaaacgccaaggttttttgtagataacagctcactgaccactgctttaatcaagttttaaaccaattcagctgccttttccccttccattagcagttaatttcggtatatgaatttttttttttttttttgagaaacggtttcattcccattgtccaggctagaatgcagtggcacgatcttagctcaccacaacctgcgcctccctggctcaagcaatcttcccggcttagcctcccaagcagctgggactataggcacacaccaccatgcctggctaatttttgtatgttttgtagagacgggtttcgccatgttgaccaggctggtcttgaactcctgggctcaagtgatctgcccacatcactctcccaaagtgttgggattacaggcgtgagccaccatgcctggcctgaatcttaaatatacatattcatctagcaaataatatatgttaaaaaacagggtatggttgactaaggacgttggcccagatatacaaaaaaattcaaaactaccatttaggcattaattaaggaagattcatgttgcctatacaaatttactaagaaatcttagtactgagatttgaattaacagatctgtagtttgctacataaattcattttctaccttttttatagattcaaaagagcaagtggaatctctaagaatggcttccagccactggaatgaaaccactacctctgtttatcagtaccttggttttcaagttcaaaaaatttaccctttccatgacaactggaacactgcctgctttgtcatcctgcttttatttatatttacagtggtatctttagtggtgctggctttcctttatgaagtgcttgactgctgctgctgtgtaaaaaacaaaaccgtgaaagacttgaaaagtgaacccaaccctcttagaagtatgatggacaacatcagaaaacgtgaaactgaagtggtctaacactctatagaagatgaacaaaatctctgaaagcagctcaacctcttctgagaaaaaaaatatattctgaggccaactgttgctacaaaacaaattctgactgaatggttaaaacatttctagtagaaggggaaaaaaaagttaaacatgcactgtttgtgtgtatagccatttcattaaatatacagtaaaacttcatgaatgtgaatttactaatctgtttaatactgacacttcaaaaactggataaaagattcctagagttcaatattaagcagcaaaagataagctggaaaagacaagcaaggctaatgatgctaaaatgattttataactaaccaattcatgtagacaaaaaatagtgtgttggtaacaaaaaggctatttaaaacatgtttctaagtctgaagtaaaatacttccacttatatatataaagttcctatttattaaaaagtagtattttctaatttactgaaaacaacttatataaatatataatgacttgagttttatgtaggattagtatgaaaaagtctcaaaataatcaaaaatgccacaagtatatttgcacaaaattctcacaaaactgacttactgtttagttagaaatgcatgatataggaaaggcctagtctattttcaaactaaaacttactactacaccccttcatttcctgagtttgttctttcattttacctctcttatttatactctcaaaggctaagataaccaaggcagaaagactgcccctccccccatccccccaaaaaaggtcaaaagatagggccactcaacacctgttgaaatatggcagttttatttcttggaattccaagggctatatagatattttgtgaccctaacactattttgctatcacccatgagcaaacaaaagcatgctcttaaccaccacactacccctaagtcagaaatgccactcctggaaatgtatcctaagcacttagttcaaatgtacaagctcaaggtacaaagattttttacaatggcattactcaaaataacaaaaaattgaaaataactaagactttaactaaatgtggcacatcaacttaatgaattattaaaaagcaactgaaggccaggcacagtggctcatgcctgtcatcccagcactttgggaggccaaggcggatggatcacaaggtcaggagctcaagacgagcctggccaagatggtgaaaccccgtctatactaaaaatacaaaagttagccgggcatggtggtgggcacctataatcccagctactcgggaggctgaggcaggagaactgcttgaacccaggaggcagaggttgcagtgagccgagatgatgccaatgcactctagcctgggtgacagagcaagactccgtctcaaaaaaaaaaaaaaaaaaaaaaaaaagcaaccgaaaagtctggcaagatagacaagtatttaaaagtaaaaaataaattcaccatataaaagttttaatacaattattgatattataaatatacacatgagtaaggtttgaaaacaaatatggagaattagaatagctggtatattaagagggctgtggggacaaaaaaaagcactaggtattataaaagactttttttaaatctctattactgatggaattttttgtgtgcaataaataactgtgtggtgaagagaggaaatctgttcttttcaatttaaagaatatcggctgggcgcggtggctcacgcctgcaatcctagcagtttgcaaggccgaggcaggtggatcacctgaggtcaggagttcgagaccagcctggttgacatggtgaaaccccatctctactaaaaatacaaaaaaattagccagacatgggaatggggcccctgtaatcccagctacttgggaggctgaggcagaatcacttgaacctgggaggcagaggttgcagtgagctgagatcatgccatcgcactccagcctgaacaacaagagtgaaactccgtctcaaacaaacaaaagaatcttaactgccggtctgaaataactcttccacaaagtattttttatatttattctcacattagaaacaaacacaaataatataaccaactttaaaaggatttgtgaagcttggatatataaaatactttggaaaccaggaactgagcactgttaaaaccatatacattttcacaaacgttggattcttggcaatagatggtaagtatacaagtcctttaataatcagattttttaatagtgtacattaccaactttctcccccaccctatcctgtaattatttagtcatccaacaaatatttactgagtgcttactacatgtcagcaattaggccagatactgagggcagagtggcaaacaaggaaccacgtcactacaatggagcacattggaagctctgtcaaaaagagtagtgatatgggaactcaaaggttatacagtgaattcacactgaagaatgagaataatatgacttttaagctgaaacttaaaagaacaggacagaaccaaaagagggtaggaggtaagaaagaatattccaggaagaagaaataatacgaataaaagccaagaggcaagagagaataaagcatgttggaggagctacaagtcagtatcactaggacagagtacaaggagaacagtatgataccacacctaagagataattagaggccagatgaggcaggcacgcaggctgcagtaaaacatggactttatctgaaaaacagtaacaatcagcttgagctgaaagcaacatgatctaatgagaaaaatcacagctgtatgaagaatgaacactaaagcagctaaaccaggagacctggtcaacagctaacctagcaatccaatgaccgtggcctgaactagagtggcatggtagcctttagttgttacacccaatatttccagctctcttcattaaggaaagcattcacttcagagccccctatggctgggaacataactttggccaatgagtgacttgtgactaactctggccaatgagctgtgagaggatgtgacatgtgtcaccttcaggccacagcacttaactgctagtgcaagctcttccagagttagttttcctgctagcacagaactcacaaacatttgagcttccagctgctctgccagcctgggtccttgagtgactataactagctaagacttctaccaatccatgataaacatgtagtatgaaggagaaacaagcttctgttgttttaagaaactgagatttttgggattgttaccacaacacagtttatcctaccctgactgttagggaaaaccctggccaaccaaagagaagtaaaaccctacaagggctcttcctgctgtcgaatgggacctgtttgtggggaagatgaaattcgctacccaatacctgtagcctaaactacaaaatgcaaagacattcttgagcaggtcaaaggctcaagtggcttaagcctgagagtggctatgttaatgtttaaaacagtttttacatttttgtttatgatgagttaattctatgtacatttcattggaacgacatataaacctaatatatattataagaatgacaggcctactttgatttttaaaaaagctttgcttccaaatcagttataaaacagcttgtaggatgtgtaaaaaattaacatcaataaaaattattattgctacaatttgaagtagctaaataatttcagctgtgaattaagttccactgacattgtttaaaagataataatgtaagagtaaactaaacccaaagcaagcagaaggaaggaaataataaatactgatgtggaaataaaaacaaacaaacaaacaaacaaaaaccaaaacagaaaagccaatgaaaccaaaggttggttctttgaaaaaaatcaacaaaattgatgaacctttagctagactcatcaagaaaaaagggagaaaagacaaattcctaaaatcagaaatgaaagaggacactgggtgaggtggctcaggcctgtaatcccagcactttgggaagctgaggcaggcagatcacctgaggtcaggagctcaagactagcctgaccaacatggcaaaaccctgtctctactaaaaatacaaaaattagctgagcgtggtggcacacacctgtaatcccggctactctggggggcctgagagacagagcaagactccgtctcaaaaaaaatgagaggggatatcactactgactttatagatatcaaaaggattataagggagtactttgaaaaacctcagacaatgtaaatgatgaatgaataaacttctaaaaagccacaaagtaccaaaagtaactcaaaaagaaatagaaaatctgagtaaactgaaaagaaaaaattcttacaaagagctttccacaaaggaaagctgaagcccaaatggcttcaccagtgaattctatcaaacattttaaaaaataacaaagtttcacaaactctttcagaaaataggtgaaaagggagcacttcacaaatcgtttaaggaggccagaattaccctgagaggcaccagagaaaaacgaaactacatacacatcaagtccctcaggaatagagatgcaaaaatcctgaccgaaataccagcaaattgagtaccacaacaaataaaaatgattatacaccataaccaagtaggatttatttcaggaataaatgcaaggttgtttgaacatctaaatatcaattaatgttaatatatcatattaatagactaaagagtgagaacatgctcatctcattagatacataaaaagcatcagacaacatccagtacccatttatgactaaaaactctcagtcagatgcagtagcttatgcctataatcccagcactttgggaggctaagggggatggatcccttgaagcggggagtttgagacccacctgggcaacaaagtaaaaccccatctctaccaaaaaaaaaaaaaaaaagttttaattagccaaatgtggtgggcatgtgcttgtagtctcagctacccgggagactgaggcttgcttgagctggggagtttcgaggctgcagtgagccatgatcacgccagcagtgagccatgatcatgcccgtactccagcctgggcaacagagtaagacgctgtctcgaaagaaaacaaacaaaaggctgggtgcggtggctcacgcctgtaatcccagcactttgggaggccaaggcgggtggatcacaaggtcaggagatcgagaccatcctggctaacagtgtaaccccatctctactaaaaagacaaaaaaattagccagccatggcgatgggtgcctgtagtcccagctactagggaggctgaggcaggagaacagcatgaacccgggaagtggagcttgcactgagctgagattgcgccactgcactccagcctgggcaacagagcaagactccgtctcaaaaaaaaaaaaaccacctctcaacaaactagaaatagaaaggaacttcttcaactggaaagggcatgtacaaaaacctgcagtaatatcatgcgtaagagtgaaaaaccgaatgctttgcccctaagatcaggaacaaggcaaaggtagctacttttactattcaatgtacagccagtccagacaggcaagataaataaaaattaaaaagttcacaccggaaagaaagaaagaaaactgttcttattcacagatgacataatcttgacatagaaaatcctagggaaaccacacaaaaaactacgagaaataaaaaacaagttcagtcaggttacagaatacaagatcaatgtattaaaaaaaactcttgtttctatatactagcaatgaacaatttaaaaaaaaaaatcaaagaaaacaatttcattcataagtgagattgaatcagaataaaataaccgctgggtgtaatgactcacacctataatcccaacactctgggaggctgaggtaggaagattgcttgaggccaggagtttgagaccagcctgggcaacagagcaagatcctgtctctacaaaaaatttgtaaaaagccatctattcattgactggaagatctaatattgttaagatggcagttcttccccaaattgatttatagattcaattcaatccctatggaaatcccagcaggcttttttgcaaatgttgatagattgaccctaaaatttatgcagaaaaactaaaacaattcttgaaataaaaaagaactaagttgatggacttacatttctcagtctcaaaccttaattacaatgctacagcactcaagagaaatgatactggcataaagataaacacagaagtcaatggaaccaaactaagactccagaaataaactctttgatttatggtctactaatattcaacaagggcgcaatataattcaacaggggaaagatcatcatttcaaaaaatgatgctgggacaacttcataagaacacgcaaaaagataaattttgactcttatgctaatccatacacaaaaatcaactcaaatatactacaaacctaaatgcaggagctaaaactacaaaactcttagaggaaaacacagaaaaaaattttcatgacctgtgtcaggcaaagatttcttagatatgacaccaagaatacaaatgataaaagaaaaaaactggtaaggtggacttcatcaaaattaaaaacttttgtacatacaaagacactattaagaagataaaatgacaagcacttgcttggagaaaatatttgcaaatgtataccagatcaaagaatggtagccagaatatatgaagaattattaaatcaatagagagaggaaatatacctcagttttttttatgggcaaaaaaaaattgaatagacatttcaccaaggaatacacatggtcaataagcacatgaaacaatgttcaacatcattactcattaaggaaatgcgtattaaagccacaatgatagaacttcacaactatagaaatagctatgattaaaaaaaaaaaaacagaatttcaagcgttagcaaggatgagaaaaaactagaaccctgatacattgctggaggaaatataaaatggtacagctattttagcagtttcttaacaagttaaatataaatttgacatatgacccagaaatctacttctaggtctctatccaaaagagataaaaagatatgtctacacaaagacttgtacatgaatattcataccaacactattcaaaacagccaaaaagtgaaaataatccaaataaccgtttattggtgaatggataaacaaactgtggtacatatatccatactatggaatacgctttaccaataaaaatggaatgaagtactgatgcatactacatggatggaactcaaaaatatgccaagtgaaaaaaacaacacacaaaagaccacttactgtacaatttcatttataggaaatatccagaaaaggcaaatatacagagccagaaagcagattattggttttccggggcagggatgggaaaagtcactgcaaatgggcacatcagatctgctgggggtgatggaaatgttctaaaattggactgtaataacagctgcaaaattctgtaaatttaccaaacatctttgaactgtaaacttaaaatgaatgaactgtatggtatgtaaattaaacctaaataaagtttttttaaagaggtaataacctaaattttaactacagcacaagactattaacatcctaagagcttaaattctcttgtcccatcctttatattcaacaaagtgcctatcaacatgagtgctgaactgaaaaatgaactagccataactaaacggtttcctcctgaataatctgaataaaaaccaaacagtcctaaacaattttactaaccagaattttgtttagagcctgacgatcctccatgttctacctttgttttcttcttctttgacgatgatgatgatgactcagaagatgctgaacgtttttctactacaggagtagaaagagctcgttttttgaacagctccctttctctcaacaggcttggatccataatgctacaaagaaaaaataagtgtctttaatacaaattcaagtcactcaaacctgcactccaaatccacagatctcaacaagttacttcccaaacaaaattaccttttattattagttctctagcacttgcatttattcacttattcaagtactcaagaaatatttcattagcgcttattacacgccaagcactgtactagccattataggaaaaaaagaggccaggcatagtggctgaagcactttgggaagccgaggtgggcagactgcctgagcccaggagttggagaccagcctggacaacatggtaatacctcctgtctacaaaaatacaaaaaatcaggcaggcatggtgatgtgtgcttacagtcccagctactcgggaggcggaagtgggaggatcacttcagcctggaaggtcaaggctgcagtgagctgtgataatgccactgcactctagcctgggtgacagaccaagacccttgttcaaaaaaaaaaaaaaaaaagaaagaaagaaaagaaacagaattattccctaaagttccagaactgtgctgtccaatatattagccactagccacatgtgcctattaaacatgtgaaatgtggctagttaaaattgagatggactttcaagtgtaaaaacccacaagatttcaaagatttagtataaagaaaaaaactatttaattactaacgagatattttacattaattacatgttgaagtgatactattttgaatatactgggttaaataaaatgttaaaattaatttcaccaatttttcttttaaaatatggctattaaaaaaaaattaagagacagtgtctcactgtgttgcccaggctggagtacagtggtgtgatcatagctcaatgtagccttgaactcctgggctcaagcaatcctcccacctcagcctcctgactagctagtactacaggtacacgccaccacacacagttaatttttttaaaaactttttagagacaaggtcttgctatgttgcccaggctggtcttgaactcctggcctcaagcaatcctcctacctcagtctcccaaagcactaggattacaaacatgagccactgcacccagcctagaatatttttaattacacgtgtggctcacacttcccactcccattatatttctattggacaacactgctgtagaaacatgaggactacagggcagaaattagaagaaggtggatttaggctcactgcaaaaaaagagaaccatcagaactgcttatacataaaatggcatatttttacaactggtgaactctcaattattaagtgatgaagaggctgaattattatactatttgttagaaatgtctacagagagccgggcacagtggctcatgtctgtaatcccagcactttgggaggctgagagaccagcctgggcaacatagtgaaaccctatctctacgaaattagccagtcatagtgacacatacgtgtagtccgggctactcagaacgctgagacacgagaactgtttgagtccagcagaggttgcagtaagctgagatcccgccactgccctccagcctgggggatacagcaaaactctgtctcaaaaaaaaaaaaaaagtctacagaaaatttccaatttggagggaggtggtttgaggcaacttctatgttgtggttgttgtttgtctagttctaaaattacaactcaaagcaatttcactacaaccagggaagctacaggtcaaccaacaagaattctaaacacacctctcttctgaactctgctagaaccctacagagggtctatgaagacctcaagctgactatataaatgaatttgacactgttaagactagtgtcagctgggaggaaaaagactcatactttgaaagcttttaagcacagatagctcaataaatatttgttaaatgaacaacacatggaacatcatctttaaattgctctggtcccattattactggtttcacaagcctttattaaatatcttgtttgtgaggcactgtgctctaagctttgaaaggttacggaagataaatccttgtctacatgctgcttagatttgagaaaatggaagcattgagctaaaaattttaaatataagcattgataagaaataatcagactgaatttcaattaaggcgtgaacaatcactggacggtgaatcaaaaacctgccttctctcagtttcaatttttttttctttttttttgagacagagtctcgctctgccgcccaggctggcagagtgcagtggtgcaatctcggctcaatgcaacctccgcctcctgggctcaagcgattctcctggctcagcctcccgagtagctgggactacaggcgcgcagcaccacgccccgccaatgtctgtatttttagtagagacggggttcattcaccatgttggccaagctgatcttgaactcctgacctcaagtgatccgcccacctcagcctcccaaagtgcttagattacaggcgtgagtcaccgcacccggcctcagtttcaattcctaaagccacctggctaggcaacccacaaggcctctacattcaatttcataagtgaaatgaggacgctatgaaagctgtccacatccagcccaattgtaagaatgagaaaatgtgtatgttattttttaaacagtaaagtcataaaaacgtgttatttcagtattactattttgagttggatctgaaagaagggaatgatttaccgggctgaggaaagtaggagacagccttgggaggagggaaagcgtggggccaagaagaagaaaggagaattgtcaagtgagaaggtgggagcaaaaagtaaatttctagaacaggaaacatttgtgtcttatttcacgttgcaaaggcaggacctcaatctggactttaaaaaaattactctaaaagatttaaataggccgggcgcagcggctcacgcctgtaatcccagcactttgggaggccgaggagggcggatcacgaggtcaggagttctagacgagtctggccaacatggtgaaactccgtctccattaaaaatttaaaaaatgtgcagggtgtcgttgcgggtgcctgtaatcccaactacttgggaggctgaggcaggagaatcgcttgaaccagggacgtggagcttgcagtaagccaagatcgcgccactgcactccagcccgggcgacagtgcgagactccgtctcagaaaaaaaaaaaaaaaaaagtaaataaagccgtacagtttacaacaaactaaatgcttacagtatttgaccctcgcaactctaggagcaaacaggtattagtgttattcctattttaatacgtgaaatctgaagtgaagctgtctggttaaggtcgcacagatggaagagccagggccaggaaccaaacctcctgactcctaactcaagtgctccttacaccagacctggaacgctggtaaaggcctttaaaacaaaggccacctgtgaggttcgggaacgttcaaaggcatctagagcagaaagcttcgcaatgtctgtctttcaccatcacgtgctccgcctaacttttcctcctttttcaaagactacccaatatgtgtactaagttttagatctctggacccccctatggagtaaacaggctacatcaccatgtccattttacaattaaacaaaaccacaactcaaggagttggctggttcctccgtgggcagacacggaaaacccaaaaattaaactgaaatctgcctccaagcccacgattcttgccaccattcgacctctttcaaccttactacttcccctctctttcacttttacccagcctcgttagtgtccctggcacctcaggacccggctatgaaaagcaggctgcttcgcccttaaatgacggaagtggggaggtgggcgaaaagggggccgcagcgttgtttagactgcagaaatcaactactatcgttaaagtttagggatcatcacaaaccaaatctccaaaaggtagcctagaaagcagtccgcgtatgagcatcattttaaatcacagtcttgagctggctggaccccgcggctgctcaaactccacacacggttcgcttggctaccgcgcccgtgaacttggaggcttggaagaggcacagtcaggcggcagaccgcgaattttccctctttccaacccaaaagtttgctcaatgaacctctggcctaaagacaatgctccggggaacggttcgcgtgctgggtgtttcgcttcgagaacggcggtcccagcttcccgtgaggtggaggtcacgctcagcctcccgggaggcggcggcgcgcctgcgtcccagggaacagcaagccggggctctgcgccccacacccggcggccgcagcccctacctgagtgagaagggcagcctcgcacgactcgccgcccccttcctgcgcctccgcctcggccggccgcccacgccggcactgcaccctcttcctgcttctcgtcagcgcccccgcctgcccgcacgcacgcccagcgctgacccgccaggtcggggtctcaccactggcggtggcggcggcggcggcggcagcggcggtagctgaggcggcgactggacccgggactccgcccgccacttcccgatcgggtgctaggagctcagtcccggcagccaccgcggcgccagggcagccaagcgagcgcatgcgtcattgcgtgccccgcctctggtgccgcgggagcggaactatcccgctctggcgtcctggggcctccatgacaacgagggaagggctggggtggggccgagaaggggactgaagtgggaggcggcgccactgaagatggaaggcagctttctttatagacactttattaaaactgctacagcctgctccggcgtgcgctgggatgtggtgaacccagccgacgacgctatctttcaatggttactttgtgttttttgtctttttcttattagagacgtgatctcactcggtcacccaggctggagggcagtggcgcgatctcggctcactgcaacctccgctcctgggctcaagccattctcccacctcagcctccggagtagctgggatcacaggcgagtgccaccacgacggactatttttggttattattgttgttgttgtttgtattaatagggtctcacaatgttgcccaggctggtctcgaactcctgaattcaagcgatttgcccgcctcgtcttcccaaagtgctgggattacaggcgtgagccaccgcgcccggcctcaacggttattttgtgagtttaccccagcgccacacaccagcacctgcacaccgagaacgcggttccagctcttttacaagcgaagaacagagggccaggaagctaattaataaatgacttgctcaagacaacacagctagcaaaggcagcctgatgtggagcacagcccagcctcttccctccacccctgtgaactgtcttagaaaaggattttggatttagaagccagataaatgggtggaaataaagcagtggaaaaaataatttcattgcccgaaacctgcagcgtggcaggccttccctcactcttataacctaaagcggcagtacagccagtgctcagccattctgtggctgtcgttgaattactggttactcttcaagttactgaaactgtggctcagttttctcatcggggaaatggggataatcattgtactactacaatgagttacttgcattggactgtggtgaaaattaagtgagaaaatacctaaaattttattcaaaacttggaaaaaagtcaaaagataatattttgtgacttttattagtttcattctagagaattttgtaataagcctacttgatcatctgacacccacaggaaatgtaactttgtttgaataacaattgattagggcccagaagatttacaaaaggatgaaatcaaacatcaattggtaggaaactgatgaggtgttaggggaaaaaggggcagggaattcagtgtgtatatagatagatagatagatagatagatagatagatagatagatagatagataaaattccaaaggttaaggttgcatttttctgagaaaaattaaccggttttgtatcaactgagcagttttatttcagcattccttt

SEQ ID NO: 248 - DNA, 400509 bp, Homo sapiens
  source 1..400509: mol_type = genomic DNA
aacggtagtgactgcatttgaagtgggacctttatgatatgatggagccaggcagagatgttggagaagttcctgaaagaaggaagggcatgtgccaaattctgaggctgaggagaaaaaagaaagaaagaaaaaaagaataaagaactttacatttcactgtatgtaaagacattacaaggctagagtaaagcatgttgaagtaaaaataggagaaatcaaagttagagagaagggcgcaggcttattatttgggtcttatagatgagagtagtagagtaggtattttatactgaaacataggggacgaggggagctttgcaaacctgagataaacatggtctgtagtccactcaaaacccaagcttatttttttctccttcttcatctgccttactcagtgcaaggtgctataacaaaatacaaaagactgggtggcttcaacaacagagttttttctcacatttctgaaggctgactcgtggtcagggttctcttcctggattgcagatggcggacttctcactgtgtcctcaccgggaggaaagagaaatggcttgtctctctgcttctgataaggaaaataattttatgatggggatctgctcttatgagctcatctaaacctaattacttttcaaaagcctcccccacagataaggtcagttgggagttggggattcagcatgtgaattttgaggagacacaaacattaggtccgtaacaccatcatattaaactcttacttatagagatgcactaacatccaactatacaaaaattccattaagtaagccttccaattaatgttgtacaaattcttcccactacattttgatctcacagtgctggtctgtttctcagacataacatgctcatgctgacttgtgagcctctgctgattcatttcttacacctaagtccccacctcccccagagtcttacaatgaggtctctcccttgaaatgctgtgaccaatctgcacacttgagggcatgggattaatttcactttcttaggcatccacaagggctgtgaaaagctaagtgccattagaaatagtattcctcctaataaaatagaattgctacacctgactaaaccttgaattcctaaagcttggaacactttcccttccttaagaaccatccttgctactcagctgcaatcaatccagcccccaggtcttcactgaaccttttcccatctcttccaaaacatctgtttctgagaagtcctgtcctatagaggtctttcttcccaccggatttctcctacaccatttactcccacttgcagaactcccgtgtacaagtgtctttactgcttttatttgctcatcaaaatgcacatctcatataaaaataaatgaggagcatgcacacaccacaaacacaaacaggcatgcagaaatacacatacacacttccctcaatataaaccctttgtggctcatatatttaaaaagatgtaaaaaaaagagctgaagaaaatcatgtgtgatctctcagcagaatagatttattatttgtattgcttgcagaataaagcctatccttgaaagctctgaatcatgggcagtgagctcagtggtatctggaggacagggcactggccactgcagtcaccatcttctgccaggaagcctgcacctcaggggtgaattctttgccgaaatggattgccaaaacggtcaccagcacatttcccaggagctgttgagatgaaaggagacaataaagatgaacccatagtgagctgagagctccagcctggcctccagataactacacaccaagcttccacccagaatcaagcctatgttaacttccctcaaagcctgagattttgccttcccattaaatgcaggtagttgttccccttcaagcactagtcactggccataatttaaatcttgctatcttcttgccaccatgaaccctgtatgttgtaggctgaagacgttaaaagaaacacacgctgacacacacacacacacgcgcgcgcgcacacacacacacacacacagagctgactttcaaaatctactccagcccaaatgtttcaattgttcctcacccctggacatactttgcccccatctggaattaaaggatataagtttgtaatgaagcattagcagcattttatatgtgtccagctgatataggaatagccttagcaatgtatgtttggccaccaaagttccccactttgactgagccaatatatgccttctgcctgcatctttttaacgaccatacttgtcctgcctccagatagatgttttaaaacaacaaaaatgagggaaagatgaaagttctttctactggaatctaataaagaaaagtcattttcctcatttccacctctcttttctcaaagtcaaaattgtccatctagatttttagaggcactccttaggccctaaaacattaccactgggtctcagcccagttagtcctctgcagtttcttcacccccaaccccagtatcttcaaacagctcacaccctgctgtgctcagatcaatactccgttgtctaagttgcctcgagactaaaggcaacagggctgaaacatctcctggactcaccttgaagttctcaggatccacatgcagcttgtcacagtgcagttcactcagctgggcaaaggtgcccttgagatcatccaggtgctttgtggcatctcccaaggaagtcagcaccttcttgccatgtgccttgactttggggttgcccatgatggcagaggcagaggacaggttgccaaagctgtcaaagaacctctgggtccatgggtagacaaccaggagcctgtgagattgacaagaacagtttgacagtcagaaggtgccacaaatcctgagaagcgacctggacttttgccaggcacagggtccttccttccctcccttgtcctggtcaccagagcctaccttcccagggtttctcctccagcatcttccacattcaccttgccccacaggcttgtgatagtagccttgtcctcctctgtgaaatgacccatggcgtctggactaggagcttattgataacctcagacgttccagaagcgagtgtgtggaactgctgaagggtgcttccttttattcttcatccctagccagccgccggcccctggcctcactggatactctaagactattggtcaagtttgccttgtcaaggctattggtcaaggcaaggctggccaacccatgggtggagtttagccagggaccgtttcagacagatatttgcattgagatagtgtggggaaggggcccccaagaggatactgctaattttttttatagcctttgccttgttccgattcagtcattccagtttttctctaatttattcttccctttagctagtttccttctcccatcatagaggataccaggacttcttttgtcagccgttttttaccttcttgtctctagctccagtgaggcctgtagtttaaagctaaagcatgtaccaatttttgaaaagttcagggattgtgaaatgtgttttaggcataggtccaggatttttgacgggacaaatcttagtctctttcagttagcagtggtttctaaggaaaaagtgctatacttctttttgaatatactctttgtgacttttgccattatctcttaatttctcaatagtgcagtgaaaacaatttctataaagccacagtttcagcgcagtaatagattagtgttacataatataagacctaatgcttacctcaatatctacttatccgtacctatttgaaataaatcatgactgtttcatcttagaaaaatatttgattccatattcaggtatgtatgtatacaccagatgatgtgtatttaccactggataagtgtgtgtgctggctgatgacccagggttttggcgtagctcttctatgctcagtaaagatgatggtagaatgttctttggcaggtactgtggattagaattaattatcttgtataaatgctaggttcacttctcagggaatcttactctaagacataagatgtgcgtgtacatggaaaacaactctaaagaggcaagggttgtttttattgactaatagtccacacactattataactcgaatattagtgtactttagacagctttatttctaacacagtgctgtttctgacatattggaccattaacagggtaggaagtatttatggtggttttttggttctgttttgcttttggttagtttgtttttgtttttctctgaaagtgatccatgatctctaaccttgctagattataatgccagaagctctggaattctggcttatcggaggcaagctgtatcttcaaattagtttatcccctaagctatcaggttgattgaaattattataatattggtgaaattctttcatccttcatgatcctgtgtaaagcttatatctgctcattgatacagatggctaaaaggccagaaagacacacatttacccatgtaacaagcctgcacatcctgcacatgtaccttcgaaattaaaatgaaatgaaataaaattaaaaggaaaaaaatgccatggcaacatcaggaagttatcttttatggtctaaaaatgggcagcataaataatctaccccttgtttagcatactattgaaaaataacaataaaaatcggcaaccagtagcccttgcgtctactctgcctatgaagtagccattcatttattccttcaattttttataaacttgttttactaaaaaaaaaaaggacaaagaaagaaagtgcgaattgtgaaatggtagtgagtgatggcatttgaagtgggtcctttatgatttgatggagccaggcagaagacgtttggagaaagaagttcctgaaagtaggaagggcatgtggaaaactctgaggctgaggaaaaaaaagaaagaaagaaatataaagaaagaacttgacatttcactgtatataaacacattacaagcctaaagtacgttgaagaaaaaatagaattcaaagttagacagaagggctcaggcttactatttgcatcttacagatgagagtagtagagttggtattttattctgaaacacagaggacaagtggagatttgtaaacctgagataaacatggtttctaatccactgaacaccgaagcttatttttttctctttcttcatctgccttacttagtgcaaggtgctataacaaaatagcatagactgggtgacttcaacaacaggattttttctcacttttctgctggttcctggtcagggctctcttcctgggttgcaggtggctgacttcccactgtgtcctcaccagaaggaagagaaatggctaatctctctgcttctgatgaggaaaataattctatgatggggatctgctctcatgagctcctctaaacctgattacttttccaaagcctcccccacaaatggagccaattgggagttggggattcagcatgtgaattttctggagacacaagcgttaagttcataacaccatcacattaaactaaactcttgcttattaacgtgcattaactttcaattatataagaactccagtgaatctgccttctcaattaatgttatacaaattcttcacactatattttcatctgaccgtgctgttctgctgctgagacatgacacgctgatgctgacttgtgagcttctgctggctcatttccttcacctaagtccccacctccctagaagcttacaatgaggtctcctccttgaaatgctgtgaccagtctgtagacttaagggtatgggattaatttcacctctttaggcatgcgtcaacacttaaaatgaaaagttccttagtaaagtaaggatcacttcattgtagttaccgtggaaagaaaaacctgtttcctgctctgatctctaacacctcaacctccctgtagagcctcacaagggctgagaaaagccagatgccgttggaaatagtattgcccctaataaaatagaatggctatccctgcctaaaccttgacttcctaaagcttggaacactttttcttcgttgagccccttcctcgctgctgtgctgcaatccagggaagggggttcagcccccttcactgaacctttccccatctcttccaaaacatctgtttctgaggagtcctgtcctatagaggtctttcttccaaccagatttctcctgcaccttttactcccacttgcagaactcccatgtacaagtttctttattgcctagttcttttatttgctcatcaaaacccacatctaacgtaaacaaaaaagtgtggagtgtgcacatgacacaaacacacatagccatgtataaatacacataaacacatccctcaacataaaaccctttgtggctcatatatttaaaaagacataaaaaaagaactgaagacaaccatgtgtgatctcttagcagaatagatttattatttgattgcttgcagaataaagcctatccttgaaagctctgcatcatgggcagtgagctcagtggtatctggaggacagggcactggccactccagtcaccatcttctgccaggaagcctgcacctcaggggtgaattctttgccgaaatggattgccaaaacggtcaccagcacatttcccaggagctgttgagatgaaaggagacaataaagatgaacccatagtgagctgagagctccagcctggcctccagataactacacaccaagcttccacccagaatcaagcctatgttaacttccctcaaagcctgagattttgctttcccattaaatgcaggtagttgttcttcttgcagcactagtcactggccataatttaaatcttgttatcttcttgccaccatgaaccctgtatgctgtaggctgaaaacgttaaaagaaacacacgctctcacacacacacaaacacacgcgcgcacacacacacacacacacacagagctgactttcaaaatctactccagcccaaatgtttcaattgttcctcacccctggacatactttgcccccatctggaattaaaggatataagtttgtaatgaagcattagcagcattttatatgtgtccagctgatataggaatagccttagcaatgtatgtttggccaccaaagttccccactttgactgagccaatatatgccttctgcctgcatctttttaatgaccatacttgtcctgcctccagatagatgttttaaaacgaataacaaaaataggggaaaggtgaaagttctttctaccgaaatctaataaagaaaagtcattttcctcatttccacctctcttttctcaaagtcaaagttgtccatctagattttcagaggcactccttaggccctaaaacattgccactgggtctcagcccagttagtcctctgcagtttcttcactcccaaccccagtatcttcaaacagctcacaccctgctgtgctcagatcaatactcagttgtctaagttgcctcgagactaaaggcaacagtgctgaaacatctcctggactcaccttgaagttctcaggatccacatgcagcttgtcacagtgcagttcactcagctgggcaaaggtgcccttgagatcatccaggtgctttatggcatctcccaaggaagtcagcaccttcttgccatgtgccttgactttggggttgcccatgatggcagaggcagaggacaggttgccaaagctgtcaaagaacctctgggtccatgggtagacaaccaggagcctgtgagattgacaagaacagtttgacagtcagaaggtgccacaaatcctgagaagcgacctggacttttgccaggcacagggtccttccttccctcccttgtcctggtcaccagagcctaccttcccagggtttctcctccagcatcttccacattcaccttgccccacaggcttgtgatagtagccttgtcctcctctgtgaaatgacccatggcgtctggactaggagcttattgataacctcagacgttccagaagcgagtgtgtggaactgctgaagggtgcttccttttattcttcatccctagccagccgccggcccctggcctcactggatactctaagactattggtcaagtttgccttgtcaaggctattggtcaaggcaaggctggccaacccatgggtggagtttagccagggaccgtttcagacagatatttgcattgagatagtgtggggaaggggcccccaagaggatactgctgcttaattttttttatagcctttgccttgttccgattcagtcattccaatttttctctaatttattcttccctttagctagttttcttctcccaccatagaagataccaggacttcttttgtcagccgtttttcaccttcttgtctgtagctccagtgaggcctgtagtttaaagttaaagcatgtaccaatttttgaaaagttcagggattgtgaaatgtgttttaggcataggtccaggatttttgatgggacacgtcttagtctcatttagtaagcattggtttccaaataagaagtgctatacttatctttgaatatactctctgtggttttaggccattatctcttaagttctcattagtgtagtgaaaaatcctataaagcaacagtttcagtgcaggaatagattaatgttatgtaatataatataagactgaatccttacttcaatatctacttatccgtacctatttgaaataaatcacgcctgtttcatctcagcaaaagtattttttttatattcaggtatgtatgtaggcacccgatgatgtgtatttatcactggataagtgtatgtgctggctgatgacccagggttttggtgtagctcttctatgctcggtaaagatgatggtagaatgctctttaccagatactatggattagaattaattatcttgtataaatgctaggttcacttcttagggaatcttattctaagacataagacatgtatttgcatggaaaacaactcttaagaggcagggactgttttattgactaatagtccacacactgtgacagctgggatgtcactgtagtttagacatctttatctgtaactcagtgctgtttctgacatattggccacttaacatggcaggaagtattcatgctgtttttttctttattttttctttgggatttttattttttggtaggtttggttttgcttttgttttttctctgaactcgatccatgaccttggtagattatgacgtcagaaactctggaaatctggcttattggaggagagctctaccttcccctaacctatcaggttgataggaattataataatattggtggaatcctttcagacttcataatcctgtgtaaggcttatatctgctcaaagtgttaggcggctaaaagaccagaaagatacatgttgacctgcgcaacaaagctgcacatattgcacttgttctttggaagttaaaataaaagttgaataagaaaggaaagaaaaagatttgtcaacttatcagtatcttccagttactcacataataataagtgacttctctcaatctaaggatgggtgagaaagatttttattggtatgctggtacagattatagagactgaggtgaacccaaattagggtctctttaagataggggatctgtgagatgggtgtgtatagatctttggccatatctgagagtctggttgggttccatttgtagagcctgacctttaagaatgtgtcagagactggtgtctaagcccgctaaggcctaaacaagtgaatcttttgaatctctcttttttttttttgagacagagtcttgttctgtcacccaggctggagtgcagtggtatgatctcggctcactgcaactcctgccttccaggttcaagcaattctccttcctcagcctcccaagtagctgggattacaggcacttgccatcatgcctgtctaatttttgtatttttgtagagatgggatttcaccatgttggccaggttggtcttgaactcttgacctcaggtgatctgcctgccttggcctcccaaaattctgggattacaggcgtgagccaccactcccagcctctaaacaagtgaatcttaattgctcctcctcagactaaggaatatctaggatccctcctgttttcaaacaacttccccatttatccaaaaaccaaggcagtgttctaaaagtcatgtataaacccttatttcctcttatgcttttgaggcaatatcttttaagagtttgttgatttctccttatccataactgtcttattcctcgatttttcctatatcattgcttctgacattgattaaatcctaactgataaaactgtttctttacacaagcaatttcaagtgttttcaagcattctttcccatgtattttcaaacatttgttcagcaaatatctgttaaataaatgtcataatttttaaagtagtgggcatttaagttaaataagtcagagaataaaactttcctctgaagattataatctaggtagaacatacataaaattaataattaagttaaacaacaaaataatttcagatattattaactaagaatgaaattaaggagaaagtattcgaacagaggcaaaatgacagaaggaatctgccatgggaaggcattgccaaataaagtttagaagctgaaatagtaaattcaaagctctgaagcagaagaaaacaaactcctgctgtgccagagagttagataaagaaccagtgccgttgatatgtaaagtggagaatagcaggtggtattgtttcagggaagcataaacctaaggacataaacttgtcctcagtggtagggagtgagaagccattatagaattttaactctggtaatgacataatctctaagcaacctgtactattggctggattactattctaagaatgacctgtttatcacaactgttttgcttaaaaagcccttattgcctgtggacaattattagttattctttcaactattaaaaatcttgtcatgcagatgtgtgtgtgtgtgtgtgtattcattatgaatttgctttcaattaagttatcttgaattggcaatatctaaatctagatatagctccctaaggggtaaagagtgtatccactgcccacccctcaacatcacgtccttgattccttgatatcaaagggcagtatagttttgggggagaagaaaaagagagagagagaaaaaaagattgattaaaaatgcatattaccgacaaattagagggtgatggcagatgggaggcagcagaagtacattgcagctcccactcggatgcacagagcagcatgtgaagtctcccatcaggaattttttttgcagaaccacctgcagaaataaatcaagaaagctgagagaacgcacacaccctctgaaagaagcagattgctcctgcaggacccgggaaacaccccaaatattgtgagtgcccaaactgtggaagtggaaaagggggaccgtctacccccaaacacacatcctcactggggaacctgaagatctagaccacaggagaagattctgaccttacctggagctgagtcaatttagagggccaagcaaaatacaggggtagaggaagcagcgggaaaagccctgtgggctctctgggtcccctaggaagccatttctgccttgcctcacaggggtcatttgggagggctgccagaggaactgggaaaagatgacaggaaaaagaaaatctccacctggccagatctaggggctgggcagtgggggggttggtggggggacatgaatttggtgtgcagactccactggcagggaagtaggacagccctacttggtttcgcagctggtagcctggggcaagttctcagccttgctcactgactgcatggaaacagattcggtgctgttgcgggggagggtgcacgctggaagtgagaccaaccttttgagttgcatgggagctgggcaagtcacgtgactgcttgctttcccccactttcctgatgacctgcatgacacagcagaggcagccataattgtcctaggaacataaatccattgacctggaaactacacccccatcctcccacagtagccacagaaagacctgcccaaggagactctgagctcagacacgactagtcctgcccccacctgatggtccttccttactcaccctggtagctgaagacaaagggcatatattcttgggagttctagggtgccccagcccccccagccaccaccacctgactgcctctgctgatgctttctagaaagtgccacctcctggcaggaggccaaccagcacaaaaatagtgcattgaacaaccaaaagtaaggaccctcacagagtccatttcatcctctgccacctccattggagcaggtggttgtatctatggctgagagacccacagatggttcacgtcacaagactctgtgcagacaaaccccagtaccagcctggagtctggtagacctgatgggtggctagatccagaagagagataacaatcactacagttcggctctcaggaagccccacgcctaggaaaagggggactgtgctacatcaagggaacacctcatgggacaaaagtctcagccttgaggcctagactttccctctgacagagcctacccaagtgagaaggaaccagaaaactaactctggtaatatgaaaaacaaggttctttaacaccccccaaaaaatcatactagctcaccagcaatgcatccaaaccaagaagaaatccctgatttacctgaaaaataattcagaaggtcagttattaagctaatcaaggaggcatccgaggaaggtgaagtccaattttaaaaaaaccaaaaatatgatacaagaaatgaggggagaaatcttcagttaaagagatagcataaataaaaaacattcaaaacttcaggaaacaatggatgaatggatgcacttatagaaatgcaaaatgctctagaaagtctcagcaatagaatccaagcagaagaaattcagagcttgaagacaaagtttttgaattaacccaatccaacaaagacaaagaaaaaagaataagaaaatatgaacaaagcctccaagaaatctgggattatgttaaacaatcaaacctaagaataatcagcattcctgagaaagaagagaaatctaaaagtttggaaaacttatccagggaaataatcaaggaaaacttcccccaccttgctagagacctagatatccaaatacaagaagctcaataaacacctgggaaattcattgcaaaaatatcattgcctaggtacattgtcatcagagtatccaaagttatctaaagacaaagagaatcttaagagctgtgaggtgaaactaccaggtaacctatgaaagaaaacctatcagattaacagcagatttctcagcagaaaccgtaaaagctagaagtgaatatggccctatcttcagccttcttaaacaaaacaattatcagccaagaattttatatccagtgaaactaagcttcacaaatgaagaaaatacacagtgtttttcagaaaaacaaatgctgagagaattcggcactaccaagccaacactacaagaactgataaaaggagctctaaatcttgaaataaaccctggaagcacatcaaaacagaacctctttaaagcataaatcccataggacatatacaacaaaaatacagataaaaagatacacaggcaacaaataccacgaagaatggaatagtacctcacacctcaatactgatgttgaatgtaaatggactaaatgctccacttaaaagatacagaattgcagaatgaataagaattcaccaaccagttatctgccgccttcaggagactcacctaacacataaggactcacataaacttaaggtaaaggggtggaaaatgacattccacacaaatggacaccaaaagcgagccaaagcagctattcttatgtcagacaaaacaaactttaaagaaacagcagttaaaaaagacaaagagggacatcatataatgataaaagcccttgtccaatgggagaatattacaattcttaatatatatgcatctaatactggagatcccaaatttataaaacaattactactagactagacagcaacataataatagtgggggacttcaatactccactgactgcactaggcaggtcatcaagacagtctacaaagaaacaatggatttaaagaacaaatggacttaacagatatttacaggacattctacccaacaactgcagaatacacattctattcatcagcacatggaactttctccaagataggccatatgatatgccacaaaacaagcctcaataaatttttaaaaattgaaattatatcaagcactctctcagaccacagtagaataaaattggaaatcaactacaaaaggaaccttcaaaaccatgcaaatacagggaaattaaataacctgctcctgaatgatcattgggtcaacaatgaaatcaagatggaaatttaaaaatcatttgctttgaaaaccggcacaagacaaggatgccctctcgccactcttactcaacatagtattggaagttctcgccaggacaatcaggcaagagaaagaaataaagcatattcaaataggaagagaggaagtcaaattgtctctgtttgcagatgacatgattgtatatttagaagaccctgtcatctcagcccaaaatcttaagctgataaacagcttcagcaaagtctcaagatacaaaatcagtgtgcagaaatcacaagcgttcctatacaccaataatagacaagcagagagccaaatcatgggtgaactcccattcacaattgctgcaaagagaataaaataaaatacctagaaatacaacttctaagggatgtgaagaacctcttcaaggagagctacaaaccactcactgctcaaggaaataagagaggacacaaacaaatggaaaaacattccatgctcatagatagaaagaatcaatatctttaaaatggccatactgcccaaagtaatttatagattcaatgctatccccatcaagctaccactgacttttttcaaagaattagaaaaaactactttaaatgtcatatggaatcaaaaaagagcccatatagccaagacaatcctaaacaaaaagaacaaagctggaggcatgatgctacctgacttcaaactatactacaaggctacagtaacaaaaacagcatggtactggtaccaaaacagatatatagaccagtggaacagaacagaagcctcagaaataatgccacacatctacgaccatctgatctttgacaaacatcacaaaagcaatggagaaagaattccctatttaataaatggtgctggaaaaactggctagcaatatgcataaaactgaaactgtaccccttccttacaccttatacaaaaattaactcaaggtggattaaagacttaaatgtgcaacctaaaaccataaaaatcctagaagataacctaggcaataccattcaggacataggcatgggcaaaaattcacgactaaaacatcaaaagcaatgacaacaaaggccaaaattgacatatgggatctaattaaactaaagagcttctgcacagcaaaagactatcatcagagtgaacaggcaacctacagaatgggagaaaatttttgcaatctatccatctgacaaagggctaacatccaaaatctacaaagaacttcaacaaatttacaagaaaaaacctaacgaccccatcaaaaagtggacaaaggatatgaacagatgcttctctaaagaagtcatttatgtggccaagaaacacatgaaaagaagctcatcatcactggtcattagagaaatgcaaatcaaaaccacaatgagataccatctcatgccagttagaatggcaattattaaaaagtcaggaaacaaaaggtgctggagaggatgtggaagaataggaaaaattttacactgttgatgggtgtgtaaattagttcaaccattgtggaagacagtgtggcgattcctcaaggatctagaaccagaaatactgtttgacccagcaatcccattactgggtatatacccaaagaattagaaatcattctactataaagacacgtgcacacgtatgtttattgtggcactattcacaatagcaaagacttggaaccaacccaaatggccatcagcgatataatggataaagaaaatgtggcacatatacaccatggaatactatgcagccataaaaatgatgagttcatgtctttgcagggacatggatgaaggtggaaaccatcattctgagcaaactaacacaggaacagagaaaccaaacaccacacgttctcactcataagtgggagttgaacaatgagaacacatggacacagggaggggaacatcacacaccagggcctgtcggggggtgagggggttaggagagggataacattaaaagaaatacctaatgtagatgacaggttgatgggtgcagcaaaccaccatggcacatctatacctatgtaacaaacctgcacattctgcacatgtatcccagaacttaaagtataataagaacaacaaaattacttgaactgaccgacaatagtgacacaacctatcaaaacctctaggatacagcaaagatggtgctaaaaggaaagttcacagccctaaatgtcgatgtcaaagagtctgaaagaggacagacagacaatataaggtcacaccacaagaaactagagaaacaaaaacaaacagaaccaaaacccagcaaaagaaagggaataactaagataagaggagaactaaatgaaattaaaacaactgcaaaaaaatacaaaagctaaatgaaataaaaagctggttctttgaaaagataaataaaactgatagaccattagcaagattaaccaagaaaagaggagagaagtgcaaataaactcaattagaaacaaaacaggagatactattactgataccacagaaatacaaaagattattcaaggctactatgaacacctttacatgcataaactagaaaacctaaaggagacgttcgaattcctggaaagatacagggctctagcttaagtcaggaagaattagataccctgaacagaccagtaataagcagcaagactgaaatgataataaaaatttaccaacaacaaaaaagtccaggaccagatagattcacagctgaattctaccagacattcaaagaagaattgataccaatcctattgacagtattctacaagatagagaaagagagaatcctccctaaatcattctatgaagccagtatcaccttaataccaaaactgggaaagaacataaccaaaaaaaaaaaacactacagatcaatatccctgatgaacatagatgccaacatccttgacaaaatactagctaatagcatccgacagcatatcaaaacccatgatcaagtgggtttcatgcgagggatgcacggatggtttaacatacgcaagtcaataagtgtgatacacaacataaagagaattggaaacaaaaatcatgtgattatctcaatagccacagaaactgcattcaacaaaattcaacatcactttatgactaaaactcagcaaaatcggtttacaaaggacatacctcaatgtaataaaagccagctatggtaaacacacagccaacattatattgaatgggaaaaagttaaaagcattctgtctgaaaactggaatgagacaaggatacccactctcaccacttctctttaacatattactggaagtcctagcaagagcaatcagacaagagaaacaagtaaagcacatccaaattgttaaagagaaagtcaaactgtcactgtttgctgatgatatgattgtgtatgtagaaaactctaaagactcctccaaaaccccctagaactgataaaataattcagcaaagtttctggatacaaaattaacgtacaccaatgagttgctttcttacataccagcaatgaccaagctgagaataaaatcaagaactcaaccccttttacaatagctgcaaaaaacaaaacaaaacaaaacaaaaacttaggaatatatacctaaccaaggaggtgaaagacatctacaaggaaaactacaaaacacggctgaaagtaatcatataagacacaaacaaatggaaacacatgccattctcatagatgggtagaatcaatattgtgaaaatggccataatgccagaagcaacctacaaattcattgcaattcccatcaaaataccaccattagtcttcacagaactagaaaaaacaatcctaaaattcttatggaaccaaaaaagagcccaataaacaagcaagtctaaaaaaaagaacaaatctgaaggcattacattacctcatttcaaactatacaataaggccatagtcaccaaaacagcatgatgctggtgtacaaataggcacatcgaccaatggaacagaatagagaacccagaaataaactcaaatacttacatccaactgatctttgacaaagcaaacaaaaacataaagtggggaaagggcaccctattcaacaaatggtgcggggatagctggcaagctacatgtaggagaatgaaactggatcttcatctctcaccttatacaaaaatcaactcaagatggatcaaggacttaaatctaagccctgaaactgtaacaattctagaaaataacatcggaaaaacccttctacacattggcttaggaaaggatttcatgaccaagaacacaaatgcaaatacataaaaacaaagaaaatatctgggactaaattaaactaaagagcttttgcatggcaaaaggaagagtctgcagaataaacagacaacccacagagtgggagaaaatcttcacaatctatacatctgacaaaagaataatatccaggctctaaaatgaacacaaatagattatcaagaaaataacaaacaatcccaataaaaagtaggctaaggacatgaacagacaattctcagaaaaagatatacaaatgaccaacaaacatatgaaaaaattctcaacatcactaatgatcagggaaatgcaaatcaaaactacaatgagatatctacttactctagttaaaacggctattaacaaaaaagacaaaaaataacagatccttgtgaggatatggagaaaagggaactctttcttacacactgttggtgggaatgtaaaatagtacaaccattatggaaaacagtatgaagatttctcagtaaactaaaaacagaactatcatacaatccagcaatctcactagtggttatttatccaaaagaaaggaaatcagtatatccaatggacacattacactcatgtttattgaagcactattcacaatagttaaggtttgggatcaacctaagtgtctatcaacagatgaacggattaaaaaattgtatttttgcacagtactattttgccatgaaaaagaatgaaatcttgtcatttgtagcaacatggatggaaccagaggtcattatgttaattgaaagccctgaagcagaacaaaaacaaactcttggtatgccaaagagatagataataaaataagccagatacagaaagtcaaatatcacatgtttttattcatctgtgggagctaaaaaagtgggtctcatggtggtagagagtagaatgatagttatcagaggctggaaaaagtgtgagtgtgtatgggaggggatttaagagatgttggttaataggtacaaacacagttggatagaaggattaagccataatgtttgatatttgagtagggtgactatagttaattactatttattatatatttcaaaatggctagaaatgaggatttgaaattttctcaatacatagaaatgataaatgctcaaagcaatggatatcctaaatatctagacttaatcatcacatgttctaggcatgtaagtatcacatgtaccccataaatatataaaaatatgtatcaaaaaatgcacattgctcccatttgttgactgactaggtgaaaatatttagtgccatgaataatccctgtttactctgtttatgggcatattgaaaggttataaggctcagagagaccagtattgttgatagcctgcaactacaataattatttgtctctctcccatattctggatatatacagccaaattcaaaagtaattcacaggaaaaagtctgatcaatgtgagagcactataaaattactaataaagttatatttgccaaaatatggcactctaacttggaaaatgcaaaggttccttgatatgaaagacacaagacctgaaggtcaaaactccctgaccaatctagcacttcctaaaaagtaaatctgttaatatccctctacccttcacacatgagagtcaccaggtcagtgcatggtttcctcctgttatcttcaccagtctgggagctttcagtcatttatcacctccttcttccttctcatctcccacagtcagtcgaatactatgtctttctcaccccacctttgtccatccttcaaattccacagactcactgctcctcttgggtttgaaccattgtatctgtccccttgaatcatcatccatattttattttatctgcaaacttgaatccattttgtgcacataagcagattactttttcccaaaatcttatttcctgagtcacttaacatcctaatgcttatcgtttagtattgcaatagcatagtaaaagcttgtatttttgtagccaggccctgtactatctggtctttcctagtcctctacgtatgtcttactctcccttctacttccagagagccagtttcatgcaagtcacgaagccctagcttgctggttttagaatttaagcctttattagtattctatctcccacggaaagtcttcatcacactctccaaaaactttcccactcaggtcctaactctaactttattttagtgcatgttacattctatcagaagataatgcacaatgatatcatgtgtcttagcttcagctaacccatgaaataatggaatccttcatggaaagagcaggctattgttgatacacactcatcttatctccaaatcaatttcataaaacatgtgacaagctagctacttcaaaatgtaaataagagtaaattaaaatagtaattctagcctatatcttggatatctatgaagttttgttttgttttgtttttgtttttaatgaaaagtgacatgtaccacaaatctgctttctcaggtaccactaacagctccttctttccccggtgcagtaaaaactgcctaggagtctctgtccacttaattaaccattttcccaccccgataaagatttttctccatcatatcatcctccttggaatcctggaattctcccataacatccacattaattttacaagcccccatacatttcttaaggaagctcttggttcttcctatgtttctctccatccctcagcccatgaacactttttccttttaacacaagagtaaaagatggagaagataaaattgcaatttttgattactgaagaaaatgtactttattaaacagaaggctttctctcaaggccaagcccagtccccatgtgcagaaggagggtgtcagggtcacaggaacacctgcaaactggaagagaactcagtggtacttatgggccagggcaatggcgacagcagacaccagcttctgccaggcagcctgcacttcaggggtgaactccttgccaaagtgagtagccagaataatcaccatcacgttacccaggagctgttaggcaaaagacaaaataacacacaggcatgttgagtagaagtttccgaaaacaacttgatgaaaaaacaaacaaacaaacaaaaacggctttatacctacattcctagacaaccctgacctcaaactgttccaaggtttgtgcccacccaaaaaattcagatgagcttaggttcaattttattctatgagccctacattcaacattctacctacctacaccctcacccccttccccattttaccagtattattgggttccctctctccctgtttttctttaagcaattgtctaatttttgtaaatgtagaatgtgagtgctgcaagagttctcagcgggagtttaaaatccccaacaaattcggaaacaagccttcacttggtcacaatactgatgggaaatttaacatattttagaaaatgtgtcttatttttctttgagcaaatcttttattttttttgcaaaaatctctttctaaacctcaattatcatgacccacataaaataaggcatttctatttccttgaaatggactttcatctaccaaaagccaaatttcattcttctttcacaagtctacaattctataatacaattctctgggataaacacatcaagttctggcaagatttcctgaaaagttaagccaattcaggctgttagtagtcctttactgtcactagttctgaatcatgtaagttttggttatgctcactagaagtctgctgttctaacatcaagctcgacccatgatttctgagatctttgttggtctttccaataagattatgagcttcaattaatgtcaaaatataaagccaaaaaatcacatcaccagcacctgaactcaccttgaagttctcaggatccacatgcagcttgtcacagtgcagctcactcagcttagcaaaggcgggcttgaggttgtccatgtttttaatagcatctccaaaggaagtcagcaccttcttgccatgggccttgaccttggggttgcccaggatggcagagggagacgacaggtttccaaagctgtcaaaaaatctctgggtccaggggtaaacaacgaggagtctatgaaatgacaccatatcagatacaaaattagagatgcaaaaaatcttgaggactttcccaatcaacttgctagggtaatattcacccttcattcccatgcattgagaaccaatgcttacctgcccaaggcttcacctccagcctcttccacattcatcttgctccacaggctagtgacggcagccttctcctcagcagtaaaatgcaccatgatgccaggcctgagagcttgctagtgattgcagctgtgtcggaagcagatatgtgctgctgcctctctgtctggccttttattctttactgccgaagttctggccccctgttctccatggtacttaaaagtcattggtcaaggctgacctgtgtccctcaggggtggagtcaggtccggagagggtcagcagtgatggatggacactaagtttgtgataatgtgtgctggatcctgaggctcttttttgttggctcctcatctatctgcaacacaaatttccatttgtccccttttttaccctcttcatcatcttccaaaatgatatccatctctcccattctccttttccaagaaagcctcatataaaggagcaaatctcaaaataggaaaaaaagtttcagccaaagcgcatttaacatttgccttaaaggtggtgacagtgacaaaaacagggccaaggaaaagaaaataaagctgttaaaacagaatctcacccagttctagctctcttaaggagtgcattgtaaacaaaacttctgtaccttagtttctctagggagacaaaaaccgtacatagttccttctagaaactgaacagaatagcaagtagtccacagtgggactaaagccttaatcccaaagtacagtaccttggggtgattccctagagaggacagacagaaaagattacatccagtgcttccagagaatcctctctcttttcatttctctatgaccacaggggacattggctactttgtgagtattgcctggggctctcttcttgcttgcctgtctgtcctgcttatacttctcactgggaagggagctgagaagcctaaaatcctaaaattatttaaagccagaatttgtcatcaaacagagaaaaaagtgaatcgatatattaatcaggctaggagtcagggtatattattcctctagtgtccttttttttttctgtatgtccccattttgatgacttgctagctctttacttggtagagctgaaactggaagttgggatttacagtgtattcaattcgatccatgtgcctgaagaatattgctcatgctatatcacttaatctgcccttataataccattgtcattatcctcatattttagaatcaaggaataaattcacagaaattatttaactatcaatgtgacagaagtaatgattgggggaataatagaagcagagttccacaaattccagcattgttaattctataaaagtcccttacatcaccataatctcattgccccagcccagttcctccttctggcttgttctacatccatttattttttcttttttctttttcttttctttctttcttttttttttttttttgagacggagtctcactctgttgccagactggagtgcaatggcactatctcagctcactgcaaccttcgcctcctgggttcaaacgattctcctgcctcagcctcccgagcagctgggactacaggcgcatgccaccatgcccagctaatttttttatttttagtagagacgggatttcaccatgtttgccaggatggtctcgatctcttgacctcatgatctgcccacctctgcctccgtctccatccatttctaccatttctttctcctatggctccccttgccccaccagatctaggaatttctgttcctacaatttcctgtatgttcaggccctagaggttcttcgtctttttcacttagcagtatggctcctgtctcccaagtcaagtgcctttggggattccatattccaagtttactaagagcgtttctctcttctataacctgactttgttatttattatattttcttatgtttgtgataaaaaaaaaaaaaaaaaaaaacacttgtggcaagtaagaatgtctcccttgcttttctcccatgattccagaagtcttcacctgacttaatgactgcccaaattgttattattccaggccactgaatttctactccattttcttttagctattaaccaatggtatctttctgagcatatattctaaccattggctaacacagacaaaaccaggaattcctaaactttttttgtgtcacaggccagtttggcagactgtaagtgctaaaaaaatatgtttttattgcatcaaataatatacataggagtgctaagtttaattacactgaaatatcattatcagacatcaaacattacatttgtggtatagtatttattatatttgcttctttatgaaagcattagatctaggattgggtctacagctaccttaagatccaagtagtgatgcagataaatgtgaattaaaaatatctgcaatgggccaggcgtggtggctcacacctataatcccagcacttcaggaggccaaggcgggcagatcatctgaggtcaggagttcaagaccagcctggccaacatggcgaaaccccatctctactaaaaatacaaaaattagactggcatggtggcaggtgcctgtaatccccagctactcaggaggccaaggcaggagaattgcttgaatgcaggaaggggaggttgcagtgagccgaaatcatgccactgcactccagcctgggcaataagagcgaaactccatctcaaacaaaaacaaaaacaaaaagatctgcaatacctatggtgtagtatgaaaatatctgtggtttctctttataactatgcaataggtactgatgatgtcattctagtttgtcctttgcattcaaagtagaagaaaatgctaaatttcagttacatgtaagtaaaaatacagattttttttctataaacttcaccagccccctagtgttctgtggaccccagattaagacttcctgggacaaaatatatagcctaggaagacaagatcctaggtttggaaagaacgtatttgatccactgaaataaaagaacaatgactagacaaaaagcagctcagctgcttgtagcttgaaccaagctgagcttggctactcagagaagaacagtcgttgagataatataattttttttaaccaattaagatacagctctgggttttcagggggaatttgctacagatccacagtatgaaggcagtggcccttcctcagaacttgaatgtgagggtcagacattgccaaagtccaaggaataaggaccaggtatctcaaggccaagagtttggagaacaggtttctccctaaaacaagccctatgggtaatcccatcattcttcccattcagagtatggacaccagtcttctcttagattcagagtatggggttgatcctctcctgctccctcggagccagttgcagagcccacattttcttctctccttactgcctatggttccagacctggcttgcatccagggatctgacccattccatgtttccttatggctaaaggtggtagggaggagcttcaagaaaggttatagcattgaaaggcccaggtttgtgtctcagtaacaaggcttataaatcctgactcagaagtcaggtaggctgcgggcagtctcattattgcttcgatgcttgttggttcaagataaattgcttcacctgctcatttttaagcattttatttgtttatcatatgagataccatgaaaaatggattattgcttttctttcctatattaaaagcccaaagttcagagagataagtgttatggccatccaggatagatcagaaagattagacagtcagaaaaagtaatcagtaagaatattcatttattgtctatataattaaaattagtaaaataaaatctatgtatgtcttaagacatttaagtataaaggacttttagaaagaaacacccaaattcgatgaagattaattcctgcctgtttgggtttgctttagcatttgtaatttcttaagttctatgcaggattctaaaaactgtaagatgcctaatttaaacaaggaaacatccaatattttcttaaatctttctggctaatttatgacatatgtttaacctgaagagtcaaatattgtactgttcttagatgctattagtatgaaaaattatataaattagattcttgttaagtaaagtaggcccttcacttcactgaatgtttttcatggtattatctaagaaataaatactttaatgaatattctttaccacaaataacttactttatttttatttttaaaataggaaaaatataaacaaggcttgtaaaccactgataggaaaagagctgcttaggattctaaattagccagattttaaattattctgcttccattatgtatctaaatctatattctcagaacaaaaatagatgtaagcaaatgattctactagattttgtgttagattttgcattatccaggaatgacttggatatcacaagtcataaattctgtggctgccttgcaggaagcctgtggctattttctagtgtaattgtaaagaatgagagaatagaccataacaagtgttcaaactgttgctttcttgttttcaacttttattttaagttcaggggtacatgtacaggatgtgcaggtttgttacatagataaatgaatgtcaagggggtttgttgtatagatgatctcatcactcaggtattacgcttagcatccattagtgatttttcctgatcctctccttctctcaccctccaccctctgataggccccagtatgcgttgtttccctctatgagtccatgtgttctcatcatttagcttctaactgttgctttcgtagtgtacctctgcctcatctctcacgaagtttgcaggtgagtttgagccagggctgaggctcattctcaagagtaatctctctctctggcaacttggagcacagacatcctattgtgtgactgacctcgggagccactgtgcctaaagtacaaccagagttacttgtgaatgttaattaagcaggagggatctttaatgggaaaaaggagtagaaagccagaatcagccagttatgccacactttcctacatgatgggcactgaaggttaaaacttgagtctgtcaacttagaaaactcataaatatcccattttccgctgaaatatagctttactttcctggtttctttgaccttttgggaccttgagtaagtaaagatgccttcatttattttcatgattaaaattctaagaaattcttgggtttttttaattaaattgcattgcctaatgtatttatgaactaagaacatagaaataaaacaatactctgaagtagttcagaatgtgctttcaatttatataaagagttaattcaaatgagactattttaagtgcagggctttgaatcttatgtctagaaattttgaaaaacctctgattatatgctaagattccacctctagtgctagaactgagaagtccttgacttggtgatcttttttaaattctgaaacaacagcaacataaagctaaggactttttcttgcctatgcatgctatcttcagtactttgattatttagtattgaaactataacatagtatgtttcctgaataaaaaatgtgtatttctctggagaaggttaaaactgaggattggcaagtgagcaaggcttaaatggaagaagcaatgatctcgtcagaccaccttcattaacgagatcatccatcatgaggaaatatggaaaaccaggccccctctgttttgtgtcactaagggtgaggatgctgaatgatttttccctcccccgggcttcttttagccatcaataattctagccccacaggagtttgttctgaaagtaaacttccacaaccgcaagcttattgaggctaaggcatctgtgaaggaaagaaacatctcctctaaaccactatgctgctagagcctcttttctgtactcaagcctcattcagacactagtgtcaccagtctcctcatatacctattgtattttcttcttcttgctggtttagtcatgttttctgggagcttaggggcttattttattttgttttgttttctaatcaacagagatgggcaaacccattatttttttctttagacttgggatggtgatagctgggcagcgtcagaaactgtgtgtggatatagataagagctcaggactatgctgagctgtgatgagggaggggcctagctaaaggcagtgagagtcagaatgctcctgctattgccttctcagtccccacgcttggtttctacacaagtagatacatagaaaaggctataggttagtgtttgagagtcctgcatgattagttgctcagaaatgcccgataaatatgttatgtgtgtttatgtatatatatgttttatatatatatatatgtgtgtgtgtgtgtgtgtgtgtgttgtgtttacaaatatgtgattatcatcaaaacgtgagggctaaagtgaccagataacttgcaagtcctaggataccaggaaaataaattacattccaaaaatttaactgagactttaaaaaaaaaaaaaaaacaaaaaaaaaccagtgatccatggacacagggaggggaacatcacacactggggcctgttgggggtggggggctaggggaaggatagcattaggagaaatacctaatgtagatgacgggttgatgggtgcagcaaaccaccatggcacatgtaccccagaacttaaagcatattaaaaaaacagtgatcataaaagaagctcaaatttaactataagagacggaatggctcccacaattcttaactataatcttacagaatattctcattgaatagaagtatgcttatcattagagatttggacagccaggaaagcacagaaaaaaaaaaaaggagctctgttgccttatagcctagaggtgttttgaacctcacataacactgatgtccaggccaaggccatccttcccatgaagatggatgaataagccatatctgacacctatgaaataatgtttactttagtggcatattgcattaggctacctgccttggcacagtttttctttacttttacctgactgatgaaacaattaattgcttacataaacatgagtgctctagttataaattccagtgtaaaaaacaccctggtttcgatattcatcttttgagccttttattttggtcagaacaagttttcaagagcaaatctcagcctacaaaacaaatgagtccaattctagaactcagtaatcccatcaaggctctgcctgcggagggctaactagctctatgcaggcttagcacttccagctctactccactgatttctttgtgtgtgcatagcagtggatgtgtcagcatacatccttttaattatagttgtatatgtgtttgactgctcattcattcattcaaaattgtaaaattgctaagaatacagcacaaaaacagaatagaggaataaagttcctgttttcatggacttgatagtggaaagagcttgacattaaataagcaaatgaaacatgttatataccaatgagattaggtgctatggagaaaaaaaaaaaactgaaatgaaggccagagtgtgattaggacagggtgaaagggtatcgctactttaagtagtatggcaggaaagtcctcactataaagttaacacctgagagagtacccatagatgatgaggaacccatttatatgaaactatgattaaatatttagggcatagggaatggcaaatgtaaataccctaaagatgtaagatgcttagaattttcaaggaatatcaataaggccaatgtaggatgagattcggtgaaggggagaataaaagatgagatcatagaagtcctaaattataaaatttgggacactaataatacctacatcatagagttgtaagaaaaaacactctacacacatacacataaatatatatatttatttatatgagagctatatatatgtatctgtaataaacataatatatgcatgaacaactattgtagagaattgtaaggatttggttttattataaatgatataggaaactatcagaagactttgaacaaagaggtgaccatatatgacttacattttgaaaagactaatttggatagtatattgggaagaaattgtagtggggcagtggtagaagcaggaagattgttatgagtcaacagctataatttaggtggtggtgacagtgacttagaccagagtggtagcattggaggtgaaggcaaggggtcagcctctgaaaacatcctttcacgaaaaaccaacaggattttctgacagagaatatggaattggtgtgtgtgtgtgttgcactcatgcacactctagtgcatgctaatttctggctgtgagtatatgtcagagtaaggattttgaagctaggcaaagtgagtctttgggttgaattttgtcaaggtgtttgttcatcacagtctctacctcagaattggctttaaaattggaaagctgggtgggtggatatggaaatgagaaaccatctctggagcttgtctacacatcatacctttagccaaagtgacatcaagtatttcttggatgctgaccagaggcttctgagccaggcccctctagctgaaggaagttcacagtttctttaaggagggaaaatggtagataagtcagagaacaatcagacagaattctgttcggtcagggaatttgatgggttttgtttgtttgtttgtttgtttgttttcgtttttctttagacagagtctcgctctggaggctggagtgcaatggcatgatctctgctcagtgcaaactccacctccccggttcaagcgattctcctgcctcagcctcccaagtagttggattacaggctcccgtcaccacgtccagctaatttttatatttttaagcagagaccaggtttcactatgttggctgggctggtgtccaactcctgacctcaagtgatctgcccaccttggcgtcccaaactgctgtgattacaggagtgagccaccgcacctcaaggaatttgatgtttaggctgtgacctctgcactaggaatggaaggttagccactcccaccccacccttcgtcctgcaagtacccaatcacactgcagagccacacctgccttccttagaggcgtgcctccatccctgatgagtttttcctccatgtgtagaattgaataagaaggatagaattcaatttaacaagctttgagtacttcctatagcctaggcattgtgctgacaactatgttagagagagaaatagacaagctataaacttttcctcaggaccatctacataatttctaggcccaatataaaatgaaaatgaatagcccctttgtcaaaaattaaggatttcatgtcaggaacagcaaggatgttaaaccaagcatggggccatcaagctatatctgctattcatgatacgaaaaaataaagagtattctagttatttagccacatatttcaagtttagtctgatatcaccctttaaacactgccactcaacctaaaacaatgctagtctttctagacccatccatggaattttttccccactgttttttttctaattaatttgtgatttaaatggctcatattccagcctgtgccacagttattacacatttaactcactctctgtattttgttatctgtataaatactcttcaggttgatttcctttcttaatgtttgtgtttatgttagatatgcatcatgtagcctgtcttcatttctatcacaaacatacacttgaaccaaaaaggaagtttttacatagcatcactaaatcttctctctgtgctcttagcgaaaccaagtaggctgacaagacatcattcattcacagcgaaaccgagtagactgacaagaggtcattcattcacaaatgaatacaaaaaacagtgtcaagtatacgtgaggtcctgtaatgggtcctgggcctgcaaaaccctcacagctgctaacctcaagaagctcagtggagacataacattcatctgaaaattccttgcatgtctgttgaactaatttatctgcctctccttaaatttgttcctttttgtatagttccttaagtcatgtcacatttctgaaacatctttgccactgtgaactcctacagaagccagcttcaaagccattcttctggaagccttctctatccccttgacctcctgttttttctcccacaagcattatgtctgtctgtcattgtttttcatcctcttgtagtccttcacagttacccacacaggtgaacccttttagctctcctggaggaatgtttctttcctctcaggatcagagttgcctacatcttcctaatgcaccaagactggcctgagatgtatccttaagatgagagcttcccagtagcaccccaagtcagatctgaccccgtatgtgagcatgtgtcctctaacagcacaggccttttgccacctagctgtccaggggtgccttaaaatggcaaacaaggtttgttttcttttcctgttttcatgccttcctcttccatatccttgtttcatattaatacatgtgtatagatcctaaaaatctatacacatgtattaataaagcctgattctgccgcttctaggtatagaggccacctgcaagataaatatttgattcacaataactaatcattctatggcaattgataacaacaaatatatatatatatatatatatacgtatatgtgtatatatatatatatattcaggaaataatatattctagaatatgtcacattctgtctcaggcatccattttctttatgatgccgtttgaggtggagttttagtcaggtggtcagcttctccttttttttgccatctgccctgtaagcatcctgctggggacccagataggagtcatcactctaggctgagaacatctgggcacacaccctaagcctcagcatgactcatcatgactcagcattgctgtgcttgagccagaaggtttgcttagaaggttacacagaaccagaaggcgggggtggggcactgaccccgacaggggcctggccagaactgctcatgcttggactatgggaggtcactaatggagacacacagaaatgtaacaggaactaaggaaaaactgaagcttatttaatcagagatgaggatgctggaagggatagagggagctgagcttgtaaaaagtatagtaatcattcagcaaatggttttgaagcacctgctggatgctaaacactattttcagtgcttgaatcataaataagaataaaacatgtatcttattccccacaagagtccaagtaaaaaataacagttaattataatgtgctctgtcccccaggctggagtgcagtggcacgatctcagctcactgcaacctccgcctcccgggttcaagcaattctcctgcctcagccaccctaatagctgggattacaggtgcacaccaccatgccaggctaatttttgtactttttgtagaggcagggtatcaccatgttgtccaagatggtcttgaactcctgagctccaagcagtccacccacctcagcctcccaaagtgctgggattacaggtgtgagacaccatgcccagattttccatatttaatagaggtatttatgggatgggggaaaagaatgtttctctcactgtggattattttagagagtggagaatggtcaagatttttttaaaaattaagaaaacataagttggaccttgagaaatgaaaatttatttttttgttggaggatacccattctctatctcccatcagggcaagctgtaaggaactggctaagacacagtgagacagagtgacttagtcttagaggccccactggtacccagatgagaaggcaccttcatcactcatcacagtcagctctgcctttctcctctctcctttctcatcagaaatttcataagtctactagggtcaggcagatcacataagaaaagaggatgccagttaaggtctgcagtgagtatgagcccatccctgatgaattaaggcaatcaacactttaggcagccatgttgccatgagagattaggaggggccaaatgagcccagaaataccacctacttcttagatgatcttgagcaagttgcttaacttcttgaagtctctgaaatataggatgataatatgtattagctaatagaattatgaggatgagattagtttattgtgtaaagaactagggacacagtatatattcagtaagtgttttctgttacagtattatgataaatatatacatgcaactattacagttgcatgctaccttaaagaataattggaggtacagttattcggaggtatttcttgactgttaatgttggcagcagattcagcttattttacaacactattcagacctctcacaataattccctaggagatatttagacaacaagccatcatgttgtaacttctcatttgtcttttctcacttaccctctcattcacccacctcttttgctctctgttcctgtgaaagtacccttctacttagcctacttttgaccagtgtgcatgtcactgggcaatacaagacctctgagctttggcttagaaggaaatacaataatggctaatttttgagaaagaggaactctagcccatcagggaagacatagggagttctgtaggaatgagttcttccattctttttacagatgagaaagacaatgtgaagccccaaatgattttaaagtagttagcatatggagaaatggcttgcattggtaaaatttggggaaactttgttgtcagacccggcaaagggagatgcagagaatctgcagtttcttctcatttcttgtgtacctatcacagcaccacagcactattcctagcatagtttagggccctcagttcttgacgctagttagaatttcacacaaacttaaactagacaaacatatgtatgtttctgaggcactgaggtcactgcaggatgaagacggagccaatgggttagaccagaagagtaaatgaacactataacacataaacactccctttaaccaaagttgcagcttgaccaaggggtcaaagggtaatttgggcaggcatgggccttcagttttctcaagtgtctgcttataatttgtcatatgacaatctctgtaacccaagagaaaatctctttattctgaagttgtttctaaatttttctttacctttttctccctcaaactttcctgaagaaatgcaattatggttgaggaagtatggtctgcaactgtggcttggaccacaacttccaatcgacaagaagtaaaagtaagaagcaagggccacagggcaggaatatctacttctaatttctcgcatccacaatatctgagtttgtgttttgctgtggaaaaaacactgtcttcagaggtagcagaactgggtctacatcctagccttactacttggtggttctgtaagcttggacaaattatttcatgtctttgattttcgagtccccagttaataagagctcatgtaatgtagacagtaggagagctcagaccatctgacttctaattactaattgtctacttattagcttgtgctttcaataagttgatctacactacaagtacattgggctcctcatcaataaatgaggtaataatctacttctgagtattggtgtgagtaaaactaagttaattcatataataaacttctttttttttttttgagatggagtctcactctgtcgcctaggctggagtgcagtggtgcaatcttagctcactgcaacctccacctcctgggttcaagtgattctcctgcctcagcctcctgagtagctgggattatagacgcgtgccaccacacctggctgattttttgtattttttagtagagaaggggtttcaccatgttggccaggctggtctggaactcctgacctcaggtgatccaattgccttggcctcccaaagtgctgggattacaggcatgtaatcccatatatgagccaccgtgcccggcctcatatgataaacttaaatttgattctagcatatactaagtactcaagaggtgttacttatcattagtattaattatagtatgttcaataatacatatctcacagaattaccatatgtaatgagattattaaatatcataaaatggcacctgacatatagaaagatttcagtaagtattaattcccacttctctttcatttacctccagcctaaatctacactatttcctcgtgtctctcatgtggtttctagtcccttcaccatcttgtttccctctcaactcctgtgcagattcctaaaaatttctcatgttcagaaccttgggcttccatgtttccagtgaagtcagatttttttagatggcaaagttgctgttagacaatttcatctgtgccctgcttaggagcttaatctttaatgaaagctaagctttcattaaaaaaagtctaaccagctgcattcgactttgactgcagcagctggttagaaggttctactggaggagggtcccagcccattgctaaattaacatcaggctctgagactggcagtatatctctaacagtggttgatgctatcttctggaacttgcctgctacattgagaccactgacccatacataggaagcccatagctctgtcctgaactgttaggccactggtccagagagtgtgcatctcctttgatcctcataataaccctatgagatagacacaattattactcttactttatagatgatgatcctgaaaacataggagtcaaggcacttgcccctagctgggggtataggggagcagtcccatgtagtagtagaatgaaaaatgctgctatgctgtgcctcccccacctttcccatgtctgccctctactcatggtctatctctcctggctcctgggagtcatggactccacccagcaccaccaacctgacctaaccacctatctgagcctgccagcctataacccatctgggccctgatagctggtggccagccctgaccccaccccaccctccctggaacctctgatagacacatctggcacaccagctcgcaaagtcaccgtgagggtcttgtgtttgctgagtcaaaattccttgaaatccaagtccttagagactcctgctcccaaatttacagtcatagacttcttcatggctgtctcctttatccacagaatgattcctttgcttcattgccccatccatctgatcctcctcatcagtgcagcacagggcccatgagcagtagctgcagagtctcacataggtctggcactgcctctgacatgtccgaccttaggcaaatgcttgactcttctgagctcagtcttgtcatggcaaaataaagataataatagtgtttttttatggagttagcgtgaggatggaaaacaatagcaaaattgattagactataaaaggtctcaacaaatagtagtagattttatcgtccattaatccttccctctcctctcttactcatcccatcacgtatgcctcttaattttcccttacctataataagagttattcctcttattatattcttcttatagtgattctggatattaaagtgggaatgaggggcaggccactaacgaagaagatgtttctcaaagaagccattctccccacatagatcatctcagcagggttcaggaagataaaggaggatcaaggtcgaaggtaggaactaaggaagaacactgggcaagtggatccaggttgtccaacgctgaaagtaggaatctaagcactagtctctggatgctaggagggcctctgcatgggtaactctttcaactagccaggggctggactgtggagaaaccatttccagatagaagtgaggagattccagcaggaaacacttaagagaggatccctggaagttcggggcaggaggctccctgtcacatgaaggaaacctgctcagcgtaggctctaggttcttccctactcttatccaatggggcttctgattttaagccagtcttcacaaagccccagatttctacatgctggagccctgaatgggcaggaagcattgcggtttccatttcattcagagctctttcataccctgcttccccatagtttgtctcaacatttctgttgataatctgattcatgcaaccaagaattatgagagagccttcagtcatgcctaggcctgcatttattgttgtgcatatgatggggtagcagacaagaaaacgttaacagcatagactttctcagagctatatgagtttgggaattaatcaagaccagccttttgctcagggtagaaatcccctatagggatttattcaatgatgggttaaaagctttctatatggtgaggagctcacagattttccaagcccttgcttttgctagacagcttaatgtttatgaaattcttacacacagaagaatcttctaatcctgggttacataatataacttgattccctattccagaagataatattcccatattctgaagcattcatgcatttgttaaataataggcatagtgacaagtgccagaactctaacagtcaaccagagagccacagttttcaacttcacaaagttaaccatctaactgaagacagcagcaatcaaaaccaccaccccttctccacatggtgtagtctttcctgatgtcagggatgttaggctcaggttaggaaagtcagactatcatcccagagcaggacacagacgaataaagtgtaattttttagtcacttaggaaaaacagtggaatgcaaagagtaaaaaatgctttctgaatggataacttggcctgggaggcctttggaagcagagactggagcttaaatttaaacatctttgtatccccagcatccagcatacagactgccaagaagtacatgtcaataaatatttattggatagtgagcaaagacataattaggaccaaatctcaattctactatttgctagtagtttatgtttgtgtgtgtgagagtgtatgcttgagcaagttgagaggtagtttttttaactgtagtaaaatggggataataatagtatctacctgaaagaatccaagagtattaaatatgattaattatgcaaagcactaattacagtctctgatagccttcaataaatgtcagttatttttattattacagttaaagatgaatgggcataaagtacagaacactagttttcacctgcagcaagaatgattgcagttaaacaaaaaatactagcaaacatttctagagtagttagcatttataagtcactgctttaaactctttgcatgtattaactcactcgggctgcagaacaatcttatgagcctgttaaaactcctgtaatcatgcttataatcccagcactttggaaggctgaggtgggcagattgcttgagctccggagtctgagaccatcctgtgtaacatgtgaaaccccatctctaccaaaaatacaaaaaattagcgaggtatggtggtgtgtacctgtggttccagctactcaggatgttgaggtgggaggaccgcttgagcctgggaagtgcaagttgcagtgagccgagattttgccactacactcccatttgggtgacagagtgagaccctttctcaaaaacaaactaattaaaaaaccctccattttacagatgaagaaactgagtcatacaactactaagagaaactgagtcactaatcactcaggtggtctggctccagcatctgtactcttaatctctgctctatactgcccaagacttttataaagtcaagggttgagtcactgaaatgagttattgggatggctgtgtgggaagggtgctaagttctttcctaaaggtatgtgagaatacaaaggaaagaagcatcctcctttttacacacgtgaactagtgcatgcaaatctgacactcagtgggcctgggtgaaggtgagaattttattgctgaatgagagcctctggggacatcttgccagtcaatgagtctcaggttcaatttccttctcagtcttggagtaacagaagctcatgcatttaataaacggaaattttgtattgaaatgagagccattggaaatcatttactccagactcctacttataaaaagagaaactgaggctcagagaagggtggggactttctcagtatgacatggaaatgatcaggcttggattcaaagctcctgactttctgtctagtgtatgtgcagtgagccccttttcctctaactgaaagaaggaaaaaaaaatggaacccaaaatattctacatagtttccatgtcacagccagggctgggcagtctcctgttatttcttttaaaataaatatatcatttaaatgcataaataagcaaaccctgctcgggaatgggagggagagtctctggagtccaccccttctcggccctggctctgcagatagtgctatcaaagccctgacagagccctgcccattgctgggccttggagtgagtcagcctagtagagaggcagggcaagccatctcatagctgctgagtgggagagagaaaagggctcattgtctataaactcaggtcatggctattcttattctcacactaagaaaaagaatgagatgtctacatataccctgcgtcccctcttgtgtactggggtccccaagagctctctaaaagtgatggcaaagtcattgcgctagatgccatcccatctattataaacctgcatttgtctccacacaccagtcatggacaataaccctcctcccaggtccacgtgcttgtctttgtataatactcaagtaatttcggaaaatgtattctttcaatcttgttctgttattcctgtttcaatggcttagtagaaaaagtacatacttgttttcccataaattgacaatagacaatttcacatcaatgtctatatgggtcgttgtgtttgctgtgtttgcaaaaactcacaataactttatattgttactactctaagaaagttacaacatggtgaatacaagagaaagctattacaagtccagaaaataaaagttatcatcttgaggcctcagctttctaggaataatatcaatattacaaaattaatctaacaattatgaacagcaatgagataatgtgtacaaagtacccagacctatgtggtagagcatcaaggaagcgcattgcggagcagttttttgtttgtttgtttttgtattctgtttcgtgaggcaaggtttcactctgctgtccaggctggagtgcagtggcaagatcatgtctcactgcagccttgacctcctgagctcaagggatcctcccatttcggcctcctgagtagctgggactacaggtgtacatcacatgcctggctaattttttttttttttttaagtagagacgaggtcttgctatgttgtccaggataatatcaaactcttgagctcaagcagtcctcccacttctacctctcaagtgctggaattacagacatgagccaccactcctggcttgcagactatttaaatgactaattcctgacactacttgagggatactagacagtagacaacacatctttaatataccaaatgggtgactgtagggttgagagggagattagaattcaatgttttatgaccaaaaaggcttaaatcaggcacaagcttaggtcttttcaactgtgaggaccggactgaaagtgtgcagttcaaggccctgtagttgctgtttaactgttcccaggtggaagtctcttcaaagaaccactggtgcaaaaagggaactacctggggataaatatttcctccagaaagggggaaagtgcaagctcccctaccaaaagcaccaggcaagtccttgtctattttccctgaagttctcaaagaaatgagacccttgtttacctttaagattagagaaggcttgaaaagtttgagctgtgcctttggaggccaacaaacttttctcctttgttgaccaagttcagctctcctgtatgcttccaaggtctgttgcatcaagagtgagaattgaaggtcttagaagctgggatctcagatgtagggaaaagaggagatttcctgttcactcactgttaagatatggctgaaattttttgatctagtcatctacaaagcatgagttgtgggtcagaaattgtttttcacatcttttgacttcctttgacatcagaatataacctaggaattgattacttaagtgaaggcaaggtactttggtctggacaggaacattttgaacaaggtagggagacagctatgaaggcaagcatttattctatctatcatctatctgtctatctatctatctattctttcatccacttatttatacatttaaacaaaaagtatagagcgtagtataatttgtaagtgctcagggctgtgtgtgtatggattgtttgaaatgaaactaaagtgggagtataattctactgcccccttaaccctgtggtccctacactaccctgcaagactcttagctgcttagcttaattgtgaggctgatttggggcatagcaccccatcctctctgtctttcaacatcctcataataacttgagaataattttataaaatatcacaatagggtcatgttcagtagggtgatatataaaattagacaagccatagtttgagtttacccttttgaataaatatatgacaaaaggcaatttaattatctttatgagtttggaggtatccagtatgaaatttagataatacctgccttctagtgttgaaattagaacttaatgatataatgcatcaatgaacttattatagttcctagcacaaagtaagaatcctttcaatgtgtgtgtgtgtgtatgtatttatctgttattaataggaatcttatgggcattatctcacttaatccttattaataactatgaagcaggtatttatttgagttttccaagtgagttaagtatagcttgtaatacttaaggaaatatccacaggttacatagctagtatataactgagaaataattttatttatattataaaacattctaacaatacagatgtatataaactaaaaaactgaaagggctcatgcaaccctaccttctcaatatcacttcttcacttagaaaaaaccagccttagctgtctgctatgaatcctttcaaaatatacttctgagaaatgagagagagaaatggggagggtagaaggaaggaagatagggtaagagacagggaaggaggtgtggggaaagaaattaaattattcttttctctgtctcttgaaagagctctttccattacattgaatcaaaggtaatgttgccatttctggactcttgaaataaagaaagaccgatgtatgaaataattttgaaagtctatggcattttcaaaatgcaaggtgatgtcttactaactagcctttgctttattattagaaatggggaagtgagtatagacattttatcaggagatatattaggaaaaagggaaactggagaaactgggaggagtatccagatgtcctgtccctgtaaggtgggggcacccaccttcaatcaaaagggctccttaacaacttccttgcttggggctccaccatcttggaccattagctccacaggtatcttcttccctctagtggtcataacagcagcttcagctacctctctaaagagtcctgccagatataggtcaggaaatataatccactaataaaaagagaaacattttgactgtagttgtttgttttttgtcattgtgactatcaataacattctcactctttcatcagtaatcactcaggttattctgtgaccaacagactgtgggaaaaatcagagaaggaggcatcctcatgcttactagcctaaactgaaattgctatagcagagtgaaccagaaggtttacagatattttccacaaagagtaaaaggattgaagccttctccagatcaatgcataggaaataataatggaccataaaacccatattatgacgaacaacattaggataagtccatatcaatttttaatccagtcataagcacagactacgtgaagcacgtccaagtgaaggcaggagaaatgagaggagcaagaaagaggagccatttgatcaagaatagcagaaaaaggaaaggcaagtcatattaacaaatgattgtcatgccaacagtacagataactctgctaataaaggtagaggcataatacaggtagtagcagatatctacatagtagttaaaggacatggccatcagtacagaagattccataaaggagaacctaaagaggaagaataatttgtcagaagcttaaaagctgaactctgaggcattaaactacaatatccttttgactgtggaaagggtggtgaaaggaaagttcaaggacatttgagccaacatagagaggaacattggcttggtgagggatatctgtcctgatgttgtccaggatggtgatgatacccatataaataacgtagagaaaacaggaggggatagagatctagacaaagaggcatcaaagatagggatgtttgtaaggatgaaatagaacgttttttgcgttagtcaccgtgaggatgaccggtaaaggcaatgcagaggctaatgcctttgttattttttattatttcattttaaattgacaaataataattgtgtgtattcatggggtacaacatgatgctttggtgtacgtgtacaatattaaatggttaaataaggctaattaacaaatccaccacttcacatacttattttttgtggtgaaaacatttaaaatttacactcttcattcaaaaatctggaacatagttaaaatgtcatatgtgtcaggatgcagtaatagatttagaaaacattgaatgattccttgcaaatcatgaataatgatcaatcgaggaaaacctatgaaaatgagaaaattttggagcctgaactaaaaatatcttgatcacttttggaggtcaggaattcagattcatttttctcggcctgtaaagaacttgaaattgcattatagcagaatgtaggccttgagtggattgatgtggaagcaaaacaagccacaaataaagacaaatgtgcaacatcaaaaacatgacttgtgccattaattttaagcagtttcatatgaaacgtgggtttctttattgctacgtcacagtcagatgttcatggtcctgagtgctctcctccaagcagtgggccaggagtccaggtgccttcctgtgattgactttatcatttcagaatcttttactttctgccacatagaggaagggaaagagaatgatagaagggcactctgccttagggagtaacacattattatctccacattattttagtcacaaccagtcacatggccaagttaattgcaagggctgttggaaattgttgagaagtatattgatttagtgactcatattgtttctgacatactgtgtccggaattggtgggttcttggtttcactgacttcaagaatgaagccggggaccctcgtggtgagtgttacagttcttaaaggctgcgtgtgtggagtttgttcgttctgatgtttggatgtgttcggagtttcttccttctgatgggttcgtggtctcgctggctcaggagtgaagctgcagaccttcacagtgaacgttccagctcttaaggcggcgcctctggagttgttcgttcctcccggtgggttcgtggtctcgctggcttcaagagtgaagctgcagaccttcgcggtgagcgttacagctcataaaggcagtgtagacccaaacagtgagcagcagcaagatttattgcaaagagcgaaagaacaaagcttccacagtgtggaaggggacccgagcgggttgccactgctggctcgggcagcctgcttttattctcttatctggccccacccacatcctgctgattggtagagcccagtggtctgttttgacagggcactgattggtgcatttacaatccatgagctagacacaaaggttctccacgtccccaccagattagctagatacagagtgtccacacaaaggttctccaagtccccaccagagtagctagatacagagtgttgattggtgcattcacaaaccctgagctagacacagggtgctgattggtgtgtttacaaaccttgagctagatacagactgccgagtggtgtatttacaatccctgagctagacataaaggttctccacgtccccaccagagtagctagatacagagtgttgattggtgcattcacaaaccctgagctagacacagggtgctgattggtgtgtttacaaaccttgagctagatacagactgccgattggtgtatttacaatccctgagctagacataaaggttctccaaggccccaccagagtagctagatagagtgttgattggtgcattcacaaaccctgagctagacacagggtgctgattggtgtgtttacaaaccttgagctagatacagagtgccaattggtgtatttacaatcccttatctagacataagggttcttcgcatccccagcaaactcaggagcctagccggcttcacccagtggatcccgcacctgggctgcagggggagctgcctgccagtcccctgccgtgcgcccgcactcttcagcccttgggtggtcgatgggactgggtgccctggagcagggggcggcgctcgtcggcgaggctcgggccgcacaggagcccatgaaggtggggaggctcaggcatggcgcgctgcaggtcccgagccctgccccgcaggaaggcagctaaggcccggcgaggaattgagcacagcagctgctggcccaggtgctaagcccctcactgcccgcggccggtggggccggctggcggctccgagtgcggggtcctcggagcccatgcccacccggaactccctcaagcacggcgcacagcccggttcctgcccgcgtctgtccctccacacctcctggcaagctgagggagccggctctggccttggccagcccagaaaagggctcccacagtgcagcggccggctgaagggctcctcaagtgccaccaatgtgggagcccaggcagaggaggcgccaagagcgagcgagggctgtgaggactgccagcacgctgtcacctctcaatactaatcactagtaattagcattatcccacaccctgtgcttccaaaaataacaggaatattattgtaaaatcaaaggcatactgaaccatatgttttattatgtttaagcagtaaaaataagacctggagtgcaaaaagactaccaaatgctgtaatacttcatggaatctaagctttctcaccccaaattatgtcttatttcagagcaaataacttaggctttaaaaaatgtttcctcatgaattattattgtataatgattcagagcatgtattctagagccaaatatcatgagttgaattatgccctctgtcagttagtagccacttcatcttggaatattactttagggccctgtgcctcagtttcctcctcttaaagggtattacaatagtacttgaggcacagagttactgtgaatactaaatgaaataatatatcaacagtgtcttgtgtatagtataagccataatcattgtattgttattactattactactattattactattacttttatactatcctagtgtgtagattgaggatgtaggggcttagagcaaagacatgaaggtcacatatgggtagacatgggaataaatagatgagatgacattgtcaaggattacacgagtctttctctgcaaagcgagggaaggttagtctctttcagagaacatcatggcagaaacattttttcaagagaatccatgcattttacgtccatgtagttgcaaacaatgccaagtagaactccaatccagagctaagtggggctgtgggaactatgtaccaattgatggacatgctgctttttgactcagaggtggataagagacaaaactcttttcttcttagatgtactaaaaagtagttagtctggaagtatttagaaggctttggagaggaatgtgattttatcaggtaaatcaaaaatagaggctatttctgaaagaagcaactagaaccaagttacacacagaaaatacccataatgtacatatatttttgactagagtagcatgtgcaaatttgtataaaatatttgcaggtaagttaggtaatgcaacatttgagactctaagtttgtgggaaacttagaactgtttcagttttctacattattcctaactatttaaaatgctatgaaatgattttgcagatttttctgagatgtttatagtgataagtgagaatatatgacatagtctgttcctttgttgtataactctgtttaaaatatcttttatataatgataaaaaatctatctctttgtaacttaccacagcagatttgtattattttatgtgaagaaactcagaatatggagtattttttttctcaaattatcacttttataaggatctgctatctatccatcttattttctttatgtaaaccagtgttttatctcttctcattttctatcaaggattaatagatttttgtcatctttattgtctttttttctccaactttttgtatctacaggttcctaccttcatttatattttaaagtaggtgagcaaatgcattttaacactccaagatagatttagattaaaacatctaaccaggataaacattgctgtctaaatgtatttgttgttttaatctcttccgttattgtaacatgatgaggagacatggaaagaaaacttctgctaatttctcctttaaagtcacttcacattagttatctcttacatatgagtccctggcagtgtcagttgaccattccttttcatgaccctaaagacttctgataaatatactgcatttttctatagctcatttcaacctacacaaattatgggtttgcatgcctttatccctaattaggctacacagctgtttaaattaggaattacagatttcgccagataattgtatatctgatacagattaggcatttaataaattttggtgaataggtaaacactaaattgttcctcaaacatttgtcagatgttcactatgatacctacttattgagaatcaagtaaatagagatattcagacacattacagagaagtatatacttacaaactcaaagtatttgacacccctaggcacatgaaacacttttgaatatacagcacacttttacatacacattattcataaacattgccaatgcatgcagaaagaagcttaatgtggattttacatatactttcatgaacatagccttgccaacatcctttccctttctgttagagtcacctgccttcatccatcccttggatatgataccttgagttatccccacacccaaatcttcaacagacagaaatgtaaagtcccgtttaatgtgtgatagatgaactaaatattctatctcagtattcatctgacagcataggaaggagagaaatccctctgtctcatttataccacatattgtgtttctatggccgaatcagcttaggttctacattgtgtggttttggataaattacttaacctacctaagtaaggcacctacgtgtcagtctcttcatgtgtagtcaggaattataatgaaaagtaactcgaagtatttttgtgataatcagttagataaaaatgtgaacctcttaagacactagcaacttgaatacataattgattttttattctgttacaattatatactgaactcatgtgaggatccagtttctatatctaggcttttcaaactaccttagagaaatacttgtatatcttccttgtaggtatagagtaaaatactaacttcaggtttagtaccaatgcttatccatattataatttacattgcaagttttattttctgttccttattggtcaatacttttggatccagctgttcaactgtggtaacacttgataataatgccaagaggctggggtgagctataagaggagtcaaggctaatcagtacagcaagaggaatgaataagaagctagataaagggaacggcgtgggagggtgtttcctgagggaatattcatgagacaaacagagaataaagaaatgaagggaatgtaaatataatataggcatgttaatatacaagtgatttctagaaagtgcatgaataagacagctagaaagatagaaagacctggcacttaaaatgtgaatgtgaaacagttctggctgagagaaatatctcaggaatggccatgttccaggcttcagggtaggacccatgccagggaccccgcccttttctgcctaaaatttctctgcctcctgtccctatcattaggaggccagggtgggaggattgcttgaggttaggaattggagagcagcctcggcaacataacatgatcccatatttacaaaaaataaaaacattagctaggtgcagtggcataaacctgtagtcctaggtactcaaaaagctgaggaagaaggattgcttgagcccaggatttcaaggctgcagtgagctgtgatggcaccactgcactccagcctgggcaacagagcaagatcatgtctataaaaataaataaataaataaataaataagctttagccacaccagacaagtaacattgtgtatttttaaaggactgcattaataaatttgggggtttacagaatggcaggtagttatccttgggaagacaatatgctgatggggaaatataattactgccctgactaaactcacagtatgacagagaattaactgtgctgacttgataattcctcagagcagatctctaagagagcttatagacacaacgcctgcttcacaaggttctcaagtatggcaaacttgtcagtcagggtgagactgaggatgaggtctaagagacttgtctggaagctgcacttgtttgaaaggacactgattttacttcagtggtgcaataaatgtccttatatatcactggatcagcaggtggatgctgacttaataattgaaaggattttcaaactaagaagttgtaaaatataatatataggttatgaatataattaaaattaaaacgcataaatatacatttacttaagaaaatgagtgatttttaaaatttatcctttttaattgatttttgactattgatacaggctgtttaaagatcaataggctataatatcatattatgtcatcccttgctaacatatgagtaaacttgagctctcaacttgatcttcccacttcttcttatttataattagatacctctgtttcttagacttcgctatcataccttattttcagcacatcgcccctaagtttgcattacacatttacacattgttgtaggctgtcttcttataacaatcaagaaaacagcatcgcaatcccctactgacaaatacatttgccatttttacaaaaaacccttattcgcctgaaaattttaataccgctatgttttttactcttacagacatcctttcagtggtcaatagagatgcagctttcctaaatgtagtttgtatgttagcacaatgtgcattttagaccaaacaacaaaggcaaccagaaaacgacgtttctaaatagaataaactctgtatgccaactttggaaaaacaaataaataaattttacacagagaataacaactaaaatgacaatgaataaaccccccacgtcctactttcaaagaactctcacaaacaattcgcacaataactgaatccttcaggagtagtcatttattagtttttatttttcctgcatccaaatgggccttctaatttggagaaatactgcattatttagctttagttttcagtaagtattttcttatcaaatctctggaatattttcagagtgctcactgtccagatgtaaaataaatatgaaagatttcttaagtgaagcagagagaatttagaatggaataattatatactgggttctgaacatggactttcaatcagaaaagaaaatattagaagcaagctcaacgagaacttaaaaattggaagaaacagcagtcttcagagaggaatgaatgcaacttttgagattagtttcctataaggagatcagctgcaaatactagcgcagaactagcagtagatgaagaaattgtcatcccctgttacactaatagcaagtggtagactgcggttcagacccaatgaacagcataaagacttacaaacactttgaagaagattgaaggaagaaactattccatcagtgaaaaatttctaaaatataacattacctttgccaagtttttgcattaattatcaaaactatttcatgaagtgaaaaagtctcgagattttttatgtgagaagcaagaggggaaatagaaatgggtggtgatatctaaatttatagttggttatttttttcagaagaaaaatgtcaggagacaaaatagaaagctggaaagaagaaaaagtattaagttagtttcagcagacaatgggaagaaggaaaacggggctgggatatctggcttccacgagatgataagaaatgtgtttgctgctatttagctgttagtctgtatcacacgccttttagtagtaaaatatgccagtctactaagggaaattacatttcatgagtaagcttcctaaagttctagatatttgctgtttagcctcacacaagtttgcttactaatcaagcaagatccttttcagagtaactagtttcaaagtatggagatgaaaatatgatcatgtattattcaaattcacctttataagacacataaaatgtacctccaactgcacatttttctttagatgaactgtatttgacccaagctgctttagtccacttatcttgactatttctgaaatcatagttactcttcttttggattgttatatctcctctgcttcctgtattctttttcttcagcatcactggcattccctctttattaggtgatatatatatatatatatatatacacacacacacacacatatgtataaaaatttctcgctcacatcagctttttcatgtgataattaaaattgaatctaactctgaggaaaaaaaagtgtggatataaaaccagggttccttttcagtaatgggagaggcccagaaatcctagagatcttgagattctgaaataagggctcaagccctactctgcccagaaaataggcgaataatgcttctttgaatctgcttggtcttgatgctataaatgataggattcacgaatggaggaaagagaaaatggacatagctcatggtaatggggaccacatgaggtgcatgtttcccaaacctgtgaatgaatgacagtcccatcacagtgatgtgaaatactaggacacagctaatatgggagacacaagtgttgagagatttagcttcctcttgtccagacgcaatgcccatcactgtcttgaggattagtatataagaaaagatgatgattagagcatctaaaaagacagtcaaagaagtctgaataattggatatatgtgattaaacgtgatatcagcacaggcgagttttatgacatcttgatggaggcaaaatgtgtgcaagagggcacgggaaccacaatatgggtagcagtagagtgaaagaattatgggcaaaatggacataaaacctctcatcagtacccccagtcctatgttcatcactcgggaattggtaagaatgcagttgtacctcagtggtgtgcggatggcaatgaaacagtcataggccaaaacaagcaagatacctgattctacaatggccagtgaatgaatgaaggattgggtgaaacaggcagcatgggcaatctccctctggtctagcagcaggacacccaggactgtgggcattgtagtgaatgtcatcccaaggtccgtgtctgccagcatagccaggaagtagtacatgggctcatggaggctgtgatcattccaaatgaggacaagaagagtgccatttccaaaaaggacggagaagtagatgacaaagaaggacatagagatccggtagtgaactgcctctgagcccaagaagccagtcagcaagaaggggccagcactgttgttataccacatggtaggttttgcaggtggagaagatattttttaggggtgatgacctccaaagatgcagttttcttttttctctcacaatcttcttgtagcacatcatcaggccattttttacctcaaaacttaaatatttttctggattgtctcatacttaattaattgtaagcctgtactcacaaggcctttccctagaataacaaataacaaaaatcatggtcagaataataattccaattcactatgaagcatacaacctttattttttcaacactcatcttacgtctgtgctcatagccttgactcttggtcccaaataggactcctttgttcccttttattctctttactcttttattcctcctcctattatttatcatatgggcccttactgtgttactatccaagttgagtcagttcaaattttttctcttgaaactaatgggacagctgtatttaggattaaccactgaggaaaatgcttattcaatagaaatgactgagaaatattgtgatcaatgttgctatctcaagtggactgtgaataagaagagaacccagcctgggcaacatagctagaccctgcctccaccaaaaaaaaaagaaaagataaaaattagctgggcacaggggcacacatcacctgagcccaggactgtgaggctgcagggagctatgattgcagcactgctctccagcctgggcaacggagtcagactctgtctctataaaaaataaaataaaataaaacgaaagaaaataactcatctattgtgagtttccacagaaatctgaacacctgaacaagtgggtaaagttagtaaactcattttagaaaggtgtaattactcagtggacttgggactcagcaagttccctatgctgcaaaaagtctgagttttggcacattagggacaaacatgaaaataggagactcatgttggaagctcataacggaaatattttaaggacatacttctacaatgagggcctccacaaaagcctaatacttgttagagtcatagattcgtaagtatgttgatctgaagggcaatagtaatatcggaagttggtaattgagttaataaacttcacacaaccagttctagggaaaagataagcactcccagagagaaaatacggcaactatgttgctgatggagacaatcttacagaccctctaatcattatgaatctgtaagactcgtattgagaaaaattcacaaggatcctcatagggaactatgaagtctatttataattaatatttatttatatttataattacacttttacaaagtcaagatttttgttgttgtgataccaagaaattttgtagcaggtttattgggaaaacaaagagaactacaagggaaactcagtttctcccaaattcaattgattctgtatgtgtccagagtcttttaaaatatcattcaatattataaatattactaccgacacctttgaagtgtaattcagtaaaaatgaagtgataacaatctttgcaccttttttattttataaaaacctatagaaacaataataattatatgtttcagaattttggcacatagtaacatctctaatataagcaattattggtggagagagatggacagaggaaaggtgaaaggacttttgaaagggctgctacttcaggggacactgttgataacaaaaatgtcagtctaggcactgcagtagcagagactatgttcatatggatactaaaaacactgctaactaacttgatccactgaattatgacctgcatagtgcttaatgtggcagaacttatctaccgccacaggagtgatgtgtatatcattataagttctcttaaccttccaatgttgccttataagagaatggattaatgccaaaatttgttgtacaggataagagctaaccacttatttggatctactgtcacccagataatggaccagatggaggaagccggaggaggcctgattattcttaaactatagtcgtgttttcaaaacctgagctgcgtttgggacatgcggatgcacagggttttattaaaactgtgtggtaattactggggaaatagttaatacaatttataagtatattttattgacctaaagatagccctctatttaacatctgcagtctctagcaaaacagctacgctggcatttaattgtggcaaatttggtagtaccagaaactgtccacatacccaaatattccagggagaatagttgccctaatagtttagggagtctcctagaatgtgatacatgacaaaagtgagagtcataactttagtggaatttatcactctcaggcaagcatagaggccccctgagggatgcaaaaatgactggctcactgttctcttgcccctttctgagtgcctttggactgattctttgacagcaactatcccagagtcctcaagagtttctgaaggtaacatagatccatcatccagagcttcttcaacttgccatgctgacaaaaagcttaggaactgttcaggaaaccatttataaagacataaactaaaatgagaagacaaaaagagaatattaagatcgtgttaaaaaagaacagtcttccgtttagttccagataatctgcaagtgccctgtacaatcagtgtcccctgaatccactttttcatctccacatattgccccaaaattgtgttcctatagaagaaattaataaatataccaaaataaatatttaaagtcaactgacaatgggaagccatgagatgaagacaaaatatctgaaaaatctcagcttttaagtgacttttttatatcttaccttaagtacaaattaaaatggaagaggtggccaggcacagaggctcatgcctgtaatcctagcactttggaaggctgaggtggatcacgaggtcagcagtttgagactagcctggccaacatggtgaaaccctgtctctactaaaaatacaaaaattagctgggtgtggtggtgagcgcctgtaatcccagctactcgggaggctgaggcaggagaattgctttaaaaaaactggggagcagaggtcgtcgcagtgagccaagattgtgccactgcactacagcctgggcgacaaagcaaggctctgtctcaaaaaaaaaaaaaaaaaaggtttggagagaaacattgggaaactaggacaaattttgctctcagtaaaaagaaagatctcaaaggagatagacaaagaagcaggcacagatgtaagaggatagcaaagttgatctgtatttacaaaaaaacaatgaaaagggaagtttataggagtggatactatggtaggttaatagtgaaaaatatagaattatcaattaatataaacatagaggtgttgattgtttggggcaactaggtctttggtaatattgacaatttcaacataatggcagaaatgaatgcctaatgactgtgagacaaaaagtgagtaaaaaacagctgggcacggtggctcatgcctataatcccagcactttgggaggccgaggagggtggatcacttgagttcaggagttcgagaccagctgggccaacatggcaaaacaccatcactactataattacaaaaataagccaggtgtggtggcacatgatcataatcccagctactctggaggctgaggcatgagaatcccctgaaccctggtggaggaggtcgcagtgagctgagatcgcaccactgcactctagcctgggcaacagagaaaaatctgttaaagagagagagagaaaagaaaagtgagtaaaaaacaagaaagtaaagacaatatattattttatttatattgttatggtgaggaaattgagccttagacaagttaagcaattagcctaagatcacgcaactaatatgtgtcataaaggaattcaaacacaggtttatctaacccaaaacccaagctcatattctcaaccaatgtccatcaaatggaaatggttaaacttgcttcccgtatttgaatccttggcttttcttacctgagccacagttttctctttgcggtttctgagcatgacctgaatattggttgtttgctatatcctcagtatttactcttaattctgatgagagatatatttgttacacaaacaactctcaaggggttattctagctcatttccacataggatatttgggaatagtgtaccaaataattctcttttcctccccaacctgggaaagatctgggccattgaaactggtccccatggcctttattttttctttggaaggagagtctctaagagaagttgtgtctctaacatcagatgaggcatgaccgaaatgagtcactctcaagtgttccattggtcttagagtgggaagaccagtcactttgtctttgtaaatgttaacatttgaagaacattgccccttttcaaactgtattatattctctaattcaaccctttacaaaatccttgagccaccaccaaaccttttcgtcttgatgattattcatcagacatttatttattctttctattgattcaaaactcactaccctaccctgagctatctcattcatatatatgtgggtttcatttaattatttagtatatgtatatatggtatttactatcaatatatgtatgcataggtgtgtatgtgtgtgtgtatatatatattcacagacagagacagtgagagagagagagagacatatacttctctgaaacatataatatctactccttatatttaggtctgatctccagaataaaataaccatatattagccattatattcatacataatttttttctagatgtataaagatatctgcattaaaaaccctaagacttctttcctgatgggtgaaccaatatcaacagtcctttaaatgtttatcatgtaattattcctaatcctgatttatttcctatgatgctccaccttattgaacataataatccagatgttgtcatattagtcccattctgaaatctcttttttcattggattatgtgctgagtttctatttaagtagtctaagatcgtgcagatacacaactctaccctaaactcttatctcaaaacatgtcaaattcagtctttcagatttaaaatagtgataaaatgcatattctacataatatatgtgacactcgcagcaagttactctatttactatcacctgtttatacttaggggaaaaaaacctaaatatcctctcatatattcaggtaagattttgccaaaacgtgattttaggtcatacagcaataaatgcattccagaattcattttgcagaacctgttgattctagacttgtagctaagaagtgacggcttggtaaataaccatatcataaagtcagttctctttgtactcacagtaaaacaaaacttctgaaagattttaagtgagtgacattttcagtgcttaaaatggagcttaacatatagtgggtgctcagtaagtactagttaagcaaatgaatgctattcttgtgatcaagccattggttttgtagccaaattgtagacctttacaacctctacatctgtttgtaataagattactagttcaagcatgccaaacaatgctatctccttttctttattgtttagtacttcgatgtctctaatttttacatcaatcatggttcagagaaaaatccataacaacatcaagaagaaagattttttgaagtttccttccttcctccctccctccctcccccttcccccttcccccttccctccttccctccttccctcattccttcctttcttttttctttctttccttatttctctctctctttttcttccttccttcctttctttctccctttcctttcctttccttttattctcttttcttttctttcctctcttttgagacagtgtcttgctctgtcacccaggagggagtgcagtggtgagatcatagtttactgcagcctcaagcttttaggcttaagtgatttttacacctcagcctcccaaatagctgtgaccacatgagaagagacatttatgtgtttttttccttcttagtactttggctgcaagtgagtctcaaggtaagatgttttaaccacttatggaacttatattctcccattccaatgaaaagactactttgaaaatgtttttgttgatgtctaaatacaccaagtctacaatttcctgtgatctatctatactactaaatagctagaccaatacatgaaaagaaactcttattctcaataaagaactgtaccccaacaataatatatcagacattatatgtcttttttatcttctttgtgtcttatcagttatgttaccatataggaagagaaagaaaattataagtgaaatcactgtgtaccatctcacatctatgcaaggcaaataggactaatagtacagggacaaggctgaaaggagacattttaaggttgaaggtatgcagtaaaacttgttttctggagattacgttgaaagaagttacagtcagtcaatctaatgaggttgtagaagatgaaacaactaagctggtgctcctggtaatgacttgatacctgcgaagtgtctaaatatgtatagaggagttgataatatagaccaattgcactttgggcccctgctgagtaagattttgtgtcaactaaacaaaacgataggaaattgtatttccccaaagacattttggaaacgttctccttcagcaccaatggtagcacctggaactgaccatccaacttccaagccaaacaacttcacccataaatctacattcctccaatctctttcctccatcatggaaacagccctgcatattcaaaagtgagtgtccctctcttatacctcgtcagagagattcaaatattgtcatattcacaatccacaacaggcccagataaccgttcagtgatgctggtcatcactgaagatagattgaatcttcctttcttcttggacgtaaattgcaggttattgaaaaaactataacttgaagtttcatagcagaaagttggcatctttctcactaagcatgagaaaaactaacagagttttaatttgaagggccttagccaacttagctgaagtcccttccacctaagataaagctgtaaaagaggagcagatgtataatttagatattggagcagcatgcagtatcaaaatacctcatgagcaccaaagaagccatatatttttcacagtttctattcttccaaaataacttacaaagacagtctttcctctgtcataagaacctgcacccaggtcagcaaatcaagatggaaatgatcggggttgaaatttcctaccaacacactaataaacattaggaacttactgggcacattatgagaaacagaggagtctttgggggataaccagattttaagatttgtgtttatactcagtatcaatagcttaaacattgtactcaatagcatataattttgcttacagcatgcattgggtaaataatcggttttacaattgattcagtatgaaaaagttttaatacaaggacatacagaaaacttgcgcctacacctatttttttaagcattccatagattggatctcatttctctccacatttttatgtcttcccaatataaaactttactcaggccgggcgcggtggctcacgcctgtaatcccagcactttgggaggccgaggcgggtggatcacgaggtcgggagatcgagaccatcctggctaacacagtgaaaccccgtctctactaaaaagacaaaaaaatttgcctggcgtggtggcgggcgcctgtagtcccagctactcgggaggctgaggcaggagaatggcgtgaacccgggaggcagagcttgcagtgagctgagatcacgccactgcactccagcctgggcgacagagcgagactccatctcaaaaacaaaacaaaacaaagcaaaaaaaactttactcagtgaagtccagagcaaagatttgttgcaaacaaatcaccagttcttatctttctccgtgaaaatgtacctgtaaaatgtggatgccacatatttttaggtctggaaggattgcattatcttttatctgtattgcattatcataaaatctctagttgagtgaaaaaatttgttaaatcatttctttaactgaaaactgaacccaggaggcagaggttgcagtcagccgagatcaaggcactgaaaacttcctttctccagaaagcttgtctcattttcttcttccatggaatattccaaggaatattctttgaaaagcagaatattcagagtgagaggaagtagagagatatatttaggtagaatctgggcatattgaagggaagacatcaataattcacagtagccaaggaatagaaacaatacaagtatctatcaacagatgcgtatatcaacaaaatgtcttatatatgtgatagaatattatttatctataaaaagtaggtctgacacatgctacaacatgaataaaccttaaaaaactatcctaagtgcaataagtcatacgcaaaagaacattgtctgatttcacttacatgagctatctagaataggcaaattcatagagacaaaaagtagattagaagttaccagagtgtaggaagaacatggattggggagtaactgattaatcaatatagagtttttatttggtgtaatacaaaattttagaaatagtggtggtgattgcacaacatggcaaatgtaataagtgccactgcattatacattataaaaaggctaaagtggcaaattgtatatattaccactataaaaataaaacaataaatgtatttcaattcattaaatttattgtgaaaggtttaaaaacaagagtttgaggttaaaaattatgtctaagataaaatattaaaagatttattccacatgtgcaggtgtccacacacacatgcaaacacaactatatatatacatactaggataaagtctcttatatcttaaagaccatttatttgattttaataaatagaataggatggttgactcaacaatttcacttgagagaaagaatcaagcatagattattttcagttccatatggtcctcctcaaatatctatgattggacatctgtgaaggcatgccgcaaatctagggtaactaacataagcactcatgaaaaaacttcatttttcaataaattcttgttatttactcatctggtaattcagaatttagttaatccatcttcctatttatgtttgtatcagattatctggctctaaccagttgtatcatataattgatatattatctcacgtttggcagtattttttggactgctattttaaaactgggtctacttcagtgaatgacacccaagaaaaacccggatctatcctgctttctcctaggatagtgagccactgtttcacttattctctgaccttctttgggtgtcatctgcttcagtttgtttctgttgtcttgcatctgtaaattctcatcattttctgacatatgtcttgcctttactatgactcttcatgatcaggcaaaaagaaatacatactgaaatgatttgaatgaatgatttttttaattattaagctaatattttgtttttaaaagtctagttctacagtttgaaatacttccttcaattgctttcttaaatcacatgtttattattttgactcattctcagtgtcccacaactttaaaaattataatgattcttcttatttatagacaatacataatcagtgactgcctttcttttggcactgcctttcttccaagaacatgtcagaaattgatggtgatttttgctcctttccaactctttctttcctctgcttttctaaataacctgtaaaccttattatatttagaccttaaatatttgtcatatctctccattaccatttccactttcctaaattgagttactattatctttcttcaaattactctaatattctgccctttccctgcctccctcaattccattttataaataatattgaagtaattttaaaacatcaatgaattatgcagcttctttcagtagctttccatgactccgagtagagactcaaactcttatgatgaccaataaggccattccttccctcttcagcctcttctcaaagcaaacaccctcttccagtagccaccttccctaatataaaccaacctagctgaggtctccacacacactccttcagtcttagaatattcttgtctgtattttcaccagttagtttctaatccattttcaggtctcagctgaagggacactttctcagggaatcttacccttatttcaagccataacctcaagccttttttgagacccacactctccattcagtgtcttctttctgctttatgattaatcacagcacttgttttaaatttggatttcttttattctttgagtccccacttatttgaagactttaagaagaaaagtttgtctatttgctctcttatatcatttttgcttagcaaggtgacccataatagtgcccttaaaaaattaaccaaaggaatgattaaatattagtggtgtttccacgaaaataggcacatgaggaatgatttaaagtcctactctcctccaaacacaaacccttttaaacataggatatgtacaaataaattaggcaaaagtataagaaaaagatataaataaacctgaagtcagcaagggctttgatagtatggctccaatacttcagtagataaagtaaataataaaataatgtatatgtaagcttttaaattgtgtatatagcaagacaaacagaaaactgggaaaatacgtacactaaaaataaaacactagagataatacataataaacttcttaaaatcaattataaaaggatgaaaattagcaaaatatatgatcaaataaatcctagtgagatttccaagttgctgcaacaaattgagatcacttgtgatttattagaataaaaaataaattgaatatacaaaaaggaaaatatcagattatatttcatctattggacatatcagaaatgtttctatccagcatttagagagaacacaagatcaaaagaaatacattaactcatgaaatgagcaactaggaaatttatgaatttagagagtctctactgtaaaactttatagatgacattgtatcattttgaaagaaaactcaagacaccaaaagcaactgcaaaaaaaaattgacaaatgggatctaattaaattaaagagcttctgcacagcaaaagaaactatcatcagagataacagacaacctacagaatagaagaaaatttttgcaatttctccatctgacaaaagtctaatatctggagtctatgaggaactaaaacaaatttacaagaaaaaaacaaccccattaaaaagtggggaatgacatgaatagacacttctctaaagaagacattcatgcttctaataaacatatgaaaaaaaaaaagctcaaccttactggtcattagaaaaatgcaaatcaaaaccacaatgggataccatctcacaccagtcagaatggcaattattaaaaagtcaagaaacaacagttgctggcaaggttgcagagagaaaggaatggaatgcttttacactgttaacgggagagtaaattagttcaaacattgtggaagagagtgtagcctttcctcaaagatgtagaagcagaaataccacttgactcagcaatctcattactgggtatatacccaaaggaatataaatcaatctattataaaaatacaggcatgcttatgttcattgcagcattattcataatagccaagatgtggaatcaacccaaatgtccatcaatgatagagtggataaagaaaacgtggtacatatataccatggaatactatacagccataaaaaggaaaaggattgtgttccttgcagggacatgaatggagctggaagccattatcctcatcaaactaacacaggaacagaaaaccaaacacacatgttctcacacagaaatgggagctgaacagtgagaacacatggacacttgtggggaacaacacacacaggggcctgtccggtagtgggtggggaggagagggagagcaccaggaagaatagctaacgaatgcagcaaacctgcatggcacacatttacctatgtaataaacctgcacatcctgcacatgtgccctggaacttaaaatatattatgttggtacaaaagtaatttctgtgaactgcaattacctttgcacctacctaataagttgaaggaaaataaaatctattttaaaaaaaaaaaaaaaaaaggaaaatctaccctgaaatagagtagttttgagattatagtagagttccatgacctcaattcacatgctataattcatctttatatggccaaaactagatctgcaattgcacatttttccttctgtaggctttggttgaactagactggccacttgactcttcctaaaatggtactttcagttcttatgaatacaggttatgaataaccatattttccctgattattagggtatttatctacatgttttatctccatattcaatagtattccactttcctagtatctctcaatagataggtaaattatagatatatctccctcgataaagctttacatctacatatgaatacatttatacatatatttatgtatttatcaattgatcaattgatggatacattcattgtattattgttccatgtagcttttcactttagataatagttaaagcctatctaacactgatacaagagatattgggtataaaataagctcctttccaattactcaaaaggcccagaaatcatgaagatcacaaaattctgaaaaaagggctcaagccattctgtgcccagaaaataggcgaacaatgcttctttggatctgcttggtttgatgctgtatataatagggttcatgaatggaggaaaaagaaatgagtcattagctcacggtaatgtgcaccacatgtggtgcatgtttcccaaacctgtgaatgaaagtctcactgatcacggtgatgtgaaataccaagacacagctgatatgggagacacacatgttgagagctttggcttgctcttttctggaggcaatacctttaactgttttaaggatcaggatataagaaaagacaatgatcagagcgtctaggaagaaaatcaaagcaaccagaatagctgggtataagtgattgaatgtaatatcagcacaggcaagtttcaggacatcttgatggagaaaaaaggtgtggaagagaacatgggaatgacaatatgggaagcaatggagtggcagaattggaggcacgagggataaaaagtccctcataaatagccacagttctatcttcacccaagatttagtagaaatagttatacctgagaagcatgtggatgataatgaaacggtcataggccattgacaggagaatacctgattctgcaagtggataatgggagtggataatgtaaacctgcaagaagcaggccccatggataacctctttgtgattcatccacaagacgcccattacagtgggcatcatggtcaatttcaccatgaggtcttgcctcagtgtggcaaggaaacagtacatgggttcgtgaagactgtggtcatgcttgatgaggtagaggagcttgccattgccaagaaggacgcacacataaacagcaaagaaggggatggagatcgagtgataagttgcctccagtactgaaaagccaggcagcaaaaaaggagccgcattgtgtgttcacaagtggcaagtagctttatagaaactattacactgaaatccctgccttatcagtttttactaccttcttgtgaaactgtatttctgcagcctcaatcctaatattcatatttagcaataatttattggtatatgcatgaatgtgcaacaattttcttatagaagagcaatacatttatagactgtgctagagataaggaatgatgatcatttcttcagttatgaataattaagtagttaagcattcttaatctaaaaaacacattttaaaaaatgcatcatgcccctctgtggtgtgcttgctgcacaatgtttgaaccaatagtaacaaaaaagaaggcaaatatatgcaattagataataattgtacatagttaacctgctgcttagcttaattgcatatttggatacatttaaacttgatttttattttatgtttcacaatcatgatatagacatagtgttttgttagaaaacttttctttgtttagttttgaaatagaatgttaatgttttatggaattctaacaaaagccatgagccctctgtggagaaaaatggacaaaagcaggtgacgtcacatttagtctaaaaatattcacacgttttcctgaagctaatccatgagcaccacatttgaaacttcaagcctgccttgaaacatgtgttgagatgaaaaagtctgtgctttaggtgttggtcatcccagatggagtatgttctcctatgcagacctctgaaaatcttcctatcttctcttcgctgcatctaacataagaaggaagaggaatcattccttattcctgttcctggcactcacctatgctgtcattttcttgctggaataaggacccattcctgctctatttgaagactcagttcagacactcacttctcaaagactattcaagaggccaaattagagagtttatgtatgtggaaatcacttccccagagtttcctctttccaaatactcagaagaacccttgatctcccctccctcctctgtctgggagaagcagggacgctcaaccaatgtcctcggaactttcaggtatttctccaaggatggatgagaaaagctgcatactccaatgccacctctacattgggatgccaggacttaattatgtgacccttcaggaccctaagcatcagtacacagtatatccatgtgtgtactttgcattgtctgtctcaatacaatgcaaagtattgagagatactagttgaatgcagggtcacatgtgtctttgtcctggagtttatgcatttcaattgcattgttgtcttttctgatactttgggaaaatcagttctgatccacaggaacctcaatggatctattaatagccaagtaaatgaagggcctattatattttgtcttaaaataactttgtttatataaaaatcactgcccatttcataccaggttcaggatagacttgtttttatttatttgttttttcttttaaattttcaacatttactttagatacagtgggtacttgtgcaggttttttacatggatatattgcatgcagtggtgagcatactatccaatagattttttaaccctctcccgcatctctccctgccccttgtagtagtttcaagtggctattgttcccatgtttatatccacgtgtactcaatgtttagcttccacttataaatgagaatatatggtatttgcttttgtgttcttgcgttaatttgcttaggattatagcctccagctccacccatgttgctgaaaaggacatgatttcatttgttcttattgccacatagtggtggtgtatatgtaccacagtttctttatcccgtccgcctttgatagacacctaggccagttatttgtatttgctattctaaacagcattacagtgaacatgcaagtgcatgtgtctagttggtctaatgctctgttttcctatggatatatacccagtagcgggattgctgtgtcaaattgtagctctgcttaaagttctttgaagactctccaaactgttttctgcagtggttgaactaatttacatccccatcatcattgtataagtgttcccttttctccatagcctcatgagaatctgttttttggctttttaaaaatagctattctgactggtatgagatagtatctcttgtggttttgatttgcatttctctcattagtgatgatgatcatttttgtatatatttgttggctgcctgtatgtcttctcttgagaagagtctgttcgtggattttgcccatttttaaatggaattgtttgctttttgcttgctgatatgttcgaattccttatagattctgaatattagaccttttccagatgcacagtttgtgaatagtttctcctatcctgtagattgtcagtttactctgttgatagtttcttctgctgcacagaagctctttttattattattattatactttaagttctagggtacatgtgcgcaacgtgcaggtttgttacatatgtatacatgtgccatgttggtgtgctgcacccattaactcatcatttacattaggtatatctcctaatgctatccctctccaccccccacccccaccccacaacaggccctggtgtgtgatgttccccttcctctgtccaagtgttctcattgttcaattcccacctataagtgagaacatgtggtatttggttttttgtccttgtgatagtttgctgagaatgatggtttccagcttcatccatgtccctacaaaggacatgaactcatcattttttatggctgcatagtattccatggtgtatatgtgccacattttcttaatccattctatcattgttggacatttgggttggttccaagtctttgttattgtgaatagtgaagctctttagtttaattaggttccacttgtgaatttttctttgcattgcaattgcttttgggggcttagccaaaaatgcactgccagtgcaggtaagatttgagatcttacatttaagttttgaattcattttcagttgatttctctaaatggtgtaaggtaagggtctagtttcattcttctgcatatggctagccacgtattccagcacagtttattggataggtagtccttttcccgctgcttgtttttgtcagtgttgttgaagatcagatggttgtaactatgtagctttatttttgagttttctattgtgtttccttagtcaatgtgtctatttttgtaacaatatcatgctgtttggggtactgtggccttataatgtagtttctttcctttcttccctctctttctttcttttctttctttttttattttttcagagtttcactctgtcacccaggctggagtgcagtggtgcgatcttggctcactgcaccgtctgcctccagagttcaagcaattctcctgcctcagccttccgagtagctgggattacagcccccaccaccacagccggctaattttgtatttttagtagagacagtgtttcaccatgttgaccaggctggtcttgaactcctgacctcaggtgatacacccacctcagccccctaaagtgctagagttacaggcgtgagccaccgtgcctggcctgtagtttcaagtcaggtggtgtggtgcttccaattttgttctttctgcttaagattgctttgcctgttcaggctctttttggttccatatgaattttaaactagtttttctaatactgtgaagaatgacattggtaattggatagaaattgcaatgaatgtctaaattgctttgagcagtatggccatttaaattcatattgattcttccaatccatgagcctggaaagcttttatttatttatttgtgttgtttctgatttctttcagcagtgttttgtagttctccttgtagagatctttcacctcccacaaaccatatgatcatctcaatagactgagaaaaacctttcaataaaattcaacatcccttcatgataaaaacctccaacagactaggcatcaaaggaacatacctcaaaagaataaaagccacgtatgaaaaacccataaccaaaaccatactgaatgggcaaaagctggaactattctcctcgaaaactgcaacaagacaaggattcccattctcaccactcctagtgaacataaaattggaagtcctaaccagggcaatcaggcgagagaaagaaagaaatggcatcaaaataggacaataagccaaactatctctctttgctgatgatatgactctatacttagaaaatcctacagattcttccaaaaggctgctagaactgataaacaattttagcaaggtttcaggatacaaaatcacatacaaaaatcagtagcatttccatacaccaataaggcccaggctgagagtcaaatcgagaacacaatcccattaagaacagccacaaagaaaatgaaatacctaggacttgttctttttattgaaatttaaaacccaagcaggcactagaaagaaaatatttaccatgaattcatacaacactatcattactacgtgaatattagtgtgctatgagagacacatcaaataaatttctgggatcagggaacattttccagaagaaatgctacttaagctgagaattaaatgctactatattagtagtgtagtagtatttggtggggtagtgcaatcattgcgtacaggtgaaaagaacaaacacaaaacgaaacaagtaaacaaattaaagtttgtaaaatgtacattggtaatggggcaagattaaatactataaattcaaataaaaataattttattcaaaatatacattaaggaagtataatatctcttgaacaacaatacatgaaaaaaagcttgagagaaaatgaatctgtagtagtagcaggttctgatcacaatatatcttgcaaatcatgtaaaacattttgacattaccataagggaatgaatataaaacaagaggtatgatgagtacttataatcaagtagttattgtttaaagttactatggctacagtatgagaaacatgttggaaaagggggagaacaggtaaaagaagtatcaggatatgacaatacacgtgtcaaattgtgttggtgtggttttgactagttgttatcagtagcattagaaaggcttgaatagaagagagattctatgacttagaatagaactgagtgattgaaggtagtagattaaagagaaagaagcgtaagtaatgccacctgaatttctgagttttgctgaatggagagtagttccattgacttccatagttatcacaagaagataatgactttattcactaatcaacagttatttattgattggtcattgtacattaatgagtgttttacatgctgactttgtagaaaagatgaagagaatcagtttcaatgaagtgctttgcacaaaggataccctggagaaaattactcatatcattttcttttctaacagtttcattaacatataggtaaagacaggatatcataattgacatagtacagtgtcattaataggttaatcaggtcatgtggtaaagtgggaaggctgaataaggatattattttgtttttagagaatttaaaggaagctgtcctccttattaaaaatatgacagaagagtgatagctggtttggtttaatgaagtattggcttgtgccctcagaagggactgtgtatcttttatcatgaaagttgatatttcagagcactaataacttagtttccttctatgtaaaagatgaaaagtctcaatgaaataaaatgctagtggattcagatcaccctcttagaatcaatttgaaaaatattttctttaaacaaccatgaaggcaccaagaacagagaattcaacgtctaaaccagtttaaggacaacgtcattaataataaacatatttcccaataatttgggcttctttcatcttggaaacaacactgcttatccaaagtaagcacctccttatacctattcagtgaggctgcaatattgccatatcctcaacccaccatatacacaaaaggcatgccagtgatgctgctccatcatggtttgaaacttccttatttctcacacatgtggcaggtaattaaactatggcttgaagtcctggccttggccagttaaactaagagtccttccatcaaatgtatcactgtaaaacagatagcctatcctcaaaatttagatatcagatggggatataatatcgcagtaacttgtgattaccacagcaacttgtgatgtcccacagcttctgttctacaaagatgggaaacaaaggcaggctttcctcagctacaagaggttctgcatcaagatagcaaatcaagatgggaattatccgaaatgagatttttccattaagatgcctagatgtattatagacctcatggtcacatataaggaacagagaaagtctttggtagataactgacttttaggatttgagtttatattcagcatcaataacttgaacattatactctgagataggttttccccttttgaaatttgtggatgaaaatcctgtttcacaattaaatcagtctaaaagaagcttttagtacacagtcacacaaaaactcctcccaccacaattttttagtcattggatgaattgaaatccatttctctcaacattgttggtcttcctaatatagagagtttacagtagatgtcagagaaagtatttatggcaaaagaatcaccatttctaatttttccctctgaacatatataaagtatatataacttgtgaagtaatgatgtctcatatttttcattctagaatggctatattttctatttttgaatagagccttgacccttcctattattaggccaagggaaaagtatgttaaaatcatctgaagagcaaacatactcttaaaaactcactttttacttttttacgagctgacaagaagcttgtctaggtttttccttctaagatttttttgggcaaaagaatatttatagaagaatgaggtaaagaaatacacttttataaaatccagacatcctgcaaggaatgtattgaaaattaaaaagctcttattgaaatactctgtaagtgacttacgactgtatttagaaaatattaaatgcaaatcatggccctagagagtaccctaactcagggtagaggacagttaaaagataaccaacacttacttatttaaaagtaaatttaaaatgttagtttcttatcactatatttgccatgagaataatgaaaattttaaataagaatttatttctagagaatgatgatcaacttttttttttacacttgtgtgcattagcctatgcaaacacataaacatgtatgcacaaatgtgcacactgaggcaaaagtttttcatagagattatatgttctgccttttcctcaaatttcactgaggtggctaatttcaggtgcatttgaaagaagaatttaaatatagactttttcagttccatatggtctattcagtgttctgtcaccagacttctcctaagatatgcccccaaccctatggtaaagtacttaagtccttgtgagtgacaacattgtcttccagtatacccttgctctttgctaagaaagaactccaggctttcatttttcattctggcttcatttttatgtctgtgtctgattctccagatccgagtttaactactaaacctatgtttagataaaaggcggataatgccatattgtatttgcttggttttgatgctgtagatgacagggttcattaaaggaggaaagaggaagtagatgtaactcatgataatgtggacaacctctggcacattcttcccaaatctgtaaatgaatgtcaaacccatcactgtaacatagaagataagaacacaactaatgtgggagatacaggtattgagggctttggctctctcttcaccagaagcaatgcctatgacagtattaagaattagaatataggagaagaggatgatcagacagtctaggaagattgttaaagagatcaaaattacagggtaaagtctattgaaagttatgtcagcacaagccagtctcatgatttcttggtggaggcagaaagcacgtgtgataacatgagatttgcaatatgaaaatgaaaaaagacgcaaaattacaggcaggatggatacaaaaccccttagaaacactcccactcctaacgctatgactctagtattggtgagaatggaagcatatctcaaaggattgcggatggcaatgaaacaatcatatgccattgccaggagggaacctgattccacaacagaaagggagtgaataaagtaagcctgtaggaagcagcccacactgctaatctccctgtgattcacccataggatgcccattacagtaggcatcgtggtcaatgtcaccatgaggtctgtgcctgccagcatggtgaggaagtagtacatgggctcatgaagactgtggtcatgcttgatgaggtagaggagcatgccattgcccagaaggatgcacacataaacagcaaagaaggggatggagatccagtgatgagctgcctccagccctggaaagccagtcagcaaaaaaggggctgcagtaatattgggccacatagtgtatccaccggtaaagatcagatttcttgaaaccttgaaaccaggagcctccaatcttcctgcttggagatgattaactggtgtgataaatttgactctgcaactattttcctgaagaagaatagcatgtacagactatggttttttccctaattagaaaaaatactgagttaatggttcgatttttctcaaattcaaaaatttttcattaattttaaatatattatccgcaactattttgagggtacttataaatatttgcaacaacagtgataacaaaaacacataacataaatatacataaatggataataatctggcttagttgtcttcttgctgtgattactgaccatttggaaatgattgttgtaattttacatttcacgattatgatgaagacagttttttcagttaatgcagtttttctcattttttttggaaattgaatgtcagtgttttatgcactatagcgtgcatcaccatcactaccaatgaacggctttgtcactctaacagttacttgagcttggccaccagagttgtggatcacagactagacgcagctaacaagcagcgggcttgttaggcatgcagcctcagattctgccccttccaacattctgaatcaaattcgcttttttcaggtcctcaggtgattccagtgcaaaacaatgtctgggcatcactgctataagcatttcatacctaatccatctttcgagatagaaaccttttaatgcttccatccagttgattttctcattttctccaaatatcttcatacaattatcttttttatgtttctttcaccatttactggctttctttctgccacttgccctttccaacattatttcccataattaaatacttagctggttttctgtccttcttacctctctctgcttttccatcaactccaaactcctgaggaactgttgcagttctgtaacaggtaaaattataatgtttccacagcctaaggatgccagccatcactactgtttctgttttcttggttgccacgatccaagaggggtatgggagaaagaagaagcttattaccagctctgctgcagtcttatttaacgagaaattcagaatcctggaggcaagtctttagcacctagcagttttcttcataaaatggcctcagtatcaaaaataaatcagaatcagaagaaatcacaaagcatttcatattgtataaggaaatgttctgatgctacctctgtatcagctcctgtgagtcaggattactaacttactgagattgaaatcaccaacactagggaatccctaaaattaaatcacattgaattcatatagaagactgaattataattattacacaaatgttgttctaccttcgaaagatccttcatgcttaaaaacacagattgaggaataagaggatgtacggaatgaggtataggaggaagagaatggcagattagagaaaggacaaattggtgacacatattctgaagggtaaacatagaagaaagtcacattaaaattttttttaattaaagttttaaaaaattttaaaaataaaaaatttttaaaaagaaagccataaaatctgggattcctttaaaaaaaattgtgtaaggatcaaactagatttccagagcacaagtactttttaaaatgtttgtgagcttttccttaaaaaacaataacgtctttagagaaattggccataaaacacttgaaaccaaaaaagaaagttttttattatatttatgagcagaaaaaaatgtttacagtcatatctccctccatctctaagcttgggtcattaaaagtaagacagggaaggttatggtacctcaaagaaaatgaaaggtaaatcatgtctgagattttgggaataaaaagaaacacaaaagaagcctgcccaacactgggaagccgttgatatttacccagaggcaggcgtgtggggattctaggagagctagatactgtcatcaaactgaggcccactataagcagtgtcaccagagatgaagccatactgtatgcatgctcccaaggctgcactatgtggcaaaattccattcagatggcttagctattaacaagtgttaagaaaattatactagaagcacaagaactagtttttctggataaaggtggagcagctatggctgtgaaattgataggcagctctcaactcagaacataaatgtttagtgatttcctaaggatctggggtcctgacttgatgtgtgatgatttttccttgaactgatatatcatatatgaagatataagcaacctgtaggagctccattcaccaataccatctgggacaagttggaaaatgactattttgagtcagcacagaattggtgagcacatgccacacaactgcactgtgtttagttctaaataaccatgtaataagcacagtctgctcttaagaagctctcaatatggcctatgagtttataatagtgcttaatattctcccttcaattttatgcagaatattgcccttgaatgtctcaacaggatccataatgctgaaaacttgagaaaaatcatagatctaagccctgcttcattctagcttcattctagatgttctattgacctgaatttcacatgatgatatatttctagatgaataagattcctatacttgtagcaacactctcaccaagatgcataaatacatacaggtccatggaaaaaagttgtcatgctcactttgagaacataatttgaatgttaccagatacaagggagtaaaggagacagagggaactttgtagtatgaagaaggaacagacaggaaagatctgttagcctcaagaaaatgtagtaaatagtgaatctattatacagtctacataaacaagtgaaagaggaaaaaatatgattcctcctttccctcatcttctcatttcctactctgccctccttctgagttggatggaagatgtgtccccgcaccttcctaaggagatgggccctgtctctagaatttttctagtgagtcccactgactactcatgccatctcttagagcagttcttcaaacaaacacacagacacacatgcatgtgtgtgtttcaaggggtgttgtttggatcttataaattaaattgttatatgttaaaatggtgacttttctttctataaatttcaggatcttagcagagtgcagaagctcagcctgtttaggttcagaactccgtgctctcacgcattgtctttaatcttcaaaaaagtgagtcctccatttggccccagtcctgagggcctgacagttgggactacccaactctcagatttctattgtccacaagttaaattcctcctgccttctccaacccagtccaatatattatcatctgccatcaatatgatttcattttcaatccaatttgctttcttagatcttaatttggctgcccttttctaagcctttcaactcgattcagaattttttgtctactcttcagagaaaaactatcaacaaaaaatcctctgaacaggaaagttatcaataaaaaataaacgtaaaataagccctttctggataaacaaaaactgagttgatttcaactaagttgaaaccaaatgaccaaagatgatcatttgaatctacataaaatgacaaaagcaccagtaaagatagtcatgtcattatagaagacattatgcatacatattcctttctgcttcttattttcaaaaatgaatgtattacaataaaaaatagaattgcattgctggaactattacaaatataaatgtaatatatttaccaataactgaacaaaggaggtgagtgataacaaagctgttttggaatgaagaaatattctctgaaaaaaaagctataaacatctacatagaaaaatgagtaagaatgcacaatgacacatgcagttctgagcattaacaattatacttatgccaatccaagggtcccagattagaaaacctaaatctatcacagttccttaaatactctttcaaaaaagaaaaaaaaaaatctgtgctgtaggatatcccacctcagctgtgatctttacctctaggcagacctctggaaaaccttcttatatgctttccttgagtgcatctcacatcagaagagagaggaatcattccatattcaagttcctggcactcacccactcacagtattgtggctaaaataggaacctattcctgtcctctttgaggactcagttcagatcattcactcacagacctctcatgaggcctcattttaaagcttatgcatgtggaaatcacctcccctgagtttcatctttctagcatctcaggagaccccttgatctcccttccctctcttctctgttcgggaggaacagggccccacaactgatgtcctcgggattttcaggtgtttcctgaagaatggggtgaggaaaatttgaaattcaaaaaccagctgatgtaagatagggataccagggcttggttatgtgacccaaggaggctcagcatcataacttagtttatttgaaagggttaggggatatcggttgtcttcagggatcatatgtacctctacgggtcctagagcttatgaattccaattgcgtttttgtctttcctgttactttggtaaaatttgttcttatctactggaacttcaatggatctgttaatagtcatgcagattcatgacattcagcttttttttttttttttttttttttttttagatagagtctcactctgtcgccaggctggagtgcagtagcacaatctcagctcactgcaaactccacctcccaggttcaagtgattctcctgccacagcctcctgagaagctgggactacagtagcgcgtcaccacacccagctaatttttgtatttttagtagacacggggtttcaccatattggccaggatggtctcgatctcttgacctcgtgatccaccctccttggcctcccaaagtgctgggattgcaggtgtgagtcactgcgcccggctgacattcagctttttatcttaaaattatattacttgtagctcattgccctttttttttttttttgccagatacacaatgaggagcatagtctttattcacagaatgtaaatagtgtgtaatataaagaaaatagttaccacaaattttcatagcactatcattactgcatagatggtagcatgctaaagggagcccacagaaagcatctttggggcaggggaaaatttctcaaaagaaatattatttaagctaataattgaaaaacaaggaaggtaacaaatatagtgtttgtataagtggggtacagtttataaaggaagaaaaaatacacaggctatggggaaagagaaaatatgacaaactcaaatcaagagaattctagcagagccagaataacaaaacatgtgagaaaattgaacacaaagagaatctgtggtagcctgttggtttttgttaatccaaaataatgtatttttattattattattattatactttaagttttagggtacatgtgcacaatgtgcaggtttgttacatatgtatacatgtgccatgttggtgtgctgcacccattaacttgtcacttagcattaggtatatctcctaatgctctctctcccccttccccccacctcacaacagtccccggagtgtgttgttccccttcctgtgtccatgtgttctcattgttcaattcccacctatgagtgagaacatgcagtgcttggttttttgtccttgcgatagtttgctgagaatgatggtttccagtttcatccatgtccctacaaatgacatgaactcttcattttttatggctgcatagtattccatggtgtatatgtgccacattttcttaattcagtctatcattgttggacatttgggttggttccaagtctttgctattgtgaatagtgccacagtaaacatacgtgtgcatgtgtctttatagcagcatgatttataatccgttgggtatatacccagtaatgggatggctgggtcaaatggtatttctagttctagatccctgaggaatcgccacactgacttccacaatggttgaactagtttacagtcccaccaagagtgtaaaagtgttcctatttctccacatcctctccagcacctgttgttccctgactttttaatgattgccattctaactggtgtgagatggtatctctttgtggttttgatttgcattgtgacgtgttagttttaaagtatgtgtgaaataatttttattcttaacatttttttgatgaagcacagtgtctgaaagggtggtagcccaatcaagtgacattaaaaaccagaacacagctaatgtgagaaatacaagtatttagggccttagtctgctccttgtctgaggcaattcccatgaccttcttaaggatcagaatgtaagagataaggataagcacaaagtccaagaaaccagttgatgagaccaggactataggataaagtctattaaaggtgatgtctgcacaggccagtttgatcacatctggtgcaggcagaaagcatgggagaggacatgggattgacagtaggggaatccagagagggtgatgattatgggcacaattagcataacaaatcccctcatttgaacccccagatctatcttcaccaccttagcattggtgagaatggaggtgtatctcaggggattatggatgccaataaaacagtcatgggccatgatgagcaacactctggactccacgatagagagggagtggattagataggcctggaggaagcaggctccatggctcattttcctgtgatctagccagagaacaccaaggacagtggacattgttgtcaaagttacaccaaggtctatggctgccagtatagtcagagagtagtacacgggctcatgaagagtgcagtcttctctgataaagaggaggaggctgccattgccaaggactgtagagacatagatgataaagaaggagatagaactccaaggatgaaatctctccagacctggaaagccagtgaggagaaaaggggcagcagtaatggtgggtgacatggtggatacctgaggagaaacaaacaaacaaaacagctctctagaccagcactatgtggtggaaatataattagagctaaatatgtgatgttaaatgttctggtagtcacattaaaaggagtaaaaagaaaagtggtaaaattaatattagtatgtcttatttaagctactatatcaaaaatattatcattttaatagataatcagcataaaaatcatatatgagatagttcccacgatttttttttggtacaaattcttcaaaatcgagtgtttacacttacagaaaattctgactcaagctaaccagatgctactgttttggacagcacagctctagactatacgacttcatcctcagtttcgactccagctgctttctaccaccctttcagacattgtgcttcatcaaaaaaatgttaagaataaaaattatttcacacatactttaaaactaacacatatattggaaaagaaagtctcctctctcactagctattttttaaatggtgtgataggcataattttaaaaacctttctaccacaagatttcctatcctaatttctaggactgtgaatatgatacaatatcatgcttggggttatacagatgtaattaaagttgctgatctattgactttgagttaattgaaaaggaaattactcaggggaacctagtctaattccatgagcccctaaaagcagagttttcaccaagtagtaggagaataggaagccagacatattcaaaatttgagaaaggttcatgggtcagttgctggtttgaaatataaggaggtcacaaaagaaggaatgcaagaagcccctaggtacagaacgggcatcctagctaacagcctgcaaacaaacaaacaaaaaacaaaaacaaaaacaaacagggacttcagagttcagcagtaggaaactgaactctgacagccgggtgcaatggctcattcaagcctgtaatcccagcactttgggaggccaaggcgggcggatcacctgaggtcaggagttccagaccagcctggccaacatggtgaaattccatccctaccaaaaaatataaaaattagccaggtgtggttgcagttgcctgtagttccagctacttgggaaactgaggcaggagaattgcttgaacccgggaggcacaggttgcagggagcaagagattgtgccactgcactccaggctgggtgacagagcgagactccatctcaaaaaaaaaaaaaaaaaaaagaaaaaaaaagaaactgagctctgactacaatctgaatgaacgtggaagcgaattcttccccagagcctttggataagagcccagccctcccgatattttgaatttgaccttatgataccctaagcagagaactcagttaagcctatgagagtgcagacctatagaaatgtgatataataaactaataatgtttgaagcagctcaagttgcagtaatttatgtataacaatagaaaactaatgcaaagtattactattatccatattttattaagagtttatagagttctataataaactaatatttacagggtttatgtaaattattgtatcatttatctattatcacagaattgtcacatcacaaagccctgtatagcatcagtggctgacaacattaaacatttatttttcactctaatgcatggttcaacttatttaggctgggcttggctgggcagcactgatcatttctgcaccatctgctcaggtacatagggtgcagctgtacgtcatccctatcctattgttttcctgtgtcgttcttcctatatccatcacccttttgttgtatctatttctatattgtctcttattttgccctctctaactaaaccccagatgtctcttttgcatcacccagactttagcataaaacttagcacaaaatttttactgtttacattcttttactagtctctcagacctagtggctctaactcattgtagtaaaaaacacggttctactcccactccaacactaacattgcttactttactaagtgttgtattaacacaccaatggccctggaagcaatgacagagtttgacatattgattgtaaggttatttataaaattttaattactttatgattaacacattgatcactaactgactggtatgctgattgttaaactgacttaggtaagaacagtgacttcaaaatattactaatatactaattggctaatatataagctgaaaatgtgggagctacaaagtagaggaggaagaaggcagaaagggaacataggtggatgtaagatagagaaaactgagcctagagaactgcatcaagaggaggaggagaggtagtatagagacctacaggtgtcatggtgaccccaccctgcacattcactcccagagtcagtctctttcctctcctgcctcttccaaagaaaatttctattgtaggaaaagtgttcttaatagcgctgagctaacaagaacttctagatatcaactcagaactcttaattattcatgtaagcacccatcacataaaactactgtttttatttcagagttaacatttgctaggaagttgaacttttatgttggaggttgatacacccggcagaatctgtagatacagatatcttgcctcttttctctatttaccctcttgcaacaactatgtggtggaagagaatccaagaagattagtctttattttcctctcaattaccttcattccattctcccatagtcactagagcctgacctggggtatcagaaattaaggggagaggtaattgctgagtcctggtgtagaaattggtttaaatggtatctctgaagactgctaacagggttaatttgtgaggttatttgtattcaaaattgttccccagtatctgtcttgatgctggataattaggctactgggatattttttttcaagcctcctttggagaaggaagtgggctccagaactgtgttcttaaagccccatattttctttgcaaaaagaaaacagaattgtagcttcatccagcacatggaagtcatgctatctaactacctttgccttgtatgattccccacctcaaaaagaagataccgtgaagcctacttttgttattccttaaccctgtagccaataagctcactcaacttagacaaagcttaataatccctcacacttaatcttttcttggtttcaaataagattgtttgttatatatactcacaaatgagtgctgctgataagttctttcaaacagtaagcttgttttctgtctcttggtaagtcttgcccaagaatcagagttactgcttctggagcaatataaatcaagtttaaaaaattttatttaagtgtcctgtagtaatgttaaaaaggggacatggtggaggtattctttaatccctggctttgtctgacaatttgtacttgaatacaatcatctcatagtctgtcagagaaataaggatctgagaatttctattgtctcatcagtcttaaatcctaaatttatcctggaacttagcccaactatgagattttaaaatgagtatgggtgcaatgtggtgaaccatgagggtcacattttggtgcctgacatttcacatcagttaagttcctcctgaactgcattctgctcataggtcttcctaaatgtaagcagaatagtagtaggaaatcatgattaaaagtcagtctctggaaatggcttaagtctgaaaatttgtgtgtcctctttgtactaagttaaaatttaggtctggattgatttaggggagccatgctttgaacttaaaatgaggtgaggtagtaagaccctgagataactgatttaatttcaggctgccctcccatttcattagtaggtatattgaccctctcactggcagtacacgaatcttctgccccataaatatgactctattcctggaaacatcacttatcttagaacagatataaagtaatttcctgcagactgccccagagttgggataaaatctcatgtgaagtgacactgttggtggaggataagcctccagagaatgggaacaactattatcagccaacactcaaagtcaccaagcttaggggcactgggaggaagtaggcagggcacccaaaatatcttctatttccttaaatagccattgatgtgtctctcattcatgtattttctaagaccttgttcattcttttcatatttcctgctgtattgcctgtgaagtaaagtatcatgtcacagcagcataatctcagattgggaaggacctccatctcctgtaataaaagccttctttgatgcagtgtttcctgacaagggtcatccgctgagtgcctgtctctttctaaatcacataacacaatatttattagaatatctgtgctgaaaatactcaggcagccacattattagaaattacctaactttttaaaatgaaaatatttttctggtcttcctattccttggctcttggtctgagctctggcatcacagtctatatctaactgctgccttatattacatatggcatataggaaggcaacattcaagtataataagcttatatcgctaacgattcaggaaggtctctatcctaggatttttgctgtttgttgagtaagtctgtgctgacaataccagcttcttttttttttttttctgtgtagtttgattctattatctgtcagccttctggattccacaattatctccgaagattccatcctttaactcatcctctacaggctctgatggttaattttatatgccaatttgactgggccatggggtgcccaaatatttgtcaaacattattctagatgtttttgtgagggtgtttttaggcaagattaacatttaaatcggtagaccaagtagagcagatggtccttcctattgcaggcggcttcctccaatcagttgaaaacctgaatagaacaaaaagtctgacccttccccaaatcagagagaattattccttattgatggccttcaaactggaatctagacctttttttctgcctttagattgaactgaaacatcaaaacttcctgggtctgaagcctgatggcttttgggttgcaagtacaccatcaatcctcctgtttcccaggccttcagacttggactgggactaaactaccaggctctcttgagttttcaacttgatgactcactctgcatatcttgggacttgccttcctccataatcacatctgctatttccttatattaggttggtgcaacagtaattgcagtttttgccattatttttttttaatgcagtgaattacatttattaatttccatatttttatgtacattcaatttttttaatttttaagttctgaggtacatgtgcaggatgtgcaggtttattacatacgtaaatgtgtgcaatggtggtttgctgtacctatcaacccatcacctaggtgttaagcccagcatgcattagctattttttctaatgctccccttcaccacaccccatgccctgacaggctccagtgtgtgttcttcccctcactgtttccatgtgttctcattctcattgttcagctcccacttctaagtgagaacatgtggtgtttggttttctgttcctgcattagtttactgaagataatggctttcggctccatccatgtcccagcaaagggcatgatctcatccctttttatggttagatagtatttcatggtttatatgtaccacattttttaaattgtctatcattgatggccatttgggttgattctatgtctttgctattgtgaatagtgctacaatgaacatacatgtgcatgtatcttagtaatagaatgatttatactcctttaggtatatacccagtaatgggattgtgaggtcaaatggtatttctggttctaaatctttgaggaattgccacactgtcttccacaatggttgaattagtttacagtcccaccaacagtgtaaaagtgttcctatttctctgcaaccttgctagcatctgttgtttcttgactttaaaaaccaccattctgactggtgtcagatggtatttcattgtggttttgatttgcatttctctaatgatcagtgacattgagacttttttcgtatgtttcttagccacataaatgtcttcttttgagaagtgtctgttcatgtcctttgcccactttttaatggggttgtttgtgtgtttcttttgtaaatatgtctaagttcctcatagattctggatattagacctttgtcagatgggtagattgcagaaattttctcccattctgtaggttgcctgttcgctctgatgatagtttattttgctgtttagaagctctgtatttaattgtatttttctttattttgagatgaagtctcactctttcacccatgctagagtgcagtggtgcgatctcagctcactgcaacctctgcctcctgggttcaagcaattctcctgcctcagcctcctgagtagctgagattacaggtacgcaccaccatacccagcacattttttgtatttttagtagagatggagtttcaccatgttggccaggctgctcttatactccccacctcaagtgatccacccaccttggcctcccaaagtgctgggattacaggcgtgagccaccatgcccgatctctttagtttaattagatctcatttgacagtgtttgcttttgttgcaattgtttttgacattttcatcatgaaatctttgcctgtgtctatgtccggaatggtattgcctaggttttcttctaaagtttttatagttttgggttttacacttaagtctttaatgcatcttgagttaatttatgtataagatgtaaggaaggggtccagtttcaattttctgcatatggctagccagttctcccagcacaatttataaaatagggaatcccttccccattacttgtttttaccaggtttgttgaagatcagattgtttcagatgcgcggtcttacttctgagttctccattctgttccattagtcagtgtgtctgtttggtatcagtaccatgctgtttcagttagttactgtcaccttgtagtataatttgaagttgggtaaatcctgttgattctatttttctggagaaccatgactaacatagggccatctatttttgaggcactttgtgactaatcactgtcatctgtcagtttggtggcatgtacttgaaatctagggacataaactcctaaatttcccataaaataaattttgtctatgagtttattaataacaatgactgtgtctaaggatttaggctataaaatcaaaaacagatttacattctttaattggacatggagacctctgggtccttaatcatttctaatcatccttgctgcccaatttaatactcatataatctagtaagtatctttaaatatatcacctttcatttaccctataaaaatctgcatctctggtgaaggaacccagcaattatttgttaatgagaggaataaagttcatcttccccttatctagtataaattcattttatatgggaggaaaagtgatctgtaaactcattagaccatacatattttttcagtgtgtctctaagattcttccacgtcttcttaatcatttctaagattggcttagtctacagaaatgcacacttagcctttcatttcctgactcaaattaaatattcttatggtatgttatcccttcaagcccatactacacaagtatattattatttgaaaaagaaaggatggtatttggcaagggctttttttaatgtatattcttttacaccttagatttcccataactacatggtacttatttatcttaataggcaccatgaaatttattcctcatgaggtccttctctatataagttatattcttctttcagtcttgaatgatgaaaagctgaattacaggcttcacctgctgtaagaaggtggttcaccagtttgttagtccactggaccactctgaattctactcttcttatgaatacaaattcatgtgcagtgtttcctaggagatagtgttataaataggcttcttttcctaactaacttttattttaggttcaggagtacaagagcaggtctgttacatatttaaacttgtgtcacgagggtttgttgtacagattatgtcatcactcactcaggtattaagcctagtacccttttgttacttttcctgatcctctccctcctttcaccctccatcctccaataggccccagtgtgtgatgttcccctccatgtgtccatgtgttctcatcatttagctcccactcataagtgagaacacgtggtatttggttttctgttcctgtattaatttgctaaggcttctaatagtacatagcattttaccacaggaagacttgtaggagatcacagaaagttctaaattttatgataatactaacatactgtgtttatgttgattgttacaatgggttttgaatagaaaaacatgtctgagtggatttccaccatgtagccttctgtataactaagtttgagataattatttagtcttccccccacctccgatgtcctgtgtctgtattcatcctacagcatcttctcagtgaatttagtttcacacttactttcaagtcagaaatgaacttcttaaacaagggaaataacttcataaatcattcaccaaatggtcaactttcctgccatttttaggttccatttcctgtattttagaaaaagaggcagctcttctacctaacagtattttccagttttaaatattagttagagaagattcacatatctataactgagatgatataattattaatagcctttggttataagtgaaactcaactgaaactaggctgaacaaaacaaattacaagaagaggagtttattaggctgtggaatcaaaaaaaagattcaaactgtcctccttgtcactgagtctcaggaaaacatggaatcagagatttgaagattctttttatttattatcatttctttatctataatttactctaaatatttattatagtttgaagtcacttgcctgatgaaaaacattgtcattaacaattctaagcattgcattttagtaattctacaacaaaagcattactctttttttttttgcaatgtcatattgaaaaattctttttaaaaaagttcttctactgcggttaggagtttggagatacaatgcaaaatatcagttttcatagggaacaatatttttggagtagaaggaggagaaattttcagaaaaagaaagtaggtactacaagcatgacggaatacaaggcaaaaagtagaagccactaaggatagtctactgtagtggagtaccattcacactggccttatagttagaagatataaatttgaatcatgactataccaattaaaaatgttatgcccttggagggaatatttaacttttttatattaaatttccccatcaagaaaacagtgataatatctaccccacaatatttttatgaataaaataagttgtggatgtagtagagcataattaagggacacatgtttggttttatgaatgattgaaaacaggacaaaaacctaccatcacatatatgcactcacactcacaatttagtattcagactgtgttgctcaggtgacatggcgtgacaaggataaaaaacatgataaagctgatttttttatatgttcagttctttcacaattacatctcttaatgaaacagaatataaataaggattgcagtttttcttaagttggactctctatgagcaatacctgagatagggattcaaatgtgtgcaatttattaatgaatgctctcaggagacagggagcaagtaaaagcagtgtggacaggggaaggaggtaagcaagtgcatactgaagctggagcttagcttcagaaggcaagagggtcagtatttgcctatggcctgctacctaaggagcaggggccattttcttcataagacatttcctgctgagttgagaacaacaacctgcagaaagcagaaacatgaacaatgagcagccaacattcacaggtgcacaattctgtaaaatgatcggggtaaaacaccaaagacataaacaatatcttctatatagtcccctctcttgtctcactgaagtattatttttgctctgattaaagtataattaagacataacctccctctttttaggatattttaaattgagttatgggtcccttcctaactcatcagacaattttaatcaaatgagaatgacattgttgtattctttgggaaatttacacttattacatggaatcagaatgtatgtacagaaagcaatcattcttcaaaaaaatgcagaaacctatttttttttgttccttcagacctttttcatagcaaaaggagggtgaaggaactgtctcttccactaatttggactagtcagccagcgtagatatctgaggatggcctcaacattggagctagcaactagggtagtagaataagaatgagagcaagatagaaggaggtactgactgtgtctacgtcctctcatttatccgtgattcctcttctcacatttttttgttacaagtttgtcagaaggtactgccttggggaataaatatgagtttatggtttttgagacaaattcattataatttgatggagggaggaggaaccaactagactgttgagatgataagtaattaggtcactgatcaaagaagattatattcttttttgcaggaaaattcctggacttcagtgaccaaatttataggttcccattgtttgtatggacacctgcagagaaattcataagagttggaaattagatttgacatagtaaaccaaactctattccatttcactcgaaccaactaataattttatatttttatgattctgttcctatctgctaactttataccatgaaataaacatatgttagttacattatagacataccaatagatgcctaaggtattgttatcacaataatttagtggaaagcttagagaaatattccgtttacaggaatgcaacaaaaatttgtacaaactacatttagctaaagagttgggcttaaagagataccttagggaaacttgaagctgtattttaacacctattttaccaagtcatatgagcatgcatgctagatatgagacttctttgctctcctgctaaatattagagtttttacattctgtgagagtgactgtgatgattggagatcaggttccaattctatgggtagtaaaaaggtgaagaatggcattctgaatctgcttggtcttgacactatatgttataggattcattagtggagggaacagaaaataggcatagctcataatgaggtgaacaatatgtggaacctgctttccaaaacgatgaatcagagacaatccaatcactgtgacataaaaaaccaggacacagcagatatgggagacacaggtaatgagagccttggccctctcctctctggaggcaatgctcaggacagtcttgagtatcaacacataggagatgaagataatcagataatccagcacaaatataaagactacaagcacagctgggtacagtcggttgaaggtggtatcagcacaggcgagtttaatgacatcctggtgaaggcagaatgcatgtgaaagaacatgggagtgacaatacagaaaaaaatagaggggcctgattgggggaacaacggatacaaatcccctcatcagaactcccagcccaatcttcactactcgagtattagtaagtacagaggtatatctaagagggttgcagatggcaataaaacggtcataggccatggcaagcagaatgccagactcgagaaaggaaagtgagtgtataaagtaggcctgggaaaagcaggccgcacttccaatctccctgtgatccagccagaggactcccagcaccgtgggcattgtggtcagggccagccccaggtctgtggcagccagcatggccagaaagaagtacatgggctcatgaagattgtgatcttccttaatgagaagaaggagggtgccattgccaaaaaggatggatatatacatgaacaagaaaaatacggaaatccagtgatgagcttcctccaagcctggaaaaccagtcaataggaagggatgggagctgccgctggacgacatcctgggtttatatagaagaaatgtctttctgtttctgttattaccacagtgcacagttctaccttcaaggtatcacttcgactatatcattctcagaattttttcctaaagataataatgacatcaatataagtgattgtttctcaaaatacattctcagggttactcatactatttgtattcttaactgcacattccaggatctatctcctacctacgtaatcaaattcttggagtttcaactgtttatatgcatttaagcattctcttcagaaaaaaaattatgtaaactacaacttctaaactgttacccttaactatgcagattttaaagaattcgtattctatggggcattcaaggggatttccagaaagctaacactaatttttttctggtctaccacctaaacctgtaattgccttcacagtagtgatccctaatccacattttcctgcatgtaaagacttacctgaattatcagctaaagtctcaacagcctaagaaagaaaagtgtgggaagagaaactctgccactaccactgtagctaaggagcagtcagattgagaaagagacacttggcctccagatttcatggactagtgatggggaacagacattcacgattagtgtgaattaccctcttgtagaatccttcagtactactcactacttgtgacaatagctcagtctaattataagttagactttggggctggaataaatgattaggccagccaaagacatcacttataatagtgtatctccttcagtttaaacatcttactgtttcttatttacaagtagtgtctttttctttttaaattatttttctataggcctactgaagtaattccctagaatctgacctctctcatttcaagttctccatttatatttaaacatccatcttcctggtttccttccctttatccccagccataggcttctgaatctgttctccccaatactgagtgagagctatttccctgcttaaacgtggtgctgtcttttactgaagagaagagattagtcctttgagaaggttttaatattccttctgccactagactaggggcttcttgcatatagacatggtgtttatttgctttgctcaacaccttgcaaagtatctaacatgtgactgataaacatttcttagttcacctaatatttgtgaacacgcatcatgtgacagccatgatatttaaagctctctggaattaaatggtaataagacaaagtccctaatcttataaaccataaattaagttgaaaaataaataagacaattttaaacaaatataaatgcaagtttaacataaaacagtactacttgatgtagattaattggatggtattgtatacaagatagtatagcagtttgaggggcctagaactgcacctatgaggaggtcccatttgaactgagacctcaatacaaaagaaaacctgaccgtatacagacctagaggaaaactgttccagagggaaaatcagcatgactggcatttgataagaaaacaggagagggacaatagatgatgtcaaagaagcaggtagtaatcaagtgtcatagggccttacagaccaccacggaatttttgttttgttttgttttcttcttactataaatgtagtaaagacattaggacactttgaaaatcacaatggaaaatagtgtggtgatatattctgatttgtatttttaaattactcacttagactgctatgtgaagaagactaagcaagagacaagaaaagagatgagttagaaagctattttaaaaatccatatgaagagtcatggtgaccttgactaggagagaagcaggggaaatgaaaaaaagagaaaaatagaaaaacttaaacagagacagatgcatttttgaagtagtgccaagatttgctgatatattaaaaatgggagtgagggaaaaatcaaatgaggtttcccctagatttctgtttgaacaaatgaaagaatggtgaagccatttactcaaaatggaagtctgagggggatacatattcacttgtgaggaaatcaagagtcattagtaaatatagctgaattagagcaaatgcatcccttgcttttttttcttgtcacatgccagaacaacttcttgaagttgtttttatcctaagttaaaaagatggtcgtatccaaatataccccttcagagttactttgtcagtgtaaggcactaccctaaagatgccaccaaaggaaacgatcctcttaccttccacccatagagatgagatctaactgtaatagtttcagtgaagagatgccagacaactgggcgtgaggcaacaactcagcactttgaaagaatcatttttcagcatccatattctgtcctaggactgagagacataaaccagaattcagtgcctactgaacatacaatgagtgatgtatattcttcagttactagacgcaaagataatccagcttagctcctccccttctgtgttctatgtacttcatttctctgtcaacactcttacttctctgacgtttcagcaataatctcctttaacctaatctttcactgtatctcaactttgtgaaaaattccttcttatcagagaatatgcagcacaagtgatgaatcactacagggaaagctaaccaaactgtaaggcaatgattgtattttgccaataataacctgcaacttaaagtttcctccttctccattcccaagaattccatgcagacatacctggtaatgcagctataatagtgatctatggaatcactctactttgttttgtgaaaattcttgtgtcctcagctagtcgtggctcttggtttctgagaagaaagacaatgagagaagagataaaagctgaggaaaaaaaatatagggaaggaaagagatcataaagactgaggatagaagcaagaagattctataatggaacacctagaaaatcagataaacttctaacatttacagccataatttttctctgctttgtttaaaaagtaaaatgtagtagaataagaggtgccttcctgttcatcttttagaaaggaaagaagacatatgagagggtcaatcatattcacatcactgagtacagaaggtcttaggtagttggttggtagcacttggaattgcttttgaagttctatcaacttcagactgaaatctgtgcacacatccaaagctgtggactattgagatccttcacttcttctccgtatctttctctggagagcttatagaggagtctcctagtacactctttatatatctaggagtatttcaccatactcccaggtaccataacttgtttgatggtgaggaagagcagggttcttgtgtcttacctaaagacttagatcatgttgttccttctcaacatctgtgaagagaagcagtcactgtggttattaataaagatagcaccttcccagatgtctcccttttatagccaacttggatcttaagaaatatttactctgtattaactcctccttagagggagctggaacacttaattagtccccccaagcttttaaataatctttcttttttcaaataagttactggctgaatcaagccactggtaggacctttatgtgtggggaatcagacagcctgtcttcatagccccagcagactctggtatcacctctgggaggtaatttattccctacatttacttcaacagtcaaatctttcccagtttatctcaagagaaagcctatatatcttcttggcctatgtaacctgaatttctactatatttcctgcttggtttagatcagagaaagcttgaaagcagagagctagatagactagagtcaatataataaaattcaggcagccttctctagtacccaacgtgaacgcacattctgcagttatcactaactattcccttcttgagtttagcctaccagaagttttctcttttccaggggatgcagcaggcatactcatcacatggtgcttcagccaagcacaccacatcactttgtgatggcaattattatatgcgttttacagtaaggactatgaaatgcaatgagataaaataattccaaagtagcacagcaagagccaaagccacaatgtagacaaaatattcaacctccaacagaggaaaacctccagtaaaagccaggacagagacagagatcttgagttgtgctgttcaaagcccaatacccacaaggctgagggcacaaataatagagaaaaagatggaaggaaggaggtagggagagagggaagagaggagggagcagaagagggagggagggaagaacaataattatctaaatcaggaatggtctctggggaggagcttctaaaataaatgttcctaccagccaggctcatgtgcagattctgaaaagatgatgcccaaatctttcatacggctaaagatgtgagatacatgactatggaactgaagaatggaagggaacaaagtttcaggtcagtgagggtatttaatgaatctcctctgtaagatctcattgcaggaaccaaggcaaaaaaaaaacagagagatcgaagctgatttcttagcaagagaaaagtaatagtgttgtctgctaagagtagatatatgtagtaggcatgggtcctaaagactccctgacatctctaaaacttggtttctttgagagttacctcttcaaatataaaaaagtgaaggatagattctggaacacataaggcaaacaattctacgaacaaaccagagcatgggtgttgactcaggcatgaattatggggttgtagtaatttctctccacctgactgattctttaatctctctggcttccattctaaccctgagagtccccctgcccccaaccccatgtcttttaccttagaagtccagataagtgccaaatatagaatcaactcttccaaattcttgaggaggtatacctctgtaatcatcagaggttcaaatactttctagaaaaaaagtcactatctgaccatatgactaataaaccaattcaaaattaagcttggacggagcttgggttatgtgtgcctctggatcaggggtacagattcacatagcctgtgtgactttagcacctggaaaggtttatattgtgtaacaggcatccactactcttccatcttcttttgcctgctttcttctagccgccctggcagctgattagatagtacccacccagacggagggtgggtgggtctgcctctcccagtctactgactcaaatgttaatctcctttggcaacacccttacagcacacccaggaacaatactttgcatccttcaatccaatcaagtttgcactcaatattaaccatcacagaaaggataatagccaaaggtaagggggtaaaaaaaggatggagatactaagtgcttgagacagaaaagagtgtcaggaaaagtgaaggaaaaaagccaaagggaaggtgagagaatatatgaaagttaacatctgaatgggctcctgctgaggtgtctgcatagagccatcagtttatgcggcagagtttgagactttgagaattagtttctcattaataaaaactcaagtctattctatgacagagaccctggaagagggtgaatggctgcagggatgaggcaaaggttttagatttttatcccctctgaaactcacagatcatctcatataccacaaaagcaactgagtgaatcaagtgaaagcactcagttttcaatatgaaaacagacaagacaaacagctattttaaggattcttcccaaaaaatgaggtgtatataatgccccagtccaatacttgacacacggtagaaattcaacaattatttgttccatacatttgtttctcagctttattttccctatctggtattcctactcctgtttttttttaatttatcaattatatgtttatttagtagtaatataacacaattaactagattaatgttctgtattatcttttccctcccagctttatttaggtatatttaaaatttgctaagaaagcagacctcacatatttttactaccaaaaaaattaaagttattatgtgaggtgatagatatattaattagtttgattatggtaatcatttaacaatgaatacctataataaaacaataagttatatacctatgtacaatttttatttgccatactgcttctttaatcctgcataagctgagtattgtctgaacctctcactggcaggcagattgagcaataatacctccttttctcactttttgaggacagagttgctttcccctctacttccctcagtcccaatgccccaggctcaacgttacttttagctatgtcagaagttcccacattggctcatcaatcttttctcctttccctttcccacccagacatatcacattttatctgctgattagagaaactatagtttaatatctttatttaaagtcaaacacaggctcctaaaaaccccatcatcatcttatatctgttcccaaggcttccacagaaaaaaaggaaatcatttgacacacctctgggtgaataatcctgacatgtactcactagagaaagagaaaggaggtacttctctgaaacaataacaaaaacacaaaaataaaaaaattatccactctttacaaaacatttccccttactttgtgtcaagagaatgactgagaagacagaaatcactagtagtctttacaggttatgtaaccaaatctcaagattaaattactttcccaagatcattattgttagaaagagcagagctgaaacttcaacaaattcttctgaaaatgaaagtccagtaatcttggatgcattcttttcatggacagaaagaggtcttgtaaatcgtgcataaatttacatcaatatgctctttcaatagtatatgagatgtatagtccaaaccaaccataagagaaggtgggcctattttctctggctcatgccaccaacacacaatttatgtattctcagaggttggctgcctgcaccagctgaaatcttagaattctaatgagtcacagagccttctcacttttgtcaaatcccatcagattccatagttttaaaaaaaaaattctccttgatcttgcctaaattaccaatttttatttttgcatcaccaagtaggtgatatgcaacagtagtttggtgctattatcaattagtgccttcaaaagcttatcatcaaatccacattttactgtttattcttcaatttatattatgaaaatttgaattctttgaagcagtgtatcaataactagggttataaagctgggcaacttagagttctatgtgctttggaaacacacacaggtaagtcactcttacgtcattttctaactacccaaaagtctctggagcttcatcaattgaattttccctccaggaatattgaagaaaagtcaatctctgaaatttactattttattgtatttgctcatatatttcttacttgtgtatttgtttttccatataatctttatatctgcttttccaatagtgcttagaaccatttttctactgatcttttaggtctcacatagcctgggaaacctttacatccaccctataataccaccagtcaggatgaagagcaccatgaaaagtgacctataagtttcaggccattacagcactattcaaatatagtgatttcttctttcattttgtttttattttctgggttatatgatttacaatgaattcaacaatgtttattctgcatgaatagctgtatccccaacgtagtatccaataatcttacatagagtaaaccctaaataatatcttctttatacattctattttcccatacctaggatctcccaggaatgactaaattatcatccttgctgtcactgaaagtcaggactggtgaacatcttatgaacaggtagaattctcaaggagcaacttttatacaactgattactattgctttacctggagtaaatatttgcctctttgcaaagctggcaatggggctcaataagtctgcttccaccttccagcttactggcttcccaggcatggagaaggcacatcactggatattcatcccattattggcagcctacatctccatacttcttggcaatggcactcttctctttctcatcaggaatgatcataacctccatgagcccatgtactatttcttagctatgttggcagctacagacctcggagtgacattgaccacaatgcccacagtgctaggtgttctgtggttagatcacagggagattggccatggagcctgcttctctcaggcctattttatccatactctttctgtcatggagtcaggtgtcttgcttgccatggcttatgactgtttcattaccatccgcagccccttaagatatacctctatcctgaccaacacccaggtaatgaagattggtgtgcgggtattgacaagggctggtctgtccattatgccaatagttgttcgcctacactggtttccctactgtcgatcccatgtactctcccatgctttctgtctacaccaagatgtcatcaagctagcctgtgctgacatcaccttcaaccgtctctatccagttgtagttttatttgcaatggtcttgttggactttctcatcatctttttctcctacattttgattctcaagactgtcatgggcattggttctggaggagaaagggccaaggccctcaacacatgtgtctctcatatctgctgcatcctggtcttctatgtcactgtagtttgtctgacatttattcataggtttggaaagcatgttcctcatgtcgttcacatcacaatgagctacatccacttccttttcccaccttttatgaacccatttatctatagcattaaaactaagcagattcagagtggcatacttcgtttattctctctgcctcactctagagcatgacattgtttcactggtctctgaggaataattcaggggacctggacaggatgacaatgttgccagcataagtaactagggaaagtcatttcaatgagaactaatcaatccctgagcatttcagtggaaatcagtcaatccctctgctacttagaacattattttaccctgcctgtctattgctgatttgtataagatatatgtacaacactaagtacatatctcagtgctcaactgatattgttttctcaggtaatttaactcacattgtttgattagcttatggctggcaccatacacatacatacatacttacacacatacatatacacacacagatacatacccatacactattatatatatttaatatatataatacacactattatatatacttaatatataatagtgtgtgtatgtatctgtgtgtgtttatatatattatataaataatatatatatatgaaccaattatatatataattcttgggtctatgatttgggtcaccggcatttcagtcaatgcccattgctctccatatggcttgcatatattagtcctgttatacataggaataaggcatttttggcttcagacatacatccagttctcttgcatatatggagctggctgctgtttctagaaaattgcacgtgaagaaatgagactttcttcaatgagagtaagccatttccctcaattactttcttcaatgagggtaaaccatttccctcaattcaaaatgatgagtctagggaaagtatctctatgagaaatgtgttcagttaaaactttggttaacatttatcaaataatattgataataatttgaaaacagagatataatttctaattcagatgaccattgtcttgatagttaattccagttactactgaacagagagatgcattttcataaagtggtatgagaggtctggtttaggggaacatcagagataagactagataggggtgtctggcatgtgcaaaatagcagagttgaaaaacaaacagttggtcatatgtggagagtggggaggaagggagaggatggaggcaatgctcataactagaagataaaatggccttttctggctccaaatacttttgattcttttcagagtctaggcatgagaagagggggtttgtggtcctatggccaggtgaagagccagtatccatgactcaaatgataagttttaaattaattttaaaagaaagatattcttttgaccaaaatacagggtatgatgtgcttggactacacaaggggccacccagtgaccagtcagctggatgcccctcatctctggcctctgtcatactgacactcagtgatctatggctgcccacctactcttcatcacagaaaggtggggattttttaggattcttgggatgtataaataacacagagaaaacaaaaataaaataataccttcacaatagtttccaggctagtaaatgatctttatctgattagaccaaaagattttgtttgttttactcaacttggctgtgtgtgaaatttgcctttctcttttgtagcttcttgactgtgtgctcgaggatggtaaatataacatagttcttattccctactgtattacagaacttctcacatagaccatttttaacaaaatataatttttcattaaaatgaataaataaaatttaaagtgacccatgtctttctgtgtgtctgctagttcttctgtctgttactgctctctgtattgtcttccaagatatgggcaatgtatacttaatcctgttctttcttcccttgggcttttgggaatgaattcagggggatctaagccacatcaaagaaaatctttcttgactcaccctctaggtccagtgatcctgaaacctgccatagcaggctagtataaagataactaggataacaatacattttataaattctgtaaatggacacatttgactgacaaccctgagtttctctcctccctttctgttcttccttatactgaagagatgtgatgaagagacaagataaaaagtccaagagaggtgaaagactgggacttgcagttctctttgtggagtcccgtgaaacagagcagagctctgggctcccgatggtccctgaacaacatatcaacagtagggtcgaagacctcacccctcctcatgatcctccccacttcctcccgcccctccacgccaccagccacactgagcgctcagctcctcccaggtcctggacctgcagccctggccaacatcaagagggcatctttgccaagaatgcctggaagagactcagccactcacaggaaaacgtcctccagaagccagggaaagctgctgagacaaaagacaaacagtttgaagaatatgtccagaacttcaagccacaagaagcagagggtaccagacctgagagaactctgaggatgtttagaagcaatcaaaggcattcaagagaccttgacgaagctgagtcactgtgtgaagtctgtgcgctggattggtctgggcaggaaggtgtgaaaatggttggtgagaaaggtgatgtgctctgggaggatatccacaaaaaactcatggatgcatccttgctaacactggaaaactacctggaccaatttcctgacttgaagaatcacatcaccaagtgcagcaggaagcttacggactatgacagtgcctgcccacctccatcgggctcaacagagcttcaggaggaaggataggagcctctgtctaaggcagaagtagaatttcagaaagcatagagaaagtttgaagagtttaatggtgacttacaagaaaagttaccattattatagtcaagacgaattggattttatattaatactttcaaaaacatctccagccttgaagctaagtttcataaggaaactgtggtgctttggtacaaacagtatgaagtgatgatgaaactgggtgaccagtatgctgacaaggccttcaacattcaaagagcaacacccactgatttgggtcctctccacattgcaaagatgtcctcatggcctagggagctttcattccaccccagcccaacaactagttcaagtgaaacactagcacctgcttctcctatgccagcatgacctgagtcactcttgcagtcctgtatctgtctaaagtcacttgacaaaggaactgcagcaggaaaaatatcatcttcacagactgtcctaaagtaagataggtgatgtgtactgtatccacaaatcatctgtaaaagttatgttttcagtggtgtgtcatttcaaataaaccttgggaaatttctaacaattacctttaaaaattaaaaaaaaaaaaaagagtagggtcaaggggtatagggtagcaaaattttcttaaaggatcaatgtaatgccctgctctgattcctgtagtgacataggcgtcaatatacagacaaggtcctggaagttcttttaaaaatctgctgcaagctgagggtcctgttagaaggaaaactaacaaacagaaaggacatccacaccaaaaacccatctgtacgtcaccatcatcaaagaccaaaggtagataaaaccacaaagatggggaaaaacagagcagaaaaactggaaactctaaaaatcagagtgcctctcctcctccaaaggaatgcagctcctcaccagcaacggtacaaagctggacagagaatgactttgacaagttgagagaagaaggcttcagacgatcaaactactccgagctaaaggaggaagctcgaacccatggcaaaaaagttaaaaaccttgaaaataaattagactaatggctaactagaataaccaatacagagaagtccttaaaggacctgatggagctgaaaaccaaggcatgagaactacatgatgaatgcacaagactcagtagctgattcgatcaactggaagaaagggtatcagtgatggaagatcaaatgaatgaaatgaagcaagaagagaagtttagagaaaaaagaataaaaagaaatgaacaaagcctccaagaaatatgggactatgtgaaaagaccaaatctatatctgattggtgtacctgaaagtgacgggcagaatggaaccaagttggaaaacactctgcaggatattatccaggagaacttccccaatctagcaaggcaggtcaacattcaaattcaggaaatacagagaacgccacaaagatactccttgagaagagcaactacaaggcacataattgtcagattcaccaaagttgaaatgaagggaaaaatgttaagggtagccagagagaaaggtcgggttacccacaaagggaagcccatcagaataacagcagatctctcagcagaaactctacaagccagaagagagtgggggccaatattcaacatccttaaaggaaagaattttcaacacagaatttcatatccagccaaactaagcttcataagtgaaggagaaataaaatactttacagacaagcaaatgctgagagattttgtcatcaccaggcctgacctaaaagagctcctgaaggaagcactaaatatggaaaggcacaaccggtaccagccactgcaaaaacatgccaaattgtaaagaccattgaggctaggaagaaactgcatcaactaatgagcaaaataaccagctaacatcataatgacaggatcaaattcacacataacaatattaaccttaatgtaaatgggctaaatgctccagtaaaaagacacagacgggcaaattagataaagagtcaagacccatcagtgtgctgtattcaggaaacccatctcatgtgcacacacacacataggctcaaaataaagggatggaggaagatctaccaagaaaatggaaaacaaaaaaaggcaggggttgcaatcctcatctctgataaaacaggctttaaaccaacaaagatcaaaagagacaaagaaggccattacataatggtaaagggatcaattcaacaagaagagctaactatcctaaacatatatgcacccaatacaggaacacccaggttcataaagcaagtccttagagacctacaaagagacttagactctcacacaataacaatgggagactttaacaccccactgtcaacattagacagatcaacattagacagatcaacgagacagaaagttaacaaggatatccaggaattgaactcagctctgcaccaagcggacctaatagacatctacagaactctccaccccaaatcaacagaatatacattcttttcagcaccacaccacacctattccaaaattgaccacatagttggaagtaaagcactcctcagcaaatgtaaaagaacagaaattataacaaactgtctctcagaccacagtgcaatcaaactagaactcaggattaagaaactcactcaaaaccgctcaactacatggaaaccgaacaaattgctcctgaatgactactgggttcataacaaaatgaaggcagaaataaaaatgttctttggaaccaaagagaacaaagacacaacataccagaatctctgggacacattcaaagcagtgtgtagagggaaatttatagcactaaacgcccagaagagaaagcaggaaagatctaaaattgacaccctaacatcacaattaaaagaactagagaagcaagagcaaacacattcaaatgctagcagaaggcaagaaataactaaaatcagagcagaactgaaggaaatagagacacaaaaaaacccttcaaaaaatcaatgaatccagaagctggtttttcaaaaagatcaacaaaattgatagactgctagcaagactaataaagaagaaaagagagaagaatcaaatagatgcaataaaaaatgataaagggtatatcaccaccgatcccacagaaatacaaaccaccatcagagaatactataaacacctctacacaaataaactagaaaatctagaagaaatggataaattccttgacacatacaccctcccaagactaaaccaggaagaagttgaatctctgaatagaccaataacaggatctgaaattgaggcaataattaatagcttaccaaccaaaaacagtccaggaccagatggagtcacagccaaattctaccagaggtacaaggaggagctggtaccattccctctgaaactattcgaatcaatagtaaaagagggaatcctccctaactcattttatgaggccagcatcatcctgataccaaagccgggcagagacacaacaaaaaaagagaattttagaccaatatccctgatggacatcgatgcaaaaaacctcaataaaatactggcaaagcaaatccagcagcacatccaaaagcttatccaccatgatcaagtgggcttcatccctgggatgcaaggctggttcaacatatgcaaatcaataaatgtaatccagcatataaacagaaccaaagacaaaaaccacatgattatctcaatagatgcagaaaaggcctttgacaaaattcaacaacccttcatgctaaaaactctcaataaattaggtattgatgggacgtatctcaaaataataagagccatctatgacaaacccacagccaatatcatactgaatggacaaaaactggaagcattccctttgaaaactggcacaagacagggatgccctctctcactactcctattcaacatagtgttggaatttctggccagggcaattaggcaggagaaggaaaaaaaggtattcaattaggaaaagaggaagtcaaattgtccctgtttgcagatgacacgattgtatatctagaaaaccccactgtctcagcccaaaatgtccttaaactgataggcaacttcagcaaagtctcaggatacaaaatcaatgtgcaaaaatcacaagcattcttatacaccaataacagacaaacagagagccaaatcatgagggaactcccattcacaattgcttcaaagagaataaaatacctaggaatccaacttacaagagaggtgaaggacctcttcaaggagaactacaaaccactgctgaatgaaataaaagaagatacaaacaaatggaagaacattccatgctcatgggtaggaagaatcaatatcatgaaaatggccatacagcccaaggtaatttatagattcaatgccatccccatcaagctaccaatgactttcttcacagaattggaaaaaactactttaaagttcatatggaaccaaaaaagagcccacattgacatgccaatcctaagccaaaagaacaaagctggaggcatcacgctacctgacttcaaactatactacaaggctacagtaaccaaaacagcatggtactggtaccaaaacagagatatagaccaatggaacagaacagaggcctcagaaataatgccgcatgtctacaaccatctgatctttgacaaacctgacaaaaaaaacaaatggggaaaggattccctatttaataaatggtgctgggaaaactggctaaccatacgcagaaagctgaaactggatccctttcttacaccttatacaaaaattaattcaagatggattacagacttaaatgttagactgaaaaccataaaaactctggaagaaaacctaggcaataccattcaggacataggcatgggcaaggacttcatgtctaaaacaccaaaagcaatggcaacaaaagccaaaatggacaaatgggatctaattaaactaaagagcttctgcacagcaaaagaaactaccatcagagtgaacaggcaacatacagaatgggagaaaatttttgcaatctactcatccgacaaagggctaatatccagaatctatgatgaactcaaacaaatttacaagaaaaaaacaaccccatcaaaaagtgggcaaaggatatgaacagacacttctcaaaagaagacatttatgcagtcaacagacacatgaaaaaatgctcatcatcactggccatcagagaaatacaaatcaaaaccacagtgagataccatctcacaccagttagaatggcgatcattaaaaagtcaggaaacaacaggtgctggagaggatgtgaagaagtaggaacacttttacactgttggtgagactgtaaactagttcaaccattgtggaagtcagtgtggcgattcctcagggatctagaactagaaataccatttgacccagccatcccattactgggtacatactcaaaggattataaatcatgctgctataaagacacatgcacatgtatgtttattgtggcactattcacaatagcaaagacttggaaccaacccaaatgtccaacaatgatagactggattaagaaaacgtggcacatatacaccatggaatactatgcagccataaaaaatgaagagttcatgtcctttgtagggacatggatgaagctggaaaccatcattctcagcaaactatcgcaaggacaaaaaccaaacactgcatgttctcactcataggtgggaattgaacaatgagaacacatggacacaggaaggggaacatcacacaccagggcctgcagtggggtgggggtcggggggagggatagcattaggagatatacctaatgctaagtgacgagttaatgggtgcagcacaccaacatggcacatgtatacatatgtaacaaacctgcacgttgtgcaaatgtaccctaaaacttaaagtataataataaaagaaagaaagaaagaaatctgctgcaaaaaggccatcctccctacattttcttttctacccctatgtgatgcttaaaataaatcttatttctggagatgtggctaattccctaacctagatgcaggaagaaaccttagcgactcctgttccaaagttctaaatccctcaggctgggagaataaagaaggagggaggagagaggagtgggccgtagggaggagtttctgaaactaattttctttgcagcttggcttctgagtatagtctaaaaagttggtgttggatccaatatcttgaccaggcttaggggttcatagtcacatctgtggcaacaatgaacagacttatgaacaggtcggtaaagaactccagtgtgtcttggcctagaggctccgcataggaatgagcagtagacggttggcttatcagagattgcagagagggaaatgcagtaatgtatcagtcaagatgtgatggggtataagaatctatcatcccaaagactccctaaaatctttagaacttggcttctgaataatctcttttgcaaattcctagaagagggaaaatcctagatctcctttttcattccctagcagagtgatctagttaggaaaaaatcaagttgaaaatccacgggaatacagaatgatatctctggtgtagttccagactctggtttggattatctatttcctttgttgctctcttcgggctgcataaaccagcttcctctttgcctctatgtgttctaccaagtacttactcccaaaaaagatgaagttagagtgaggataggggacactgtaatgacaagggtatagactaacagaaagaaaaacttaccaaatagattagtgtcagattgagtaaagcaaactttgacatgaggcacaatgctttaaattgctgcatattcccagaaatgagcctagtatccatcagaaaatgtatgcaaatccttataaaccaaagtcagagagagcttgttggttcacttcattccatgctgagctatcagcactgcagattttgaagatctcaaccacacccagatagagagtgatagtggatcccgtgtttctgtcgggggatgggagtagataaggaaaagtgtttactatttttaccagcaggggaaactacccagatgaaaatggtgctggatgctttgggcaaaaagccattcagagccataatcaactacgaagatggtcaggaatttagtgtatttgtagatcagatgatcagtctatggctttggaaaattgtgaacattagttgttgagccttataatgagaatgtgatgattaaatcaggtctactggatactatgaatcagaatagataacattgttagatataattacctagtcagagagcagagatgaagtcaggaaagcaaaagataagaaataacagaagtcttctggtggcagagtggtggcttagcctgctggggcaaaatggagctcaaggccatgagcagatacaacagcccggtcaacccagctgtcttcccccatctgattgtagagcttttggccatcgacatgttcttcaccacctggttctttgtttacgaggtcacctctaccaagtacacttgtgatatctataaagagtatctccttggtggcctcactcttcatgggctttgaagtcctcttcctgatgctctgggttggcatctacatgtgagtgcccaagagtaacaaccaggtggcttcactgaatccctgcttttgtaaattaagttttctttctattgctggaagtgtcccgcctgttgcttataataaatgcagatgtatggcattaaaaaaaaaaaagaaataatagaagttaggcagggattggggcatgaaggttgaaaacaaggaaaaggagcccaaggaaatgcaagtgttgtaaaatgtgctaagtagatgtctgagtggcattcctccatgagagaaagcttaagggaagaaagagaccctgagtgtcttcaaaactcaaagttttacgaacagaatgattagtctggagaaatcatttttcatcaatacaggatctcaagtgtttccccacaacgaacccaacccctcacacacacacacacacacacacacacacacacacacacacacacacaccggtgagtggacagacatcgtttttcaagtcatgatgcagcagtattggaattacagttttttttggtttttgtttttttttacttcaagctatggtgttgagtacatgatcctaatcaccaattaattgttcctttaagcccttaacctcttgacacacatacacacacactctctctctcacacaaaagcgccacacacacaatcataaacacacatcaccaccactcagctccatgaggtacactcactacttttattaaaccaagcacagataccaagtttttgagtgtgaatgcagaaagaagatatattgaggtagatttttctcatagatactactaagattatattgtctggaatcttatgtgacacagaaaaagaacaactctgccatttggccatttgcttgtgtttggacttgtgaaggtctttccatcattctgttattggaaagcgggaaagtagcattttcatgaggattctattaaaaactagggaccatatgcaatacatccagactatatttagtgtacaatagaaagcaattaccatagcaattatgttccctagctgtcttctctctttgcaaaccccagcccccactcagcatgacatggcaggtataaaaataggcaactcagacccatttctgtaaaggaggagaagcttgtgttaggaatggaagaatgcctgggctggagaacagggcttcacaacagtgtagtgatagattcacccacatattatgtgatgtggacctctgagccaggtactatctcattctccatggttgcaataaggtcgattatagattcaataaaggaagaggtatctcaacactaaagaaagagtaaaattttcagggttcaacaagcgaccacctaagggcaaaatattttcctaaattttgacaaactttaagttcaaaaagctcatctagctatgacaaagtttgacatagttagatgagcttttgatctgtgcactttccctcgaccttgaccaccaatcttgacttcacaaaaccattggaatttggggtgatatggaggcaagccaaatgcagaaacaggaggtcatggtaaggctatgatgcagtttaggagctatgtgatgtgtcatttctgtgacaggatatgagagctgcacatctttctgtttagaaattcctgccatatttgtaattctcaatggtcagtctccttgctggactataaattcaactacatgccagctttaagcacagtgctttgaagagagtaggagcttaaaaaatattctgtattaaatgaaaaaataaactaagcgtgagaggtatttatgtgtctctctcttcctcttctcactccatcctcatgtgcatctctgaatatctctgattttgtgcactctaaggcagccctctaagctgtttgcccatccagcatatgacagaagactcttcaaagtgaatgatcaaagtcccttgtttacagggtccccccaccctcttccttcctgagcatgtgttctggatatgctgaagccaacctcacaggactttgttacctttcctaagtttctattggtgaatttccatttaatatagttttattaaatgattttagtaaataatttttaatcattgtagcttctatggtggatacacaaggagaagcagagagagagggaaaaaaatgaagtaacagaaggctacaaggggatttctcaagtaactgcttcttcttgtcattcttgtcacagcaatgaatcttgggcaaataagggacactcaataaaaccaaatgtgtcaataatcatgcttgtaataaccttgaattcaagtggtagcttatcacaactgctaaataacttttcttctttgtctggtgagttctgtagacatttagagtgtagggctggcaactgtgtttaaaataagttgtctattatatcaggactccatggaaacatctagtgaaccagaagggctggtggtgagaacagtgttattagaataccactggtgtttgccagctgtggaaaacatgggtatagagcatacactgatgccaaaggcaaaccaatgcatggctggtcccggcatggcaacaagtaaccaaatatgggatgagagacaagatcaagcatactgtagaaatcgctgtggagagatgcatttagatgaaaaggtaacccaattctggtctgccagtcagcaaccattttcctgtctatgcacaggataggatatggctgtactacctcgaagttttttcacaaagcatattgatacacaaaaacattatcgagatgcacatgacatcggtttgccatgacagggctcttggtgtgaatctgactactgtcttaacacacctccaaatgtgttgaggccctaatgagaaacatccctgattttattcaacccaaactgatacatttaaattgtcctgtaattatttaaaaaatagatataagcttttgagggcagatattataatccaggcatcacctccattacccacattgtctagcacattatagatgcttagtatgtgctggcttgatgacaggatgaagtttaagttgctaaccattcttagaggaactctgcttacctcttgggttctgaagggtctgactgaccagagaggcatgaagggggcaggctcagcatgatcaccagcactgagaaccacacaaactgaagaactgctaggtgctggctagtgggagacttaagaccaaccaaccaccctatggagcagccaggtaatcagcatgtttgggggctgttaatggaagagttgctgaggggtatgcttacttgtccagttgtgtgtgacttagaggtgaacccagtgggcaaaataagaaacagtatgtgaagaggatagagcaagccttaagtaggaagttaaggatgagggaaacaggaaggaaaatcagtaggaaagtatagaagacaaaggagaaagggccagagaaacagaaggaagaatctgaaaaggagctcaagggaaggttcctctgtgggtagcctgttaaagaaaaggctacattacagactcatgcctgtaatcccagcactttgggtggctgaggcaggaggatcacctgagggcaagagttcgagaccagcctgaccaacatggtgaaaccctgtctctaataaaaatacaaaaaaattagcagggcctggtggcagatgcctgtaattgcagctacacaggaggctgaggtaggagaatcgcttgaacctgggaggcggaggttgcagtgagccgagatcgcgccattgcactccagcagcctggaaggcaaaagcaagatgagaaagaaatagagaaagagagagaggtagggagggaggaaggaagggaaggaaaggaaggaagagaagaagaagaagaaggagaaggagaagaaaaagtagaggaggaggaaaggaaaggaaagaaggaaggaaggaaatcagggtattcacttgagattcaaagtctttagaataaaaattaaaatttgggaaaataagtttgtattgatgactaattccaatcccaagcacgggtctctgtgcaatgcaggactgggaaggtttaggcaggggtgctatctgattcatgagacaacaggcacaaagttttagtccctgcctggacttggtgtcatctcttgagcacatgcctaatggtctcctaacattcccctcccaaagtttgaaaatgcttccacctcccgctgcagtccatgaaccaggataaaattctctagcagcagagaccaaagacattctctcaagtctcaggaatgtggttctgaaggaagagaagctctgccacacatacacatgccaccttgcaaagccacttagtgacacagagttttagttatttcattgtgaactggaataaaatcattttgaaaggagatttttgaagttaaaagcattgccagaaaggagtcacaatccagaccctaagagagggttcttggatttcgtgcccaagaaagaatttggggcaaatccatacagaaaagtgaaagcaagttaattaagaaagtaaaggagtaaaataatggctaccctataggcagaacagtcctgaggactgctggttgcccatttttatggttatttattgatgatatgctaaacaaggggtggattattcatgcctccccttttcagaccgcttagcgtaacttcctgatgttgccatggcatttctaaacagtcatagtgctggtgggagagtagcagtgaggactaccagaggtcactctcatcacaatcttggtttggtgggtttcagccagcttctttactgcaaactgttttttcagcaaggtctttatgacctgtatcttgtgccaacctcttatctcatcctgtgactgagaatgcctaactttctgggaatacagcccagtaggtctcagccttattgtacccagctcctatttaagatggagttgctctggttcaaatgcctctgacaaaaggaacaaaaatgttgtttctggtatgctagcacccagaatagaggcacttgcacaatatatgcattcaaaaatgtattttttttcacttgtgctttctgcctatatctatttttatgtcctcatgcttaaatcttgaccaaggctatgcattttcctatccttactcagcagtttgtgaggaatcagacattcttcaaagtttcacttctaccagagtagagctacttctcttctaattatatcttacaccccacaactaacccaagcttcacttggttctttgctcctatggagacccaggctcactcagaactctctttctttgttttttcctctgccattcagatttgttgcatcttcaaccaataacttaactatgaaccagcatgaaaaatcctgttaagtgttctgtaggcttcttgaaacctattgtttcatgcttcttcatacagtcttatgcagtagttttgggaattaaacagtttggtttacaatcccaccttccacttattggctgcgtaccctatagcaaagcaatttatctttctgtgttttggtccactcatctttaagtggggataccaatagtacccacatggttgaattattttaatgattaaatacattaatatgtctaacgtgttcaatagtgcctggtccattgtaagtattatagaaatcattgctattattactataatcatcattgaaaattttgtgaaaatgagacaatttgacctttgggctgagaagatactctgtctagctctgacaaagaaaataaaaacctttaaaaagctctctcacaatcgtaatacttgaagttacacaagatattctaacataaagactttgtgttttattctcacatgcatcctgtgagaaagcagagcatagtagaggtttcagttttatctgtcaagagcaaaatttgaggtttctaaacattgagttactcaaaatattatgctttaaaactgaaggaagcaaaacctcagcataggccttctgaaagcttacgatggcttttctttttttcccccagggcaaagtgttcttaggagcaagatgttggaatttacaccattcttatgtggattaagagaggtttccttctgaggatgttggaagcctctgttcaggaactttttctttccggatcatgcttacagatctgattacacccaagaagcctaaattgtgtgtcagccaactagatgtggacaagatagtttttagcctccttctgggactagatattcattcaccaagatgagtgcctttgaagcagaatctgtgatagggtggttgggccacctagagacatatggccatgactagaatctaaggttagacatacagaaaggatgaagtctttaaaaataggcattcattcatttattcatccattcacacatataacctgagtccctactgattttctagtactgtactgaatgaggccaacatgatagaagaagatatgtatgcccatgtgtgtggggtagtagaaacaaagtcacggcttaacaaatattaattaaagttattattactagttagtggaatactattaacaataatattttagcagccactatttgcaaaatataacacttttaggagaattacatctattatacctcagtaaaactctatgaaacagactttttatatattttttctggataaaaaataaaatctgataatttgagacatttaaaaaagtatacaactagtaagtagttgtatttttaaaattttccattcactatcctaaatatgtctatgatataatttaaaaaattatatatactccatgtatattaaatataaagtaaagaccttttatccttacctttctatcctccctggagataatttccctttataatctgccatacatttctctgcaacttttctacacatttatatatacatatatgaacatactcaaataaatagtcctattggctggtagcaagggctatgtgtagcactgttatttccatgatgccacactaaaatcagtgctgcttgtctgcatttttgtgttacagtgaatgtagactaaaatccaaaataagtcaacagttgttaaaagtgatgacctcattggttttgctatcaacatagaaagaaagggaagacattttctcaggatttttactcaaggaaaggcagtggggaaagaggctttggtattctgtgtcaatctgtatcaacaagatcttcaaacctccctctgcatggccccaggagagtcagtgttccacaaacctctcctgccatcttatggtttgtacagcatgtgcaagctgcttctatagaaatgcatatagaaaatacaggtatataaatgctagaggctaccaagttgtaatttaaaaataatgctcataatcatcaatgtatttattattatcattaacagtcacagtcttttatagtaaatcctaaagttgaaggtttgaatgtttaatgctatgaaatattaaataagtgacgatagtatcttttatgctgactgtccaggattggaaatgctacagcaaagtgagataggcattttatgtatatcatctgcaaagactaaactaaaatagctgggttgtcaggtcagagcaatttacagggaaaattaaattcaaatcttcagaggatcatttgttggtatgtctctgtccaatttgagggcaataatttaatgccagaaaatatctattctttatctcactctctttctttcattcttactttctgtctttctccctttctcactctttctgtgtttagaaatgaataatagaataactaaatacatttatttaacaagcggtcattgtttagttgtttgtttatctaatgagaggcttctctattttagcaactactgggtacaaaaatacattggtgcatatattctctgttcctatgaagcttgtattttaacggaaaggaaataataaaaaagtgacaaaaataattacaacctcatatagctgctatgaaagaaagaaaaaatttgatgcaatagagaataacaaaatttatgtaagctagtgtgacaaatgcgggttctgagaggaggtaatatttcagctgtgacctgagagttgtagaggcaaaagaagtattgccatagtggtattggtcctggagctctggttcaatgagcagacagaaggaagagaaccatatgatcatacttcaggaaaaagacttacacatgattggggctacccaaagggactggtttttccaagagcagataatttgagtgataaaaatagtgattttgaacccttccttctgctagccctagctatggaccaccatggatattgaagtaagggctttgttttggaattactctccacacattctgaggatatacaagggcactgaaatattctagaaagtccatagcacattctgatgtttatactctaagccacacagcacctttccccggatctagggtctttcacattaggttaatttttttaaaactcaaacacagaagttcaaaaaaattgaacatataattctcattctctgtggctcataaacatttaatagagacattgatgaaactgtaaaaccctgagttgtaggccggagatataaaatttcaacataaagaatgaacaaaatgaccagaggcagaggtaccctgagagacagtgatagctgtatctaaagagtactgatattaaaaatagagaaaaacatatatctcattatatccaaagggttacataagttttaagagtggaaataacatgaaggaccctaaacaattaggaaacagaaatttgacttgcttcagataaaagcttttaaaatattttatctgaaacaagtaagcttgttcaaaaaatataggatatatgtgtacatagtgagatgattacttcaatcaagcaaattaacctatccatcaatacaacaccttccatagataccttttgctttttctttgtgtaagggcatctaacatctactgtcataacaaatgtttagtttacagtacagtattaagtcttcatgccatacactagatctctaaacttatttatcctatacagctgcaagtttataacctttgacctacttctccctattttctctttctttcttcccctttttacactgtttctatgcatttgaccttatttttcttttgagattccacatataagtaatatcatgcctttatttgtttctgtgtctggtttatttcacttagcaaaatgtactctaggtttatacattccccccatctccttttttaaggctgaataatattgtgatatcatacatacatatgacatatatcacaatatcatatacagacctgtcacaatgtctttatctgttcatctatatatagataccacttagattgtttccatgtcttggctattgtgaataatgctgcaattaacatgagagtgcagatagctctagaaaatgcggattttatttattttggatacatatacagcagagaaatttcttcatcatacaataactctatttttagttgtttgagaaacttccatacgttttctataatggctatgttaacttacattcccaccagctatgcacaagagttctcctttctccacagcctctccaacccctatctcttgtcttttttgataatagccatctcaacaggtgtgagtgatacttgtggttttgatttgcattttcctgatgattggtgatgtagtgcaccttttcatatgcctgctgaccatttgcatgtcttcagagaaatgtatattcagatcctttgcccatttttacttaggttactattatattttttcatatttagttgattgagttccttatatattttgggtattagacttgtatcagatatatgatctgtaaatattttctcccaaactgttccttttgatgattgttttctttgctgtgcagaaaatatttagtttgatgttgctccacttgtttatttttgcttttgttacctgagctctggcacattttacagaaaacaatttgaaaatttgtatgaaaccacagaacacccccaaatggccaaaacaatcttgagaaagaaaaaccaacttgatggcagcacacgttctgatttcaaattatattacaaagctatagtaaccaaaaaagtatggtactatcacataaatagacacatagaccaaattgaacagaataaagagcccagaaataaatttacgtatatacagtccagtaattctcaacaaggccaccaacacaataggggaaggatagtctcctcaacaaatagtgttgggaaaactggatatccaaatgcaaaagaataaaattggacctttaccttaagccataagtcaactcaaaatagattaaagacataaatgtaagacctgaaatcacaaaactcctggaagaacatgtatagagatagctgcttgatatcagtctcggcaattttttagatattgtcttgatttgaagaaaattttcactggaagtctatattgatcgattttttctttcacaaataaagttccagtttttgagccaagatggccaaataggaacagctctggtctacagctcccagcgtgaacaacacagaagacgggtgatttctgcatttccatctgaggtatggggttcatctcgctagggagtgccagacagtgggcacaggtcagtgggtgcagcacaccatgcaccagccgaagcagggtgaggcattgcctcacttgggaagcacaaggggtcatggagttccctttcctggtcaaggaaaggggtgacatacggcacctggaaaattgggccactcccacccgaatactgtgcttttctgacaggcttaggaaatggcgcaccaggagattatatcctgcacatggctccgagggtcctacgcccacggagtctccctgattgctagcacagcagtctgagatcaaactgcaaggtggcagcgaggctgggggaggggcagccgccattgcccaggcttgcttaggtaaacaaagcagccaggaagctcaaactgggtggaccccaccacagctcaaggaggcctgcctgcctctgtaggctccacctttgggggcagggcacagacaaacaaaaagacagcagtaacctctgcagacttaaatgtccctgtctgacagctttgaggagagcagtggttctcccagcacacagctggagatctgagaacgggcagactgcctcctcaagtgggtccctgacccctgacccccgagcagcctaactgggaggcacccccaagtaagggcagactgacacctcacacggccaggtactcctctgagacaaaacttccagaggaacgatcagacagcagcattcgcggatcacgaaaatctgcggttctgcagacaccgctgctgatacccaggcaaacagggtctggagtggacctctagcaaactccaacagacctgcagctgagggtcctgtctgttagaaggaaaactaacaaacagaaaggacatccacaccaaaaacccatcggtacatcactatcatcaaagaccaaaagtagatacaaccacaaagttggggaaaaaacagagcagaaaaactggaaactctaaaaagcagagcacctttcctcctccaaaggaaagcagttcctcaccagcaacggaacaaagctggatggagaatgactttgacgagctgagagaagaagacttcagacgatgaaactactccgagctacaggaggaaattcaaaccaaaggcaaagaagataaaaactttgaaaaaaaatttagatgaatgtataactagaataaccaatacagagaagtgcttaaaggagctgatggagctgaaagccaaggctcgagaatgacgtgaagaatggagaagcctcaggagctgatgcgatcaactggaagaaagggtatcagtgatggaagatgaaataaatgaaatgaagcgagaagggaagtttagagaaaaaagaataaaaagaaatgaacaaagcctccaagaaatatgggactatgtgaaaagatcaaatctaggtctgattggtgtacctgaaagtgacggggagaatcgaaccaagttggaaaacactctgcaggatattatccaggagaacttccccaatctagcaaggcaggccaacattcagattcaggaaatacagagaacgccacaaacatactcctcgagaagagcaactccaagacacataattgtcagattcaccaaagttgaaatgaaggaaaaaatgttaagggcagccagagagaaaggtcgggttacccacaaagggaagcccatcagactaacagcagctctcttggcagaaactctacaagccagaagagagtgggggccaatattcaacatccttaaaggaaagaattttcaacacagaatttaatatccagccaaactaagcttcataagtgaaggagaaataaaatactttacagacaagcaaatgctgagagattttgtcatcaccaggcctgacctaaaagagctcctgaaggaagcactaaacatggaaaggcacaaccggtaccagccactgcaaaatcaggccaaaatgtgaagaccatcaagactaggaagaaactgcatcaactaacgagcaaaataaccagctatcataatgacaggatcaaattcacacatacaatattaactttaaatgtaaatggactaagtgctccaattgaaagacacagactggcaaattggataaagagtgtattcaggaaacccatctcatgtgcacacacacacataggctcaaaataaaaggatggaggaagatctaccaagcaaatggaaaacaaaaaaaggcaggggttgcaatcctagtctctgataaaacaggctttaaaccaacaaagatcaaaagagacaaagaaggccattacataatggtaaagggatcaattcaacaagaagagctaactatcctaaatatatatgcacccaatacaggagcacccagattcataaagcaagtccttagagacctacaaagagacttagactcccacactttaataatgggagactttaataccccactgtcaacattagacagatcaacgagacagaaagttaacaaggatatccaggaattgaacacagctctgcaccaagcagacctaatagacatctacagaactctccaccccaaatcaacagaatatacattttttttcagcaccacacaacacctattccaaaattgaccacatacttggaagtaaagctctcctcagcaaatataaaagaacagaaattataacaaactgtctctcagaccacagtgcaatcaaactagaactcaggattaagaaactcactcaaaaccactcaactacatggaaactgaacaacctgctcctgaatgactactgggtacataacgaaatgaaggcagaaataaagatgttctttgaaaccaatgagaacaaagacacaacataccagaatctctgggacacattcgaatcagtgtgtagggggaaatttatagcactaaacgcccacaagagaaagcaagaaagatccaaaattgacaccctaacatcacaattaaaagaactagataagcaagagcaaacacattcaaaagctagcagaagtcaagaaataactaaaatcagagcagaactgaaggaaacagagacacaaaaaacccttcaaaaaattaatgaatctgggagctggttttttgaaaggatcaacaaaactgatagaccgctagcaagactaataagaaaagagagaagaatcaaatagacacaataaaaaaatgataaaggggatatcaccaccgatcccacagaaatacaaactgccatcagagaatactacaaacacctctacgcaaataaactagaaaatctagaagaaatggataaattcctggacacatacactatcccaagactaaaccaggaagaagttgaatctctgaatagaccaataacaggatctgaaattgtggcaataatcaatagcttaccaaccaaaaagagtccaggaccagatggattcacagccaaattctaacagaggtacaaggaggaattggtaccattccttctgaaactattccaatcaacagaaaaagaaggaatcctccctaactcattttatgaggccagcatcatcctaataccaaagccagaaagagacacaaccaaaaaagagaattttagatgaatatccctgatgaacatcgatgcaaaaatcctcaataaaatactggcaaaccgaatccagcagcacatcaaaaagcttatccacgatgatcaagtggacttcatccctgggatgcaaggctggttcaatatatgcaaatcaataaatgtaatccagcatataaacagaaccaaagacaaaaaccacatgattatctcaatagatgcagaaaaggcctttgacaaaattcaacaacccttcatgctaaaaactttcaataaattaggtattgatgggacatatctcaaaataataagagctatctatgacaaacccacagccaatatcatactgaatgggcaaaaactggaagcattccctttgtaaactggcacaagacagggatgccctctctcactactcctattcaacatagtgttggaagttctggccagggcaattaggcagaagacaggaaaaaagggtattcaattaagaaaagaggaagtcaaattgtccctgtttgcagacgacatgattgtatatctagaaaacccccttgtctcagcccaaaatctccttaagctgataagcaacttcagcaaagcctcaggatacaaaaccaatgtgcaaaaatcacaagcattcttatacaccaataacagacaaacagagagccaaatcatgagggaactcccattcacaattgcttcaaagagaataaaatacctaggaatccaacttacaagggatgtgaaggacctcttcaaggagaactacaaaccactgctcaatgaaataaaagaagatacaaacaaatggaagaacattccatgcttatgggtaggaagaatcaatatcatcaaaatggccataatgcccaaggtaatttatagattcaatgccatccccatcaagctaccaatgattttcttcacagaattggaaaaacgactttaaagttcatatggaaccaaaaaagagcctgcattgccaagtcaatcctaagccaaaagaacaaagctggaggcatcaggctacctcacttcaaactatactacaaggctacagtaaccaaaacagcatgttactggtaccaaaacacagatatagatcaatggaacagaacagagccctcagaaataacgacgcatatctacaactatctgatctttgaaaaacctgagaaaaacaagaaatggggaaaggattccctatttaataaatggtgctgggagaactggctagccatatgtagaatgctgaaactggatcccttccttacaccttatacaaaaattaattcaagatggattaaagacttaaacattagacctaaaaccataaaaaccctagaagaaaacgcaggcattaccattcaggacataggcatgggcaaggacttcatgtctaaaacaccaaaagcgatggcaacaaaagccaaaattcactaatgggatctaatgaaactaaagagcttctgcacagctaaagaaactaccatcagagtgaacaggcaacctacacaatgggagaaaattttcacaacctactcatctgacaaagggctaatatccagaatctataatgaactcaaacaaatttacaagaaaaaaacaaacagccccatcaacaagtgggcaaaggatatgaacagacacttctcaaaagaaaacatttatgcaaccaaaagacacatgaaaaaatgctcatcatcactggccatcagagaaatgcaaatcaaaaccacaatgagataccatctcataccagttagaatggcaatcattaaaaagtcaggaaacaacaggtgctggagaggatgtggagaaataggaacacttttacactcttggtgggactgtaaactagttcaaccattgtggaagtcagtgtggcgattcctcagggatctagaactagaaataccatttgacccagccatcccattactgggtatatacccaaaggaatataaatcatgctgctataaagacacatgcacacgtatgtttattgcggtactattcacaatagcaaagacttggaaccaacccaaatgtccaacaatgatagactggattaagaaaatgtggcacatatacaccatggaatactatgcagccataaaaatgatgagttcatgtcctttgtagggacatggatgaaattggaaatcatcattctcagtaaactatcgcaaggacaaaaaaccaaacaccacatattctcactcatagatgggaactgaacaatgagaacacatggacacaggaaggggaacatcacactctggggactgttgtggggtgggggtgcagggagggatggcattaggagatatacctaatgctaaattacgagttaatgggtgcagcacaccaacatggcacatgtatacatatgtaactaaccggcacattatgcacatgtaccctaaatcttaaagtataataataataataaataaaataaataaaaaaataaaaaataaagttccagtttattttttcaggtttccgttgtttcctctaataattttcttgtatgcaatgtgtctttttctatgtctgcttttaagattggcatacatttgttgtttatgccatttgtaagatatgcatttagttgtgttttattttttaattgacattgctcaaggttagctaaagatatgaattaatagattttatgtccagatgttgaaacattcagtcaataattcctcaaaaaacgtttaatccattttttgtttccttttagaattctaatttcacatatggtggacagcttgatactttcccatgagtctggctttctgggtttctctccctggcgtcctctctcatcatgtgatctccttgcatgcacttgctctttgtctgctttctgccatgtttggaaccagcatgagacctttatcagatgcaaccgcccgatcttggacttttaagtcaccagaatcatgaaccaaacaaaactttaaaaaaaaaaaataagctacccagactcaggtactctgttatagcaaatcaaaatatgcaaaatacactaaaactttagcccaacttggagtggggagaagagatggtttcccaaaaggggtctctctgaaaagttttcacaatgaaaatgaaaatcggttccctttcataatgactgaagagaggtaggatgttacgaaagaaggcgtttctgaaagagttgctgtgggaagatgtggagacttctctgtaaaccttccagactctctgtgcacacacagatgcaggtgtccagggaggcagggggatggacaaaatgaattgcaacatgaaaatttcttaggggctgtggaccagtccagaagacccttttggcaatcctaacttctgtgggtctctccagtctgaaagacccgcatcgatctcacaccacaaaatggagttcttctgggaaggacttgttctaacaggcctgagagtgaggtgaccttgtggccattttctgtgacagagacacctaaaaagagtctgttgtgagtctggagacattgagaaccctgtgagtaaggattttatttaggtctgtttctggtcagagtggggatttaaggcttggtcaatatgattaagactaaaggccacacacatagatttgtgtgagattaccatctgtaaaaatctgaaaaagctaagaaaacctatctctctccatcaattttagtttttatgtgtttgtaagatgtagatatgtctattttgtgcatgagagagaggaagatcatcctcaaaggaagaatgaactggttggcagctttcagctgtgtagtgggtattgaggacacgggaaggtggtgctggaagaaaagccacattttcttgtgccctggggatagtagggccttggtgctggtcagaatttaagcctatccttgggctgaatgctccccctggtggctacattggaaaaccacagcatgtgtacagaccttggggattcagttctcctgaaggaatctcctacttcaccaagcctggctcagtgggctggctaggtatcaattctggatagaggttccttaaataaaacttatactggccccttgaaagccaggctttccaccccaccatacccccaccccacctctctctctctgtcgctcgctcgctgtttctctctctctctctcacacacacacaaacaatattacatgcaatgaaaaccatttgcacattaacaaataggtacactgttacagtgacacttttcacttttagtaatggatttagattctttaataatgaattctaataccttaaaggttaaggcctgaatgcctcacactaatgtgttgatacttcaccttccccaaccatcatgcacccacattcacttcacctaatattcgcatgattacccacagtgatagagataggtccgaggacttgctccttcattgtccccatcatcctcctcttggcctccaggcttcagaaactacctctgccttcctagcctgggctagtgaccctattttggaaacttcgttgaacaatctaacatctttactcaatgtgagcttcataaaggcaagaccatgacatgttaatctgtctatcttcaagttcttgatcagagtttctcacaggacgcacttaatgcacgtcaatgaaaattgatgagaatgtttaatgtaatttcagtcacacttcaaagaggactattttgtgatatgataaaacaaatctaaaggtcatttagagcaataaagaatcaaaaatgctgagttctttcatttggttttcaaataaatctattgcttggaaactggtccttcaattatataattcagagaaatagaatataaagctattatacagatgttagtttaaaaaagtaagcaaatattagagatctctaaatggtaggttatccactaaacagtattgtttatctacgtaaaaagctgtcaattacatatctgcatccagctccatacaccaaaataacatctgtttccagtgcagactttaaatccttcctgcatattgttaacaatgtactctggaaaatatgattgttatctcctgcctttttaaacccaaccatcaaaatgtgtaccatgtttgacatgtcatataaactcattcagggtcttgcccctgcctacctctactgttttattccaaggtattaactctcttaaatgttatatttgatcaccggaaaatcttatagttctcaaaacacataaacaacttttcctcacctccatgcccttgcttacactacccctcctttttggaaatacctttctataaagccctatctgtggttgattcttaattagtcttcatagctcaggttggggccttccctggccctcacctgtgggccaggtgctacccacaaatattaatataattgccatgtccatctcttacattgcgctaagatagttgttttcctatcttatgtgtgatagatgcccctgaataatagcaatatttgctgttgctggtaataatagcagcattgttgctgttatactgtccttggctaggatcccagtgaaataggctaaaatcatgttcttaataaatgcaggattttctgaaatttttctggtagtggtgccctctcctacaagcctaaatgaagatgctcagctccttcctattgtaccgaagccagaaccttcctcataactacaatttaataagacatcctgctctctgcatcttgtcctatcaccctgactctcctacactctggccctaacaaccagttacttacccggtgtaaggtggtgccacttctgtctgggtgtggtctgatcacaatggcatgtcataaacttcatgggtctctgtcctggttttagatctgtatgccccgttttggagctcatccccacacaactctaatcaaccatgccctatttaaaggatgtaataccttgcttcatgccagtctccaagagtgtgtgtgtgtttgtggtggagaggttgtgtgtgagttttgaaagaaaagagaaatgtacacatgacctgatcacattaactcaggttctgtagcatagtctggggaagaagtacaagactatttttttttttctaaatgttgatggcatttgctaccagaaaagaaggaaaaaagttttgtaaaggctacttgttgtagggctcattgaaggaaagtccagtgcattcaaagatgaagtagagagctttgggaaagcctgagacactgacctggacatttgtttggggtaggattgaatatgcaagattgacttctaggtccaaagatatagaggctggcagagatggagggcaatttaattatctgcagtaaatggaaatataaaaatagacaggaaaatgagtgcaggagtgagagaatcttgaagtagtggtgattgtggtgcttcaaggcagatgtgcaatttaaaagccactgtgaacatcacatggataatcctcttcatatactacatccgacctctctggaaaacgacgggtccattactagtggataacagaagacagtaaataaaatgataagtgatatgaattgacttctttatgaaattaaaaataaacagataaggcagtagtacttttgttgcagcagatgtctgtgtagccaaaacctggggactgaatgctaaaaagttagggctcttcagcttcaggagacaggggtggagataaagaaagtttcctgcccataggattcccagccctggggaccctttgtttaccattaagttctcccagctggagccatggtctttaggaggataaatccttctgtgacagccacagccttgtgcctctcagtgacccttgtgtcatccttatctatactcttctttcttcctttggaacctactcattggcttcacatttttgttattacctgctggtgagtctcactactgtcttgtgccggggtttcaggagtgggtaattagggggacatgggagagaggagggagaaaatgagggaaaatgggaatgcataggtatcacaaaagcagtgagcccaaaaagacatggtctcagttacaattaaggcttttcccccaaatgtttgaatgtccttagccaaatggattccccacattccctgcactaagcctaatgggatttttttttctttgttttcttttgttgttgtttctttgtttgttgtttttagaaatgaggtctagctctgttacccaggctacagtgcagtggtgtaatcatagctcactgtaaactcaaaccggattcaagcaatcctcccaccttattcttccaagttgccaggattataagtgtgaaccaccatatacagcagtctgggccttagatttttcacttggaaaatgaagtcttagaaaccagggttctcacagaatctcttctgatattctcagagtctatgcacagaaccagagccagagaaagaacagaaaacaggaccttctcttgctggaaaagaggcgagctcatctgcagtattctgttaggaaggccaggaggcagggctgcctcactcccctgatgagtgcctgcatggccaggccagcccctccctggatcatgtctagaagtcaggatggcagaagccctctggtctctatactctttcctgccgagccatctggtatacacaccctctccttactctcatcagaaaaacagtcattcacttattcaacaaattattaaatgcattttatatgctggtccagttaacatagaaaagaccccatcctcaatctgcttattttaatccaaacaacaccttgtaacttccccagtatccaggatatggccttcgccttccaaaatcctcctctatcctactaaaaacaggcatgtttacagatgagtttgaccactgtggaaatgttctctaggggttcaaaaatgaataatctggttcaagtccttgtgtttaggtgcagcgtcttttgcatattctcctatttacaagaaacagtatcctccaccaatgtagttcattaaaaaataactaatattaaattcaaacaaaagaatatttagacacaggtgaggtagagagccaattactcattgtatactgaaaatctcttttcaggaattttctcctgtgatctaagatgaatctactctgccttgaatattttaattatgttgtaattagatgtaactgactgctctgagtggactcctccattgcttagtagacatgaaaaaatgactgttgctctcctatcatggataattatctctcttgctaggagaaatcccctaaagctttcttcccaagaggaagtatactttccaagagaaataatcccagccctgtcattgtctctgtatagacatcttgtttctaccagatccttctccctgtccatctcatcactctgaagttggtgaacacagagctgacaacagaaccccaggcacaaagaatcaggataagaggtgagtactttatttattcacccatttagtttttcatgcaaaaaaatatatatatagtggtacctaccacatcttagacactgtcaggctccaggggcctttagagaattccagtctaatcaacttaaaaaatgaattattaggttggtgaaaaattaatggcagtttttgccaatataaatttatgttctaaacatgtataataaagaatacgtataaatactacctataatatatatgttgtacaaagtatatatatgtgtacaaatatctaatatttttgtatatttgtttacatatataaatatacagacacatatatgtataccctatacttatatataaaaaatctataaagtatataaagaatatataatgtatatactaaaatgtatattctataaagtatttatgagtaaatctatacacttatatgttatttaaacttatacatatgtgtacttatatggatgtataagtatgttctatatatatatcaataagtatatataaatataaaaatataaagaatgtgtgtgtgtatttacaccttaatagtacattacaggtactacgtgagaacagagaaagatgtacctaatgctacagaaggaagtcaggagagatttgacagaagaagtgatatttgtactaagtcttaaaggatccgcaagtgtttactggttggaaaaacaggggtggtttttgccaagaaagcaataaatatagaagaataaaaacaagaaaagtatgtgtagggaattgaagaaaaaaatgatatgggtgtgttgactgggaaaagatgggtttggaaaggtgccaaaacaagaaggaccgggctaaagatggtgttacagggtgtttgaggctaccagggccatgcatagagagacaaaggttcatatcttatcctgattttcgctcactaccaggccttgggatgattgtttacctttttgtagttttctccttgtgaagtagtaataaaatgtttcatagttacatgaaatattcatgattatgtcaagcttttcacagcatctaaatcatgtatggcctcaataaattggactatcaccacagatcttttacaagtttgaactttattctaatgataggagctactgaagtactgaaaacagtgcagtgattcatagagttagtactttctgcataatctcggtggctgcagtagaggatggaccaagggaaggaggagcctggctttgcatgttgaatgacaggtcaggcaagcaggtgtggaaaagctaagaacaaggacattggctacagagatgaagatgaatagattacagggatagattaaaagaacttagttaaaaattagatacagaaagagggagagggttgagtagagcatcagctcaaaaatgttgtcttgaatggcaggaaatggtgaataatattataaaaaatgcataaatatgagaagaatcaggtgtgaaaagatggatgctgggctcaatattagacgtgttgagtttcatcagtatccttttggaaacacctagtgagaaggcagaaactcaggcctgatatgtaacggagttatctggactagagattaatgtctaagagccaccactgtataagtaataataataatagataatataatgaatgagaagttaaggtgttcaaggacagtaaactgaataacataaatatttgagcaatggaaataagagagtgcatagaagctatcacaaaaatcagaagagaaccagcagatcttggcattaagaatttctagagagagctctaaaaaggaaggcatggccagagcacacaactattgcacaaaaaaatcaataaaagcaggtatgattaagactctccattgcatttggcccctagaagtcactggtgaatttaaggagcattgctttagctaagtgggttttaaaaaaaacattatagggtggttggttgagtagtaaactgagaagtaaagaaatggaaaagataaatgtggactattttttaccccttgccaaagtgatgtaagccttatatccatgcagcacctctgctctcaactcgaagctcacaagtataataaaattcaaagtagcttgcgtgacctgcaagatcatacatgacgtagcatttagctgctacttcaagtggatttgccaccattccccaccttgcttcctccattgaatatacattggccttcttttgtcttttaaacttgtcaagctgctctctgcttcaggaactttcacttgttcttcctccttccttgaatgtttttccctaagatagccacacacttgccctctgattttgatttcttctctaaaattacctactcagagaggtcttctctgactaccctatataaaatgcatcactcttaccttcctcctttgctccctacttctttattgcattacattaccttgcattgcagtatgtatgtatgtgtttatttttgtctctgttctgtttctgttcattgtattttcagtacctaggtgtaaaagtaattgcagttcttgccattgaaagtaatggtaaaaaccacaattacttttgcaccaacctaatagaattatgtctgccatgtaatacaatttcaatatgtatttattgaatcaattaatgaataattattgaaataattgaatattgaaataattattgaaataagattaatggtaatgatacatatttaataatttattcaaataatatttaaaggattccaatgatatggtggctaaaaaagtcaatccctagagctaatattaaaattaaaaaagagacagtcatggtttatgtccacaaggaattcacattatagaagcaatacagaaattgacaatgctgcagggaaaatatcatggtaattagtgcatagtgaactacaggaacacataggagagggtattcaaactaaacttggggaatttaagaaggccttctgaaggacatcatatctaagctaaggtgggttatattagtagaagttaactagacaaagattaagggaaagctatttcaggaaaaaatgtttttattccaggaagaatgaaaatacaaatgtttacctatgagcaagcatactagataaactggaagaattgtttagtgtcattaacaccgtgaatatacagaggaaattaggatagataagaaaataggatatacacggagagaaaataaggtagggtcttgaatgtcattttaaaccttttttacttcattaaaaacttgtttatgtatacgtctctcttgctatatagtagtcaactgaatacagtagtacaaaagatgagtcactggaatagtcctgaaagagtgatctgaattagaatagcatcaatgaaggtgacggtgagtaaacagacttgaggtattcagtaaacagaaaccctaggacttggtgattggttgattagatactatggagagatgtgatatggagaagtctaacataaaacatgacatttgacttgagccactgagataatgaaaagtacagatgttgctagagtctggaaatcaaaagagagaaagacaagttctggaattatatatttgttatttatcaatatatggatggtaaatgaaatcatggtagtggatgacattaagaagaaataatagaatatggccaggaaattgccaaggatgggaagaactatacttaagggttgagcaataaaggcacaccagcaaagaggcagagaggaactgaaataattgaaatacagaggaaaactggtgagggcgaggttatcaaagaaagttcaataaagtagtgagattggcagaattcataagggtggagtagataatactaaaggtgatgatgaccatggtactgcttgtgatgttgtgaatgttagtgaagctgaagaattaataaccagaaatatccatttattttcagctcaatccccgaggaatgtcagtccaatattcgctcagtcctcaattcatgctgctatccaacattactcagtttagccccatattctatctcaccagctttcctggattggaaggcatcaaacactggattttcatcccctttttctttatgtacatggttgccatctcaggcaattgtttcattctgatcattattaagaccaaccctcgtctgcacacacccatgtactatctactatccttgctggccctcactgacctggggctgtgtgtgtccacgttgcccaccactatggggatcttctggtttaactcccatagtatctactttggagcgtgtcaaatccagatgttctgcatccactctttttccttcatggagtcctcagtgctcctcatgatgtcctttgaccgccttgtggccatctgccaccctctgaggtattcggtcattatcactggccagcaagtggtcagagcaggcctaattgtcatcttccggggacctgtggccactatccctattgtcctcctcctgaaggcttttccctactgtggatctgtggtcctctcccactcattttgcctgcaccaggaagtgatacagctggcctgcacagatatcaccttcaataatctgtatggactgatggtggtagttttcactgtgatgctggacctggtgctcatcgcactgtcctatggactcatcctgcacacagtagcaggcctggcctcccaagaggagcagcgccgtgcctttcagacatgcaccgctcctctctgtgctgtgctagtattctttgtgcccatgatggggctgtccctggtgcaccgttttgggaagcatgccccacctgctattcatcttcttatggccaatgtctacctttttgtgcctcccatgcttaacccaatcatatacagcattaagaccaaggagatccaccgtgccattatcaagttcctaggtcttaaaaaggccagtaaatgagtcctggggctaaaactccccctagaggcctataagaaggccccaaattggactgaaaatttggagtattgagtatatagcatgctcttaaagattttttgcccctgtcctaaataaaatatgggcaaatttatgtctggagttgtggctttaaaaaactgaacttctcttgcttagattttaatggctcctcctacagctgagaactggcatttttggtagcatcaaagctatccagaaggcaactttattgaaggtcatcatcaatgtaactaaaactaaaatgaaactaaataaaaactaaaaagaacaataaataccagagcacccagaggagagcctggcagagaccaggtaaatgccatttgctctaactcacctccggaaatacacctccttccatggttccttgggactgcttccatcttatctacctggccaagtttcttctcatctttttctatcctggtcagcagtaactttcagacccccaagtcacatcagaaacctcagaactcctgcattcttcctcaacacctgtttcaagcaacacccccccaaatttctaaggttgtgctctctcctgaccatattcctctagaagaagagactttgatcctatccttgactcctctcatctctgattttaccttacaacctcaagtctgacattaagctacagtcagtatttacttgtaggtgttttagttgtgtgatattgaacaatgacatgtaacgtgagaaagcttcagccaaggaaactcacacaaacatattgaagtcacaatcccattgctcaggaggaaataaactttacattggctgatcagcctgtccctacgagtgactaaatgcaatccttgcaggggtctcagctttgaaattgcttcctcaaggacattttcacagatagctcctccctttccaatggtaaagcaccaaatgctccatcggtttccttccacagtgccctgcatttcccgttgtaacatttgtcacacagtaatgtcctgtttatgaaggtgtgtgcatgtgtccattagaatgactaaatcaagatccctggaggaattaggcatgtcttgctcgccagtaaatgtatataaatacaatgcctagcacatgccatatactcaataaatattaaatgtatgcgtggacatatagatacataaagagggatccagagctaacagaagttctcttcttgtctcgaggaactcctcctcttcacattcagaagcccaagaagacacctttctgctggcatccatcaaggtggtatatcttcattgtcccagttctactttactcaggccctctggatcctcccacccattctcctacaggttaaaattaccatgaggccaggcacggtggcttatgctataatcccagcactttgggagaccaaggtgggaggattgctgaaggccaggagtttgagaccaacttcaggcaagaagattacttgagtccaggagtttgagaccagcctgaacaatacagcaagaccctatctctacaaaaaaaattaaaattagccatgtgtggcggtgcacgtctgtagtctcagctacctgggaggctgaggtgggaagaatgcttgagcccaggaggttgaggctgcagtgagccataatcacactactgcctgggtgaccaagtgagaccccgattcaaaaataaaaaggaaaacaaacaaaattacaaagcgaaatttaaaaaagaaccaaactctaaaaatatgtatgtatgtttgtgcggtttcttgtgtatgtttgtgtggtatctcatgtttgtatgtgtgggtgttatcagactctcaggcttgggagcccctctggaacccagcagtttctgcagccttacaggctggcactccttaaacataggttccattctaaactttaatttacatccacatagtaggccacattactcaatagcagttccgagacttagaatattcttctccatgttgagaggaaattcctattctatagatctcatttggtagaatggggtacaaaaaatttaggatttggatttagattagcactgaagtcccattttgcctcttattaacaaatagaccactgacatctaaatttcattttcaaattaggaaatacgtacaggtaataacatatttgaaaacttctaccttactcaaatttaaaatgcaaattaacatatcttaatttgttactaaacgaatattgaagaatagagttaacaatcaatatctggctgggcgcggtggctcacgcctgtaatcccagcactctgggaggccgaggcgggtggatcacgaggtcaggagatcgagaccatcctggctaacacggtggaacccagtctctactaaaaatacaaaaagttagccgggcatggtggtgggcacctgtagtcccagctactcaggaggctggggcagcagaatggcgtgaacccaggaggtggagcttgcagtgagccgagatcgtgccactgcactccagcctgggcaacagagcaagactccttctcaaaaacaaaaaaaaagaaaaataaataaatatctgtgctgttaagtatgtggtaaaagaggtattttcacataccagaatgaaaacataatttaatttgccttttataaaaaacaaaatacatcaaaagacttgaaaatattcatgctctgtgtctcagaaatgccacttctaaaaatctgtcctaaataaatgataaattaaaaatttaggatgtaagctgtttgtggcaaaatttttttcctgtttgctcacagttctaaatccatctcctaggtcagtgatcaataaatatgtgttgaactatttaataagtgaatattataatttgtgttattgttcataattttaagaatgtaagcatacaaaatgtctagaataaaaatattacataaatcaaagcatattcatttgatacactattattaaaatgacatttaaatgcttaggaaactgttggcaaaatattaaataaaaataagcaaaattaggtacagaacaatcactatgtaaaaggctataaatatttgtatcaaaagaaaaacagctgttatatataatcttattttctatatagatttctctatctttgccgtatacaaattttctgaagaagacatttcggttttataatctaaaaagagcattttacaatgactataaaaagttatatacgattatgctgaagatgacaatgaagatgataattatgatcatgataaatgctaatgtttattaagcatttaactcacggtagagagggctgagtactttttattttcattattttacattatttcatttaattttctcaccaaacctgtgaagtagggaggtattattattttcaatgttttaaaattaggaaactgaggctcacagaggaaagcaactttccttagttaaatcattaatgtaagtcagaactgaaattcaatatcaagcgcatctgattttcttaaaccattatgctggactcctctccaaacaggaccactcgtttcagggccatgttttccatgttatactgaaggaagtcccatcattggcttctccctaactttttgttccctttcctagaatatgttatctatttttccatttagtatcaggaaaagatagcaacagaaaacagtaacataaaattattgtattaaatactttttaatagacttgattttaagagttatagattcacagaaaaactcagtagaaggtactgagtaccttctattttgcatatcatggttttttaagcacatattataacctaggtattattctaagggcataatacactataagtcactttatcttgacaataaccttatgagatggatactactagattacccattttacagataagtacactgaggctcagagacaaaatatcttgcccaatattataccaagtttgacagttctgactgtggtgcttgtagttttaactatgctccactgattcaacaacaacaacaaaccaaaaaaaacataaaatcagccaaagctgtacatattcctgctaatgacagtatctgctttaaatcatctggcccattcctcagcacaagcctatattcctgcaggcaaaaatctttacaactatcccgttatttaatatccacaagcctctctaagcctttgaaattgatactgtatttgtaaaacacagatggctcatgtaattgaagttcacagaattttatgttttgctttgtgacaactctgagcctttgtacatgttttcccctctatctaaaatgttacctattttgaatgatagtgcagacattagtaaggaaagcttgctaaatatttgtatcacctgggaagcctgtttttgcttcatcaggggacgttagtttttttcacatcaacctcctgcagaagacaatgctttctgaaagacagagtttgtgtcttattaatgcttgcattcaaatatctgacccaaagcttgtgatctttacatacttgctcagtgaatgacagtgaataactacctggttgtaaagactgtctcaaggggacttttgtctgggaaaagaaaagaaagacaaaaaagaggattgagaagcacccaataaattttcttatgaagttggcagctggggagagaagacagtcaaggatcctctggctcactgaaatacctcctagaggtactcatggttcactaaatttccatttaagataactgggcatctcaaatgctttggtctaggaggatgctaatccctctttgacattcatcaagtctgcgtccatctagggagattcctttgagggccaaagacccaaggaagagagacagctttataagtgccagtgcagcccacgtagaacagcatcctgagtcaaatggaagatgctggcatggagtggaagggctgcatgagaaagaagctacagagaagaaaggaccagtaagttgctgaaggtcctttgttttgtggataaaggaagtcattggagtgacctctctaatatcccttatctagcatgactatatgcagggttatggaatagggcagcttccaggaagatggccaatctgttgttagggctgctgttctatcatatctcccgtgatgtttttgatggggaagacagatctggacttgttactgggctatgccttgtagagaatgatacagggttgtggcaggcaaggaaacataatctcagcaattgctccaattgatgaagcttctaacatttcagagtgctttcctccacagccccattaaacctaatcatttctctcgaaaagaggcagggcccatgtggaaatctttcaacatagtaaaaaagctaaggtttagaaagattcagtaactttgccaaagccatatggaaggattgtccaaaaacctgtgcaagagctcatggcttcccactccaaataccttacgcttcattgttgtcagattatttttcaatcttttcttagagctcactgcaacattgctcactggaatgctggaaagtacaactaataaaatgtgtctattgagtatttgcttctaactgtactccatttaaaattgcatatgaatggctctctaatctatggagtaggtagaattgtctcaatttttcagatgaagaaactaagattaatcagatactttgcacaatcatagagtgaagagctattgaagttatgattgtaatacagatctggtcccagagacactgctcttaaccacactgcactgcctaatgaaaatgtgcctaggctgcaagacagggatgccctctctcaccactcctattcaacatagtgttggaagttctggcccgggcaatcgggcaggagaaggaaataaaaggcattcaattatgtaaagagaaagtcaaattgtccctgtttgcagatgacgtgattgcatatctagaaaaccccattgtctcagcccaaaatccccttaagctgataagcaacttcagcaaagtctcaggatacaaaatcaatgtgcaaaaatcacaagcattcttatacaccaataacagacaaacagtgagtgaactcccattcacaattgcttcagagagaatataatacctaggaatccaacttacaagggatgtgaaggacctcttcaaggagaactacaaaccactgctcaaggaaataagatacaaacaaatggaagaacattccatgctcatggataggaagaaacaatatcgtgaaaatggccatactgcccaaggtaatttatagattcaatgccatccccatcaagctaccaatgactttcttcacagaattggaaaaaactactttaaagttcatatggaaccaaaaaagagcccgcatcgccaagtcaatcctaagccaaaagaacaaagctggaggcatcacactacctgatttcaaactatactacaaggctacagtaaccaaaacagcatagtactggtaccaaaacagagatatagaccaatggaacaaaacagagccctcagaaataatgctgtctatctacaactatctgatctttgacaaacctgagaaaaacaagaaatggggaaaggattccctgtttaataaatggtgctgggaaaactggctagccaaatgtaggaagctgaaactggatcccttccttacaccttatacaaaaattaactcaagatggattaaagacttaaatgttagacctaaaaccataaaaactctagaagaaaacctaagcaataccattcaggacataggcatgggcatggacttcatgtctaaaacaccaaaagcaatggcaacaaaagccaaaattcactaatgggatctaattaaactaaagatcttctgcacagcaaaagaaactaccatcagagtgaacaggcaacctacacaatgggagaaaatttttgcaatctactcatctgacaaagggctaatatccagaatctacaatgaactcaaacaaatttacaagagaaaaaaaaccccatcaaaaagtgggcaaaggatatgaacagacacttctcaaaagaagacatttatgcagccaaaagacacatgaaaaaatgctcatcatcactggccatcagagaaatgcaaatcaaaaccacaatgagataccatctcacaccagttagaatggcaatcattaaaaagtcaggaaacaacaggtgctggagaggatgtggagaaataggaacacttttacactgttggtgggactgtaaactagttcaaacattgtggaagtcagtgtggtgattcctcagggatctagaactagaaataccatttgacccagccatcccattactgggtatacacccaaaggattataaatcatgctgctataaagacacatgcacacgtatgtttattgcggcactattcacaatagcaaagacttggaaccaacccaaatgtccaacaatgatagactggattaagaaaatgtggcacatatacaccatggaatactatgcagccataaaaaatgatgagttcatgtcctttgtagggacatggatgaagctggaaaccatcattctcagcaaactatcacaaggacaaaaagccaaacaccacatgttctcactcataggtgggaactgaacaatgagaacacatggacacaggaaggggaacatcacacaccggggcctgttgtggggtgggaggagggggcagggatagcattaggagatatacctaatgttaaatggtgagttaatgggtgcagcacaccaacatggcacatgtatacatatgtaactaacctgcaccttgtgcacatgtaccctaaaacttaaaagtataacaaaaaataagttagaaaaaagaaatttacatatattagttatttaaatatgctggataaatactattacactcatttcacaaagatactgactctatatctttgcttgtttcccttaggttctctggatattgagagaggctaatgtaattacctgggtaattgctcctcagggaacctaactttctccccattactctactcctagagactctgatcagctttttcaaaaaatgggcagcattccagccccaggactaagaagatatgaatgccacagtggcagggacttgctgaagtgagcttccccatcccacctgaggctcagaggccagtttcacttgtggtgagtgcacaagcccatgatccctgatatggcttggctctgtgtctccacccaaatttcatattgaattgtaatccccataatccctatatgtcgggggagggaccaggtgggagattattggatcatgggagcagtttcccccatgcagttctcgtgatactgagtgagttttcatgagatctgatggttttataaggcagttttccctcttcttgctcactctctcttgcctgccaccaagtaagatgtgcctgcttctccttctgccataattgtaagtttcctgaggcctccccagctatgtggaaatgtgagtcaattaaacctcctttgttaataaattacccagtctcaggtagtatctttagagcagtgtgagaatgaactaatacaatccccaagccctgccttctgaagcagcattcaggactcccaaccccatgtcacagtgtgaagcccttagcatttttcctaagacagtagtcacctccctagcttcttgaacctgtctggcagaaggagaggaatcacatcctaaattggtggcagatggaaaacaaaacaaaaacaccagagcacatcatgaattcttgaaatagttttgccatcatattatcttgggttactcacaaaatgcttatgtctggtttatatgctcatctattaagtgggaaattcttgtctccttgtttacctcacagatgtggtctgagtatcagtgagccaataacaaggaaagacaattattaataaaaagttggaaataagctgactgtgattgactcctgagaattcctgaaagagatatagagtggagagaatattaacattcactggttgctaaaggctcacattaaatatttagagccagtccctgaggtaagtattaacatctttatctttaaaaacaaagatactaatgtgcacaaaggtaaagtacgtaaagttataccgaacataagattcacctccaattctgtccagctccaggggtacagtcatcactgtcccacattctactttttttctgatttgttgtgtcctattatactgggctatagactacatgatcccttttgtaacctttcaagctaaaatgctcttgtcaaacaaatcctaaactcaggagaatgattgtgttttaagatctctttcaaggagatctgacccttatctggcggtagagactctggagatggaaactgagaaggatgcaaaaaaaaaaaaatgcaagaaagaaaaaaaaaggaagaaaacaaaagagaccacagacaggcagagaaggcagaggaggagagactctagtttcaagtatcagtcaagatttgtttcttccaatatccggttatttgaggtgtggcaggcaagatacagggtgcagtgggatcaaggattcagtaaggcagcacacgggaagaacagctgctcaatccagaggcagatcaatatttggtctatttaaagaactaagaaggctatgttgagcttttggaggtgaggaaggaacataagggcataagaatgcagaagagaaatgtttctcattttcagccataagatgttctgatgtgtgatcatttgttaaggtcaataatttgcccctgaatttccctgccctacattttaacatagcccacagcacagagcttttcctaagctgataatctactatgttacgttgtatcagagcatggtaagtgtccaaggatcttgtatttagtctatttagtcaggcaattaatttttttctttccatattttcatgatagcaaaaatatgaaaaaataaattattttaatatcctattacatctacagtttttattttctccatattttattttagtttttgtcaaagtgccatattatatgcccactgccactgccatgataatttcccctcttttttttttcctgcactacattgcatgcaacttagcctggaaattttctactaattcttaggtcttagctgaaatgccactttccaaggaaagcttttcctgacttttaagaataaattgggtttttccctttaggaccctctcaaagtatcttgaacatttcctttgtagtacttaatataattgcaaccagcttggagataagacttcagcataggtgacgactgtatttgaatatctgtggaagaagatttgttctctgtgagctgtggttgaaagttgcagagattttctgagtaggtctaggactctgtgttgccttggtcctgcaaggtccttgacatagaggtgtgctcactggttatagatctgcagagcaaagaagaacttcataataaccattacggaatagtgaggtccctgttgatgcgtaagttcagcagtggctgaatggaaagttcatacaagaatcagattttcagcacatgcgggaagcatgtttgttcgtgtgtgaataggtaagcaggtgtgtctgtgtgtgtttgtgtgcatttgggtgaatgagttgaaaacaatcttcagaggtccttcctaccatgctagtctaggattctaatgttataactgctgacctagacaatgcttatctcaaaacacacccaatccaggcaggtggttttctctttccctctattgccttcctctcctccccaggaaaagaacatccttgaaaatctgtttagatttccactgttgttgccgtagtgtattcagcagtgtgtctgagctagaaagaaaaagtcccaatggataaggtaagtttctttgagaactgttgagtcaacagattgtggatgtgatcgttgacagaatattttcatgaaccttaaagtctgcacacacatccacgaacgtaggttccttctccttcctgaatcttccatgcctttgcacataatctttctagttgactcctagaattttcaaaacatgggacagctagcccagtgtgggtccaaattctatgcttttctagtttaattctctgccacttgctccaggctctggccactgccactatctcagccttgcttaattattcatacaattatattcattcttcaggtaatttttagctctttttatataccatgctatagaccttgtctttgtatatttaccaataaaatattttcacctattcctgatattattccatatcttattttgggattgcttacatttctctgtctccccagcagctttttagggccagacatctccacaccaactcaaggcagtcatttctctctaagttgatccaaggtgcactacaccttaaatgcataatctttcttttctttctttttctatcattccttccttccctctttttcttctgctttttctttttccttccttccttttctctctcttccttccttccttttctttctctctctctcttctttccttttcttttattattctttcctctcttctttccttccttctttcctccttccctccctcccgcttgctgttctctttttctttcttttcttttctcttcctttttcttttgtctcatgctgttacccaggcataagtgtaggcgtgcaatcctggctcactgcaacctttgccttctgggcccaagtgatcttcccacctcagcctctcaagtagctgggactacaggcacactccaacaagcctggctaatttttgtattttttttagtagagacagagtttcgccatgttgcctaagctggtctcaaattcctgggctcaagcgatctgcctacatcagcctcccaaagtgctggaattacaggcatgagccactgcacctgatcagacacataattttctttctgcctataatgtaatataattttctagaacataattttctatctgcctatgacagaagctgtagcactctccatactggaaatttcttgatggtggtcatttgtcagtttttagaaataagaagtttggccacataaatctgtgagtttgcttttttcttcccttccctcagtgcccagttgtctttcttcataatgatgtcatctcactagtttgtttctaattttcaaggtggcactgatccctgaggatgatatgtcaacatgaaaatttctaataactctttggggtttttacctacgactttcattttggttggcatcccagggctggagtcagagcacctctggatatccgtccccttctccctgatatacatcatcattttccttgggaatggcatcattcttcacgtcatcagaacagatattgccctacatcaacccatgtacctcttccttgccatgttggcactggccgaggttcgtgtctctgcatccaccctgcctacagtgttaggcatattcctttttggaaatactgaaattagtcttgaagcttgtctttttccagatgttctccatccattctttatccatgatggagccagctgtgctgctggccatgtctttggaccgctttatagccatctacagcccactgagctacacagctatcctgacactgcccagggtctttggcacaggagctattatcgtactgaaaagcattatgctcatggctccgttgcccattctcttatggcgtctgcccttctgtggccacaatgccctctcacattcctattgtctgcaccccaatcttatctatcttgtgggaacatttctgttaacaatatctatgggattttcattgttacctctacttttgggctggattcgttgctgattgtgatctcctatgggctcatactccacactgtattgggtattgccactggagaagggaggaagaaggcactcaacacatgtggctcacacgtctgtgctgtgcttgcttactatgtgcctatgattggcttgtctatagtgcaccgccttggacatcgtgtgtcccctctgctgcaagccatgatggccaatgcctacctcttcttcccacctgttgtcaatcctattgtctacagcattaagaccaaggagatccatggtgccattgtccgaatgctattagagaaaagacgcagagtgtagccaaaaaccatagtaggaagaaatgtttttgtttgtttgcttgctctctataataacaggtggccctagattgcatgttatgcgattgatatcaccttaaaacatggcgtctaacaggaagttctctatagtctgtccatgaactgaggtgagggtgcaggtagaggtgaattatgtgtgacagaacagtacacaaaagtgaggcttttttaaaacatgtggtatgaggttttcttcattaccttgcatacctggagcaggaatgcagaaaagattgtaacacagcactcctaatgaggaaaaggcacctgggagttagaaggtgtaatgggaaatctattgagccctctgtgctaggaagagaggaagtgaaatgtattacattgtcttcagttattgctctctgaattcaataggagagaaacataccagctagttcaaaggaggcttccactacaggctatgatgtggcattcacccaacctcaccaaggccccaacttggaagtcttgaagactacaaatcttgtttattatgcaaaattctgggattctcccatccaggttgtgagaggtgaagccagctgggcttctgggtcgggggcggggggaggggatggggcggggagggcggggggcggaacttgaagaacttttctgtctagctaaggattgtaaatgcaccaatcagttctctgtgtctagctaaaggtttgtaaacacaccaatcagcactctgtgtctagctaatcgggtggggacttggagaacttttctgtctagctaaagggttgtaaatgcaccaatcagcgctgtgtgtctagctaaagattagtaaatacaccaatcagaactctgtaaaaacgcaccaactagtgctctgtgtctagctaacggtttgtaaacacaccattcagcactctgtaaaatcccaccgatcagcactctgtaaaatggaccaatcagcactctgtaaaatggaccaatcagtgctctgtaaaatggaccaagaaacaggatgtgggcggggccaaataagggaataaaagctggctgcccaagccagcagcggcaaccacctggggtccccttgcacgctgtggaagctttgttcttttgctcttcacaataaatcttgtggctgctcactctttgggtctgcactacctttatgaactataacactcactgcgaaggtctgcagcttcactcctgaagtcagcgagaccacgaatccaccagggaggaatgaacacctgcagatgcaccatctttaagagctgtaacactcaatgcaaaggtctgcggctttactcctgaagtcagcaagaccaggaacccaccagaaggaagaaactctagacacatctgaacatctgaaggaacaaactctggacgcaccatctttaagaactgtaacaatcaccttgagggtcctcggcttcattcttgaattcaccaagaccaagaacccaccgttgcagaaactcttaaagaggcaagcatcctctttgtagacattcatattttctaccttgttggatgctcttttgcaggcatttaaaatgatgtaaagcgtttatacttacattttcagggaaagaaattaagatttttaacataaaatatatactaagaactttattattttcatcacttcctatagcaactctaagaaataggattaatgtaattattacttttcagatgaaaaactgatgtttacatacagtaaacatcttgctcaaatctatgcatctaagacctagcattggaatgtacctgggtaagacttcagagtctgagctcttaatgcctaaattatgtcaactaagcaagaaataaagcctttgatctcattagtagtcagtcaagtagaatttattgagcatactcaatgagtcaggtatacttctagaccctagagataaagcagtgacaaaagatacaaggtttcttccactcaaagaacttagaaagaacttttttttttttctacattctctatctctgctgtacatttcactttctggaatgttgtttagaaaaaacttttaaattggccttataatgcttcttatacaaataacgacacacctataaagcttctgaatataaatttaaacattttaaatagtttgcttgcattctgcattgtaaagatgtcaataattgacaaagagtgcttttacaagaagtcttaatttcttgcacagttaatggtgtgagtctgcctccaggtttccatgtatcctgtttctagagattctgacctggggatctgcagttgtctataaccataccctaaattaatagcccgctgataggtgacacaactccatagaggacaatgcctccaaattatcaatggaaaccaagcaagtaaatccacaagaagaatcatttcatcaatggccagataaataagacagtgattatttcctgagatgagaagagaagaaacatctgagtaacattagagtatctgtaaaaagatgtcccacaactagggaggtacaggaaaagacgttaggaccagattgttaaatggcttaacataaaatgagaatcttaggaagtcatttccattttctttctgagattgcatagtgaattctcagccttcttaaatattattgctatatttagtaaatgtatggccattggaaatactgaagttctgtaaagataacttctccttagatgtttctcagattatagccaatttactgaatatcttcggcttcattctagaatggatttctttatatgtaatgctcctcccaattctattttttccaatctttatcctgaagtccagtctcagagacaacatcaggttcaggaagaatcctagaaaatcacacagtgaaaagaatcttggaatctcttggtgtctatgaaattgtgtaataagcagaatctgatggctccctgggattttctacctttatattctatgctaacttaaaatttatacctttggaactacgttttatgttctcaacaagacaaagttataagtcgttatattcagctaagcatggagctaaattaaaaattaggacactaaataaacactttcacatttatccagtgaatatgagtttgtttcaagccaattctcctgccaagaacaattagaaaagatatagaaatagttttaaatgacttgagagagcattcaaggcaatgaggatgtaaagatcaagattccaaagagaagggaagcctagagaagtgagcctgatatttattgagattttttcccttaaggaatgtatcaatttaaaagtaatagatgagtaaataagaagagcttacagcaaactcagagggttggagtacaaggagacaactgtcagagctacaaaaataagtactcaaatgcataatgacagtgaaaatttgtactacaccttttctagtaaataacacaactagcccaaaaccacaaaattaatgatttaaaagatttgaaaaacatcattaaaaatactgatcttattaataattaaaaagcaagaaaataacaattatgtactacccattttttaagtgcatggagaatgcctaccaaaactgacagtactgtggggcatatttcttgatctgtattgagggtacaggatatattcattttgtgataatttttgagctatatacttagaagatggacacttttatctatgaatattctatgccaattaaaaagcatataataataatcacctgcctgtgtggtgatgagtgaatctctacacattgacttttactaagtcttttgcattgagttccacatggtatcatcccctcttcctgagtttcagctgccttaaatacatgaaactttctgacttcgcagaattgcatggtttcttgttcacttcttcctctgtaatcagttgggctctatatctctttgctctgcaaaatcagttgtcacacacatccatgtgcttcccattttcattttttgaagatttctcacccgcttttgatttctcacacattatgctattcaccatgagttaatagttgtattaatacctgaataaatacatgtgttcaatttatctgctttacatattttgatttacacatttttctccttttctgtcttccatcagtttttttttttttattatttcccctgtttattctggagttataaactgtacttctattctcatgggtacacttttaatatctgtactttataaatttcaatgttattcaaaatatccttcattctcttcaaataagcaaataatttatttttaattaccatatatttcctctctgccatttttcctatcaataatgattaattttgtatccacattttaataaaatgttattgacaaaggttaaacattcacatgcttgaaatttcaaaagatttgagagaatatattttgaaaatattcactttcagtctatatttcaataattctggcttccctccccaaaaacatattttcacagggcttatgatacctttttcaatttttcactgaccgtccctgaagctacatcttacatcactctttttctctctgaactacagcaatatcaaatatctttcatttgctgcagttccaaattagctttcactgtttacagcaagctgcttcatccatctataatgattattactcttccttgctcactccagtcccttcctcatcctttaattttatcccaataattgctttctaagtgatatcttattttatcccatgtattaggaaaaacctcctagcttaacactgtcaaaattctttccttccttcccttcctcccttcctcccttcctccctccctccctccctttctcccttctttccttccttccttttcttcctttgctgttttcctgcaatggccttggatataatttggaaaaaatacagcagtcacagcaactgttctaattccttatgttctcaatctatttattaaaacaagagaagtcattcatgacatccaattggtggtctggtgctattagctagagactggtctggcactcacagctaaagtttggtgttcttttgttaaatataaaccattcagaatgtcaataacatacaagaccagcctgtgatcacaatgtatccagaaaaaaaagaccattttataatccaaacataaacaatgtccaagcctcaaaacaccaagcactccccctcagttaatgagagtgactccagatttattatcaactcagccttaatctcactttctgtagacaagatttatgaagttatcaaaggaaaatttcccctacttcctgaaagcatttaattcatagaaaagcatcaaatccttaagccttcctcaaaatcaccaaaaacaagcccataacctataataatatttttgtaacaccctcctaattccaaatgttgtgcattcttcatcactaaaagtaataaacccaacttgttgatctataggtatgttcttggtggtactaaccttttttaaaagggatgccctgacttctaagcaggatgttgtagtctatggaagaccaatattcctgctgaaaataactagaaaagtcatattttaaaatcactgtgtgtgtctgtgtgtgttcaaaggcattaggaagctaggaagctaggaagcaagggcaacaacaggttgccctctcagattctggagagtggagaaccttggagaggtaaactgacatctagagccattttctttccctggaggcatatgtcaattctctgcaagaggaaaaggatgaggatatgggctttgcccagacagagggaaaaagacacaccagcagaacagaaaagaactttgaattaactaaagtaaatccaattagtatttttcaaaaagtaaaggaaaatgggaaaaagctgatgaaataatggaaaaattcaccaaagaatcggaaaatattaaaaaataattcaatgcaaattctagaactaaaaaaaaatctatcaaaataaatgcatttaaaagaatattaaaggcaacagaaagctcttccaagaaaagaaaaacaagtcaatagaaatagccaaatgaaagcacaaaaattgaaaatataaagcacaaaaattgaaaatataaagacgtgaaatacatgtaggacatattttaaaaatgtaacattcatggaaacttaaacaatagaggaaaaggaggtacagaagcactatttcaagagataatggttgagaattcccctaaactggtaaaacgcatcaatccatatatccaagaaggtccacatagtttatgaaagccctgaataagcatatcatatttaaattaacagaaaccagtaacaaagagaaatacactgaagtcagtcagaggaaaatgtctcatctttaaatgatcaaaaatagtacaaacagctggcttctcagtagaaatgtaagacactgaaagataatagatttatatatgtaaaataaccaccaacatcccattctatacacagtgaaaatattcttttaaaatgaaaaagtaaagaagttttcagataagcaaatactgagagtatttgttagcagcaaacctgcgttatatcaaataagttctttagtcaaaaggaaaatgaacccagagacaagcacagaaatatggagtgaaattaaaagcatcggaaaaggtaaatatgtagaagaaagcaaacactgactgaaaaaaacaataatactcatgttgtattggggtttaaacattctttgaactataattgtggcaggaatcatgcaaaaagaaagagatatcatttgagtttttaaagttctgagcttctatctagcattactgggaaaattgaaaaatggtaatttatagtagacgataagatgtcaagatgcaatttgttatctacgagataatcactaaaagaatagtaaaatacggtcatgtttcacataatgacttttcaatcaacaacggactgcatataggacagtggttccatagattataatgaaagtgaaaaatcctatcacttgttatttactatactttacttttattgttatttgagagagtatttcttctacttagaaaaaaaaagttaactgtaaaaaagactcaggtaggtccttcaggaggtattcaagaataaggcatcattatcctaggagatgacagcttcatgtatgttattgtccaaaagatcctccagtggaacaatgtgtggaagtggaaaacaatatactgatgatcttgatcccgtgtaggtctaggctaatgtgtgtgtccatgtcttaatttttaacaaaaatgtttaaaaagtaaaaacaaatacataaattttaaaaataaaaaatgtgtaaaataaggatgtaaagaaaaaaatatttctgtaccactgtacaatgcattcatggatttagctgtattacaaaacagtcaaaaagttaaagtatataaagtagaaaagatacagtaagctaaggttaatttattattgaagaaagaaaactattttttataaattcagcatagcctaaatgtccagtgtttataaagtccataatagcaaacagtaatgtcctaggacttttcatccactcaccactcactcactgattcactcagagcaactttcagtcctgcaaactctattcatggtacatgccctattcaggtgtatcattgtttatctgttgtagcattttttactataccttttctatgtttagatatgtttagatacaaaaatatcactgtgttacaattgcttacagtattcagtagagcaacatgtacatgtttgtagcctaggagcaataggctacatcatatagcctaaatgtgtagtaagctgtaccatctaggcttgtgtgagtacagtatgatgttggcacaactacaatattgactaacaacacatatctcaggacatacccctgttgctaagtgacacatgactgtatttctaataatacattaatgaatggaaaatgaaataagtccccattcatgggaattcagaatgattaaaaggaacataattgtggtagaccaaataatgtctccacccctgtaagaaaagtccacatcctaatccctggaacttctgaatatgttggtttacatggaaaagggcagttaaggctgcagatggaattaaggttgctgatcagcaaaccttaaaataaggtgaaagtcctgcataatcaagtgagcccaacataatcactagtgtcctttgaagggaaatgtcctaagaggcagaagtgtaccagagaaaaggcaatgtcagaaggactcagcctgaagttgctggctttgtagagagagaaattgactaaaaatccaggaatgtggttggcctctacaagctggaaaaggcaagaaaatgggttttccctaaagccttgagaaagcaaggtggtccagccaatctcttgattttagcccagtgagatctatttcagatttctgaactacggactctaagattaaaaaacaaaaaatgttgttttaagctatcacttttgaggtaatttgctctggtcaccacagaaaactaatataacagcacagacctttctctcctcctcctcaaattcaagcttctctgctcaagggacattacactctgtggatctttacagatatggtagtccttctgatatgcaaatcatttgccagaatatgactatatcttcttgagtaaatcctagatgcctggtcttttcagggctccaggaagcattaacagtgaaagcattaaaaagcatcgaaccgggaggagccaagatggctgaataggaacaggtccagtctacagctcccagcgtgagcgatgcagaagacgggtgatttctgcatttccatctgaggtatcaggttcatctcactagggagtgccagacagtgggcgcaggtcagtgggtgcagcgtactgtgcgccagccgaagcagggcgaggcattgcctcactcgggaagcgcaaggggtcagggagttccctttcctagtcaaagaaaggagtgacagatggcacctggaaaatcgggtcactgccacccgaatactgcgcttttccaacgggcttaaaaaactgcccaccaggagattatatcctgcacatggctcagagggtcctacgccgacggagtctcgctgattcctagcacagcagtctgcgatcaaactgcaaggcggcagccaggctgggggaggggcacccgccattgcccaggcttgcttaggtaaacaaagcagccgggaagctccaactgggtggagcccaccacagctcaaggaggcctgcctgcctctgtaggctccacctctgggggcagggcacagacaaacaagaaaacagcagtaacctctgcagacttaaatgtccctgtctgacagccttgaaaagagcagtggttctcccagcatgcagctggagatctgaggatgggcagactgcctcctcaagtggatccctgaccccagagcagccttactgggaggcaccccccagtagggcagactgacacctcacacggcctgatactcctctgagacaaaacttccagaggaacgatcagacagcagcattcgcggttcacgaaaaaccactgttctgcagacactgctgctgatacccaggcaaacagggcctggcatggacctcaagcaaactccaacagacctgcagctgagggtcctgtctgttagaaggaaaactaacaaacagaaaggacatccacaccaaaaacccatctgtacatcaccatcatcaaagaccaaaagtagataaaaccacaaagatggggaaaaaacagagcagaaaaactggaaactctaaaaagcagagcacctctcctcctccaaaggaatgcagttcttcaccagcaatgcaacaaagctggacagagaatgactttgatgacttgagagaaaaaggcttcagacaatcaaactacgagctacaggaggaaattcaaaccaaaggcaaagaagttaaaaactttgaaaaaaatttagatgaatgtataactagaataaccaatacagagaagtgcttaaaggagctgatggagctgaaagccaaggctcgagaacgatgtgaagaatgcagaagtctcaggagccaatgcaatcaactggaagaaagggtatcagtgatggaagatgaaatgaatgaaatgaagcaagaagagaagtttagagaaaaaagaataaaaagaaacgagcaaagcctccaagaaatatgggactatgtgaaaagaccaaatctacatctgattggtgtacctgaaagtgacggggagaatgcaaccaagttggaaaacactctgcaggatattatccaggagaacttccccaatctagcagggcaggcaaacattcagattcaggaaatacagagaacgccacaaagatactcctcgagaagagcaactccaagacacacaattgtcagattctccaaagttgaaatgaaggaaaaaatgttaagggcagccagagagaaaggtcgggttaccctcaaagggaagcccatcaaactaacagcagctctcttggcagaaactctacaagccagaagagagtgggggccaatattcaacattcttaagaaaagaattttcaacccagaatttcatatccagccaaactaagcttcataagtgaaggagaaataaaatactttacagacaagcaaatgctgagagattttgtcaccaccaggtctgccctagaagagctcctgaaggaagcactaaacatggaaaggaacaaccggtaccagccactgcaaaatcatgccaaaatgtaaagaccattcagactaggaagaaactgcatcaactaatgagcaaaataaccagctaacatcataatgacaggatcaaattcacacataacaatattaactttaaaagtaaatggactaaatgctccaattaaaagacacagactggcaaattggataaagagtcaagacccatcagtgtgttgtattcaggaaacccatctcacatgcagagacacacataggctcaaaataaaaggatggaggaagatctaccaagcaaatggaaaacaaaaaaaggcaggggttgcaatcctagtctctgataaaacagactttaaaccaacaaagatcaaaagagacaaggccaatacataatggtaaagggatcaattcaacaagaagagctatcctaaatatatatgcacccaatacaggagcacccagattcataaaccaagtccttagtgacctacaaagagatttagactcccacactttaataatgggagactttaacaccccactgtcaacattagatagatcaacgagacagaaagtcaacaaggatacacaggaactgaactcagctctgcaccaagcggacctaataaacatctacagaactctccaccccaaatcaacagaatatacatttttttcagcaccacaccacacctattccaaaattgaccacatagttggcagtaaagctctcctcagcaaatgtaaaagaacagaaattataacaaactatctctcagaccacagtgcaatcaaactagaactcagcattaagaaactcactcaaaaccactcaactacatggaaactgaacaacctgctcctgaatgactactgggtacaaaacgaaatgaaggcagaaataaagattttctttgaaaccaacgagaacaaagacacaacataccagaatctctgggacacattcaaagcagtgtgtagagggaaatttatagcactaaatgcccacaagagaaagcaggaaagatccaaaattgacaccctaacatcacaattaaaagaactagaaaagcaagagcaaacatattcaaaagctagcagaaggcaagaaataactaaaatcagagcagaactaaaggaaatagagacacaaaaaacccttcaaaaaattaatgaatccaggagctggtttcttgaaaggatcaacaaaattcatagacagctagcaagactaataaagaaaaaaagagagaagaatcaaatagatgcaatgaaaaatgataaaggggatatcaccaccgatcccacagaaatacaaaccaccatcagagaatactacaagcacctctatgcaaataaactagaaaatctagaagaaatggataaattcctcgacacatacactctgccaagactaaaccaggaagaagttgaatctctgaatacaccaataacaggagctgaaattgtggcaataatcaatagattaccaactgaaaagagtccagaaccagatggattcacagctgaattctaccagaggtacaaggaggaactggtaccattccttctgaaactattccaatcaacagaaaaagagggaatcctccctaactcattttatgaggccagcatcatcctgataccaaagccgggcagagacacaaccaaaaaagagaattttagaccaatatccttgatgaacattgatgcaaaaatcctcaataaaatactggcaaaacgaatccagcagcacatcaaaaagcttatccaccatgatcaagtgggcttcatccctgggatgcaaggctggttcaatatatgcaaatcaataaatgtagtccagcatataaacagaaccaaagacaaaaaccacatgattatctcaatagatgcagaaaaggcctttgacaaaattcaacaacccttcatgctaaaaactctcaataaattcggtattgatgggacgtatctcaaaataataagagctatctatgacaaacccacagccaatatcatactgaatgggcaaaaactggaagcattccctttgaaaactggcacaagacaaggatgccctctctcaccacccctattcaacatagtgttggaagttctggccagggcaattaggcaggaaaaggaaataaagagtattcaattaggaaaagaggaagtcaaattgtccctgtttgcagatgacatgattgtatatctagaaaaccccattgtctcagcccaaaatctccttaagctgataagcaacttcagcaaaatctcaggatagaaaatcaatgtacaaaaatcacaagcattcttatacaccaataatagacaaacagagagccaaatcatgagtgaactcccattcacaattgcttcaaagagaataaaatacctaggaatccaccttacaagggatgtgaaggacctcttcaaggagaactacaaaccactgctcaatgaaataaaagaggataaaaacaaatggaagaacattccatgctcatgggtaggaagaatcaatattgtgacaatggccatactgcccaaggtaatttacagattcaatgccatccccatcaagctaacaatgtctttcttcacagaattggaaaaaactactttaaagttcatatggaaccaaaaaagagcccgcatcgccaagtcaatcctaagccaaaagaacaaagctggaggcatcacactacctgacttcaaactatactacaaggctacagtaaacaaaacagcatggtactggtaccaaaacagagatatagatcaatggaacagaacagagccctcagaaataacaccgcatatctgcaactatctgatctttgacaaacctgacaaaaacaagcaatgggaaaggattccctatttaataaatggtgctgggaaaactggctagccatatgtagaaagctgaaactggatcccttccttacaccttatacaaaaattaattcaagatggattaaagacttaaacgttagacctaaaaccataaaaaccctagaagaaaacctaggcattaccattcaggacataggcaagggcaaggacttcaggtctaaaacaccaaaagcaatggcaataaaagccaaaattgacaaatgggatctaattaaactaaagatcttctgcgcagcaaaagaaactaccatcagagtgaacaggcaacccacaaaatgggagaaaattttcacaacctactcatctgacaaagggctaatatccagaatctacaatgaactcaaacaaatttacaagaaaaaaaaaaccccatccaaaagtgggcgaaggacatgaacagacacttctcaaaagaagacatttatgcagccaaaaaacacatgaaaaaatgttcaccatcactggccatcagaggaatgcaaatcaaaaccacaatgagatatcatctcacaccagttagaatggcaatcattaaaaagtcaggaaacaacaggtgctggagaggatgtggagaaataggaacacttttacactgttggttggattgtaaactagttcaaccattgtggcgattcctcagggatctagaactagaaataccatttgacccagccatcccattactgggtatatacccaaaggactataaatcatgctgctataaagacacatgcacacgtatgtttattgcggcactactcacaatagcaaacttggaaccaacccaaatgtccaataatgatagactaagaaaatgtggcacatatacaccatggaatactatgcagccataaaaaatgatgagttcatgtcctttgtagggacatggatgaagttggaaatcctcattctcagtaaactattgcaagaacaaaaaaccaaacaccgcatattctcactcataggtgggaattaaacaatgagaacacatggacacaggaaggggaacatcacactctggggactgttgtggggtgcggggagggggtagggatagcattgggagatatacctaatgctagatgacgagttagtgggtgcagcgcaccagcatgtcacatgtatacatatgtaactaacctgcacattgtgcacatgtaccctaaaacttaaagtataataataataaaaacaaaacaaaacaaaacaaaaagaaaaacaaaacaaacaaacaaaaaaagcaccgaaccaatccaaatgtccatcagtgatcgactggattaagaaaatgtggcacatatacaccatggaatactacgccgccatgaaaaggatgagttcatgtctcttgcagggacatgcatgaagctggaaaccatcattctcagcaaaatatcgcaaggacagaaaaccaaacaccacatgttctcattcataattggtagttgaacaatgagaatacatggacacagcgaggggagcatcacacacccgagcctatcgggggatggggggttaggggagggatagcattaggagaaatacctaatgtaggtgacgggttgatagatgcagcaaaccatcatggcacgtgtatacctatgtaacaaagctgcacattctgcacatgtaccccagaacttgaagtattataaaaaaaaaaaaagcatcatctggtctcactagaagttcctgagacaccacagtatactttggtgagtgtttcttgatatcggtaatagggcagtttctgattatttcttgaggcatgtgctcattttttgagtcatgtgcaggtatatgaattctatatcctagtatgacatctgaggacttacttttgatatatcttcactctccttcaaattgtctaaaatattcccctttatctttgaaatgatgtaagatttcttatcttctctatgtttgccataatgagacttttgggggcacacttgtgtgtcacagacatcccaaaatcatgatgacaagctaatgctttactcatagtgcccaatttatatctatatccaggaatgaaaatgtctttagcatctcaggtaataaggagttatcaggcacacctagagaaaagaagtgcttttaagaacatagtggtaatgtactttggctttggaattcaacagaactacagttggtcctccgtatttgtgggttccacattcatggattcaaccaatcttgggtcaaaagtattggaaaaaaaacttccatctacactgaacatgcacagattattttcccctgtcattattccctaaacaatatagaatatcaattatttacacagcatttatattgtatcagtcatgatgagtgatttcaaaattatttaagcataaaggagtatgtgcataggctacatgcaaacactaccattttaggtatggaacatgaacatctacagatgttgctatccaggagagctcctggaaacaacctctcacatcgagaaacgatgatacttcaaatacttttcctgtctctttttcaaaatctgaaaccttggcaagggacataacctctttaaatcccagtttatatacaatgggcatgataatagctcctttttccaagggtcattattagcactaactgaaattatttttatagcaactaccatagttccagcacaggtaagcacatttctattgtaatatgattacaatagaatgtaagcacatatataaagattataattagagcttatgtttctatttacatttcaatgtgcttaatagaaacataagctctaattataatcttttgaaaacaaatgttgcatatttattttagttatgataggtgatagatatataggccttttaatatttgaaccatttatctctttctactcttttgttattacataaaagtctattttcattaaaaggttttatccttatttaaaattattttatcatttactaccagaagtaaatttactgaattaaagtggcatctatgatcgaatcattttccagaaattaacatacaaattacacttaagaaagtatgaatgtttctacactgccatttccttatttgcatagcatgttgtcataaaaatttctctgttattttgaaagtttaaaacaccaattatacgatttaactttccattattgcatttttggatgcagttgaacattgttttatgcttctttgtagttgtatttcttttactgttaactttgtcatatagtttttcttaatctattgtatttttcttgataaatattgatatatttaatttttgatatttaagatagtaatctcttccatatttttataaatatttttgaaatgtttaaattttaccattttttgctacagagaaaatttcacttttaaagattatatctacttgtctttctctgtgattcttgtctattgctgctatttacaaagtcttcacaaaggaaagatttaaatgcttatattattttctctattttattttttgtcactgattttcatttagttacttaattcattttgaaattagttttgtgggaattgagagatgaaccaccaaatagctaactattgaataattttttttctaattcagttttgatttctgtcttcatttccttatttcttgtacatatatataaacatttcttttttcttagtgtttccagaggctcaggttaagatgaatgccccttgaaattgatgcacaatatttctttcaactacagctctcttgcccctgtaaactctatcccagcttcggagtacttatagaaggaagtcttttagaactaatttttgagagattgtacagttcaagcttaagcatgcagtttcaaatcacattcaacaagctaatgaaactgtgattcaatatggctttctaacttattgctctgtgaggacaccaggggcagcaaaggctgtcaccaccagagttgatttactgggctccctgtgggacccaggtcccaagatgcgatgcctccgtgtaatcctgaagcgacctgccacaccttccaccctccagactagagatctgcaaggggcttataccgcacctgctctctgagctaagctgagaaaacagaagccacagatggtgacgagggtacctccaaggcaggagaaaccacaggtaagactcctctgtgaatcatcaggaaaaagaaaagggcacatgacttgttagaacataagaattaatacgagttatccacttaaagcagtgcctaaatgtagatagtactcaataaatgtgattgtcttcacctgggctgttaaacagacttctgactatttcctctctttctcttctttcctatgtttcctcccttatttccagttattttttatgtcatagaaataaaatcaatatcagaagacattagctaatgagaataggacagagtagaaatagactgcagtacagtaataaaaccttaatgaatgaaaaaattaggagatgaagaaaaagtagcaataggtttagaactagtgaaataggtgagaatgctgctacaaaagtcaaaggagatatttggaaaaagacactggatttatatcaaaaaaagataaagattgaatattaagcatcacatttatacaatagagttcatttttagcctttgtgagaacagtattgatagtgagatttgtatgaaaggctgatttaaatgtgctgaaaactgaatgggagtgggaaaatgggggcaggaaaaattagagttacccatgaattaatatatattccgtcatcaagggaagattagctgtgtgggagcagtctgcagaattgggctaaggaaaggatatcatatatcacaatgttcttaaatcttgctttagttaccctcaacaactctgaacatttatttgtgtagaatttggattaaatggggcaaagagatattatttctaatgtttctttttctccctgagtgaagatcctgaatctgaagacacattcatcagtcatgtcccaggtgactaacaccacacaagaaggcatctacttcatcctcacggacatccctggatttgaggcctcccacatctggatctccatccccgtctgctgtctctacaccatctccatcatgggcaataccaccatcctcactgtcattcgcacagagccatctgtccaccagcgcatgtatctgtttctctccatgctggccctgacggacctgggtctcaccctcaccaccctacccacagtcatgcagcttctctggttcaacgttcgtagaatcagctctgaggcctgttttgctcagtttttcttccttcatggattctcctttatggagtcttctgtcctcctggctatgtccgttgactgctatgtggccatctgctgtcccctccattatgcctccatcctcaccaatgaagtcattggtagaactgggttagccatcatttgctgctgtgttctggcggttcttccctcccttttcttactcaagcgactgcctttctgccactcccaccttctctctcgctcctattgcctccaccaggatatgatccgcctggtctgtgctgacatcaggctcaacagctggtatggatttgctcttgccttgctcattattatcgtggatcctctgctcattgtgatctcctatacacttattctgaaaaatatcttgggcacagccacctgggctgagcgactccgtgccctcaataactgcctgtcccacattctagctgtcctggtcctctacattcccatggttggtgtatctatgactcatcgctttgccaagcatgcctctccactggtccatgttatcatggccaatatctacctgctggcacccccggtgatgaaccccatcatttacagtgtaaagaacaagcagatccaatggggaatgttaaatttcctttccctcaaaaatatgcattcaagatgagggaatgcatttcttaaattactgacaagtatgagtcataggcttaaggggggaatatattcagaattaggaaactataaaataaaacttcatcataatattaaggcagtatgacaagtccctggcttttagcatggaatttttggctgaggtgagctagcagcagtgattctatgcaaaagagatatggatctgagttgataaaattctagcacatcttagcagctatcccaacgggaggattttaatggattgagtaaagttctctcgaagcttgtctttctttctggatatttttctctcctacgggcttgtttaaacttaaactcccagaagtttaaaggaaatcctgttgttgcccctatcacctattctcttaggcagttccatttaggcatttaggtaaacattagatcttctgttctgggtcactctcacgggtgattggactttcctttgcaaaggaatgataacattttgagggacaatagacacatcaagtttttctgccattcagatttacctaattaacaccagcacttacctaatctgaattaggtaaattcagatttacctaacacccaagtaatttaatttacctaataaacactcagcaagcaaaataaacatatgcaagaagtctaaaattagtgtaaggttttaagacttttcacagttcctaccttgctagagtttttcagtattcagaattcaaacttctttcttgtgggaagaaaaactcattttttttccggaccagagcagacttttttcatacttttatgttcttaatgtagctctgcttcttacaggcagatttccttgggcatcatgaatttttcacgagcaaatattctagtacagtgatatgaccttaaggatcataaaaaatattttgtggaaacaagataaactttcccagcaatatcggtttgaagggacaactataaatttgatcacagcttctgattgctggattcatggtgcaggtggtcaatattgggatccacttagatttgaatcaacataggcagtgggagcacagtggaaggtagtgttacagaactttctccttagttccgctaaaactgagctcttgtcacacaaccaggaaggattaggctcgtagacacatagaagggtgaggaaaatgaaagttattcggggaaaagagaaaagggaaaacaaaacaaacaaacaaaaaacaaacaaacaaacaaaaaaacacctttcagcaagatgaaagagtcctgctaccaggcttcccgactcacagattgaatcccaggtcaccacacaggaagaggagaggccaggatcttcccctctgcaaatggcatgaagttcctgaggccgccctccatcctcccagtacacaggtaggcattattcagaaagaatcagtcaggaaaaggcaggcttcatccaggaccaacagtctggtttttcagccttcaggctgttatttagggttgaaggcagggtttcactggggacccctggctgcctcctgtctctgtaagtagcattagaagtgaaaggcagggcctggcggggtggctcacgcctgtaatcccagcactttgggaggccgagacgggtggatcacgacgtcagcagatggagaccatcctggctaacacggtgaaaccccatctctactaaaaaatagaaaaaattagccgggcgtggtggcgggcgcctatagtcccagctactcaggaggctgaggcaggagaatggcgggaacccgggaggcggagcttgcagtgagccgagatcccgccactgcactccagcctgggcgacagagtgagactccgcctcaaaaaaaaaaaaaaaagaagtgaaaggcagaaagcaaataccaaaggaatctctttctcttcctacatcctttcctcatgttttattttttctctgctagagcctaaaagttagcattttttaatagaaacatgggtctgctggcgtaaattgcaaaatggaagatgtgcattctcacaatagaatttaagtccagaaaatccaaatgctgaaaaaagtcaagaacatggatagaaatatgggtcaaaagaaaatttttgtcaatgtacaggcttgttaatgctccagaacagcatgtggagcaaataaattttgggattatgttggtttttcaaaagaggagcacaggctaccataaataatgtcttgatgagcgatatctatcgatgcaattttgtggtcagagatgaactaacaagtcaaaacttaactagaaatcagatgaagattaaatcaagtagtctgcttcattatttgttgttctcccttttctgtttcctttcttgagataaactgtttattgtcttcttcctttgcatgtgtgtgtggcgaggggaggagggctttatgactttaaaacatcatgatatgtttagattttgaaatagatttcatttttgtaaatttttttaattgggaaatgtgtctgcaaaattattgggtacctaaaacgcaaataactatactggtcatattttgttatagaaatgtgtttattataaaatatagagtatgattctaagaatgtaatattctttgtatcttattgaccctctgtaaattattttaagttagctatttaagaggacataagattggatattaattttttgagatgttaaatggatccattagttcaaatagaagctagcctagcctgctactatagaagaagggacaaattttcaaccaaacacctaagaatcattttgcaataattagcgtaaaaagaaaagagacagaaaatttgaagttgccaaggtgtccttcagtaaacaaatggatgatcaaattgcaatacatccacacaatgcaatattatttggcaattaaagaggaatgaactatcaagctgcacgaagatgcgaatgaatccaaaatgcatattgctaagtgaaagaagcctgtcttaaaaggctaacaaaatacatgattgtatttaaatagaatcctggaaaaggcaaaactatagtgagtatgtcaatcaatggtagtcaaggttttggggaaagtgaagtgttgaataggtgaagctcgaggattttattttttagggtggtggaatcattctatcatattgttatggtgcacacataacactatgcacttaccaaaatctatggaatttacagcattacaggatgaagtttaatggaaacaaaatttaaaaattatttaagacattataggattacaggatgaaatgcacaatgtgaccagaaaaatctaactctcttatagttattaaatatatgaaacaaccacactgaaataattccggggaaggggggagttgctgacctaagtaactttggaaataggtgaaatctgttagactaaaggcaaaaagaagtatagtatgtactctaccctacttaatgaatcagtttctcatggcggtgtggattaacaccgccctaatacatgtgttagggcacaaaaaagcccctacagtatagttttttggcatgttgagtgctttaaattaaacaaaactgaaagtccttataaataagcctcaaaaccaaggtctctctctgtctccctgtttttctcatcccctttcttatctgaagttccctcatctgattacagaaagtacctccagaaaaaaatgcaattatcttaaaactccttttctaggactcttaccaaataaccaggaaagattaaccacaggagaaaagagactaaagtcagttgtcatcacatccagataaactttccatctattcttctgaagacagctttgagagattacctgggagacattatctgcacgatgagacaacatttgttcacagtgaagttccactactcaccttcccatcacctcccccaaagcacagaggaactttgtcctagtccattgttcttttgagttattcatttcccctggaaattatttactacccctcacaattgcttacatttccccttctccttctcccctatgaagatggtatataccgaccgtccaacctttcttttgagtttcatattttatgtggctcccacgcatatgcacattaataaattcatatgccttttatcctattaatctgtctgttgtcagtcattccagtgaatcttcacagagaatgaaagtgaggcgttctccctgcccctacacatgtgtgctgaaattgaacagttaggtaagtgaagtgaatgacagatggcgtgagccaggtttttcagagttagagtagaaggttacagacacaaggggaaaagccttgaatgaaccatgaattagagttgaagacatcagtgtgatgtcagtttagcctaatatagatgcagataaacacagaaatatttatagattttgtatatgcacagtttagtatgctgacatattttttttgctctgtaagctaggagcacctagaagtgacgacaatccagtaggaacaaacacatgaattaacataaaactgaatatctttggaaataattttaacttatctgacaaataaaaccagcatagaaaatactgaagctcaaaatttagatttttgatgagaaaaataaacctaaaacttctggtaattaaaatgtttttctaccattatatttcatacgggaatgatattagaaaataaaaacaacttcaactatttttaaacatcaaatttaaattatgtacatttttattgcaaagaattatgatatggtgaatattaaaatagttttaaatataaatatacagtgcatggtcaaaactttttgatggaggtaaaataaaattttcagttagaggaaaaaggtactgatgtaaaatatctgactgttaaagaacatgttcatgtattcttaaattcatgatgtcaggtatcaaaacattatgtgtttagattttcttggatatttaaagatgtgatacaacaatttactttaaactaagtatatttataatactctatatatatcccaaaagacatgctcaacaagtaaatttatcataaaaaaattaaatatcaatctgaatattcttgagaagatataggcgtaccttggagataatatgggtacagttccagactgccacaataaagtgaatattgcaaaaaaaagagtcatacttaaaatttcccagtgcacataaaagttatgtttacactataatatagtctgttaaatgttcagtagcatgatatctaaaaatgtacatacattaaaaatactttattgtttaaaaatgctaacaaaatgagcatatgctgctgaaaagatggcgcagatagacttgctcaacatagggttattacaaaccttcaatttgtaaaaaatgcgacatctatgaggcacaataaagtgaagcatgtaaaatgatccatgcttatatatagatatgttttagctttttatattagaaagtacataaacaaaaattggatgactactgttgtaaatatgaaaccacctttgcaaagattatgacagtgagagaaatctaacatgattgacaccatcttgcttctagcctcacagcctggctgtcttcactcatttctgggcataggccaagctaaccataagagaatttagtttatagtttaacttagaaacaaggaccatcatagtccctcccccaaactaatcacctccttgttcagaggctgaaactacctttgtaaggctaatgaaagactacaggattagaaataagagaggggcctgaattctgctaaaatgtaggtatagtttttactgtcccttactgcttcaaagtgatgtggccagaggtcacaagatttgtgactgctccaattggtcctatagttaacattgctactgtagaacttaagattggtgttttgagatgtttttcagactgaccccatccagacttgtaactcatgactcagctggtcctctgcacccaccacacacagagccagactcagcacatgactaccattttccacattcttattattgtatccccagccaatcaatagcagcacctattccctagtcccctgcccaccaaactacccttgaaaaaccccagcctttgagagtttggggagactggtttgagtaataactccatctcctgtgtggctagtgtcaataaattcttcaccgcaataccagggtctcagtctgtgcagtgggctggaagaaccaatcagtgactacaaacacactaagtatttcaaaaaagtcacagacaaccttacaaagacaacccttgtaagctggatgagtcaaggagaataatatgtggtgaggacaatattttcattgtaattggaggccccaaagtgagtgcgaatgatcagtgacactaatcactgatcaatcagcacagttccataaattcactttatacaaaggcctgtgtgtttaggagatgagaagatggtcgttcccacttgaccaaggtttgcaggaagcctaggcaaacatgggcagatgcagaggggaggggacccactagacccatgattatggggctgaggaaggggcaggatggggaacagataagaataaaagcaccacatgcacggtaaagccacagaagcatgaaaggaagggaggaaatagaaaaagggtatagccaggaacagtgatatcagacttatttgccaataagtgtttatctaaaattgagcctgggattctactaaagaagaatttgctgcttttgctgagattcttagaatctgtagcctgggcattgtgacattgttcatattttatttcatgcttcagttgaggtcttttggtcagctgttcattctcagagtgtcggtacataaattctgggtgtgagaccactggacagcaagttttaggaagagtctcttttcttacataacaagaagttgcttcataggtaaatgtaaacaaaaataaacaatttattgtttgatcaagaacatttttgagagtaaaagaaggtaacattaataataatgctaaggaaaacagatgtaaaccatgaatatctggagaaaaccagagagcatgctcaccttactcaaagacatgttcctaggataatatttttttaattggaagatatggttaggtaatccctacctaacccataaaaatagaattttgctttatttaaatttaaatttcattaagtctcaagtttttactgttaacttactatttgtcaggcttttttgctaggagttttgagaaaatgaggaaaaggaaaatccattacttctgccccaaagtcaccatatctggttagaagagaaagtcatgtacatgtgcacacacagagacacacatacacaaataaaatgtgagatggaaagggttaggaataactcttgcatttcagattcaagcctgttgcaatactttgaattccttgttcctattcctcctcaaaatgcctaatgtagagctttgcccatagcagaaacattatcggaatttatgaatttaatgacagttcctgactccttgcagtgattcagagcaattccctcttgcaggaaaacaaggtgagaattccctgtcttattgtctgggtcttaacactatagatgatgggattaagtacaggtggcaccaaaaggcagatgctagacataagtgtgtggacaatgggagaagcatgtttggcagcacgatgcatcacagacaccccaatcatgggcacataatatataagcactgcacaaatatgtgacacacatgtgttgagagccttccaccgtccctctccagaagcaatgcccatcactgtataaagaatcaagacataagagaccacgataagcaatgagtccagcccgaaatttgcgagaacaatggctaagcccaggatgctgttgagtttagtatctgcacaaggcagctggatcagatctgagtggaggcagtaggagtgtgagaggacattagtgtggcaatagggcagttgcctcaaaaggattggaagtggggccatgagtgccacactcttcagtgtaatgcccagacccatgcagataatacggggcagggtcaggatggctgtatagcgcaggaggttgtagatggctacaaagcggtcatagctcatggctagtaggacccctgactccatgcaggagaaggtgtgaatgaagaacatctgggccaggcagccatcaaagtcaactctgtgggcatcaaaccaaagaatgcctgtaacagtagcagtgtagacacagagacgcccacctcagtgacagccaacatggagagaaataagtacatgggctcatgtagggcagagtcttcctgcactgctgccataattaggatgtttcccacaatggccacaatgtacatggtgaagaaagggatggagagccaaccatgttgggcctccagtcctgggatgccagtcaggaagacagataggaggtcaagactttcattgctttcagctcccatgccaccaacagcagagatcagtcttcgcctgccatttgaaaaaaactgaagttagtccccaaccgttggatcttctgccttagcggccaacctgaaaagttgaagaaaggagatggggcaggaagcaagaaagttggagtcatctacgtcattctgaataaaagtataacagacatcctcttctctcctcctgttctcctgagttccagaatcctaaatgttacttggaaaagagatatttcagactgctccatctttttaagtttttaaaaaagttttaaatactttttatggatgcataatatttgtacatatttatgggatacaagtgacattgtgtcacatgcataaaatgtataatcgtcaagtcgaagtacttaggatattcatcaccttgagtgcttattacttctatgtgttgggaacatgtcaaattcctctcttttagctactttgaaaaatatgcattgttgttaactctagttaccctactctgctatcaaacattagaactaattccttctatctaactatgtgtttatagctattaaccagcctctcctatccttaacacacatgcctttccaccctctggtgattatcattctacactctacctacatgatatcaacttttttagctcccacatttgagcaggaacatgcaatatttcagactgctcaatcttgtgaaagacagcatagcttaaaaattaagagcagaaactttggaataaataaatcagacctgagccaaaatccatactcagccagttactagatgtgtgatgtgttcaacttatttatactctgatccaaaattttattttgtttttgtttggcttggtttgagttttaacttgtgacatgaatgtaataatactattctttctggttgtaagaaaaaatgagaaaattaatgtcacatattcagtattttgaactaaagtctttcagaatccatttgcagagcttcaaattactgaacatgtgacattaattttctcagtatctctacctgtaaactggggattaaaatacacttgctttttagattttttgtaggataagcaagatattacatgggatattgagtaagatattttattcttagagagacactaggacccagagagaaaaattgaataacaggccacagcttaaaagtcagtttctgcagagcctagattacagtttagattcatgatcttctcttgtagtaaggttaccaatttcactatggagatgagagtaaactgtggtctgatctaggttggagtcatcagaaagaactgagttttagctttgacaacgtgaaccttagaagggaagaacccctagtaaagatcatctccatgtatccccattccacctcagagagggaaaaatgttttgaatgaaagtgagactatggttttaaaaagctgaaaaagggagaaataggaatatggacaatgaaggatataaacatttcaggtgaaaattatgctaatacacaagttacctctgagttagaaacaaacagagtttaggaaaactatcaaagatgtagtggcttctaaaagaccatatttaaccaagaatatatgcaaagatgaaaacaaagacacagagatacaagactccttcagtggccatgagatcagagagaaatagctaatcccagtcagaaggttgaaataatatataatgtaatataatacaatgtaacatagttaatgtaatataacaaattaaatttataaaatcaatttttaaagacaataacagtgaagtaggaaggggtgctcatgactggtataaaaactgaattacttccaatcaccagttcacacattcactcaacagatttgatgtatgagtcagtgatcctgcaccaattctttatcctctggttacccagtgttgatgtgaaattgttcatacatctgaaaagtttaataaaaatgccctgctggaataaatgtatggtcaggagaatgtactgtcaagggaatacaaagagctatgacctccaggagtcataccagcctgggcaacatagcaaggccccatctgtactaaaaattaaaaattaaaaaattagctgggcatggtggcacatgcctgtagtccagttacttgggaagctgaagcagaagaatcacttgagtccaggagttccaggctgcaatgagctatgattgcaccactgtacttcagcctaggcaacagaatgagatcttacatctaaaaatgaaaaaaaaaagaactatgactatggagacaagagcaatgtaattatgagaatgatcctaggtcctgcattctcttactctctacactcttcatgcaccagctctgctgaactctgtcctctctcaaaattaatgactttcctgacatgtgaaatgtgtttccttgtgcctcttaccaatttatttatcttgagtctaccttattgatcagcggttctcaacctttgctatgcatcagaatcacctgaagaacttaaaaatcccagtgctcaggtaacaccccataccgattaaagtagaatctcagggtgtagtacctaattatcaatgttttaaagctcctcagatgaacccaatgttgagaaccactccagattcattttgtaacattccagcccctttacagtgacagcattttagactaaaatgaaatttgcaagctctccctgtctccctccatgactttcagataactttcctactccactctggacctacaagttaaacatttatttgtgtttcatcatccactagaccactcagcatcctgaagctcctctgaattgacttggatttgcttataacactccagggtggtgcccacagatgtagcctaggttttggggctagtgcacctctctagagggtcacttaagggacagaagggcttggcaggactcttttgaatctgtctaattatctctcctgaagatcctgacctgcctcacctgaagatgctggtccctggtaaagcatcatcttcagcaggaagtaagaatcaagacttcgaaggaccatgaaaagaggaacatgcaggacagtgaaaagattggcaacgtcaaggagaccatagctcaaaagattaactcaatctgtggatggaaaatgacaaccagaggggcaatttcttcactcctaagatgccttatttcaatctcataacagccatatcaagtgacttgcctgaaacccgtaagtggctgatctgggactagaatctagttcttccaattataagtcccatggtcttccctataaaggccagcagccaaccttctgaagcaaaagacatctaaatgagaaaaatgggaagatgctggagaagtcggttatctttatttttccaggcagagaaaaagactgaatggcagatagattttttttctagcctcctacgcaaactggaggtcaggtggtggggaacaggggttaagtcacctttgaaaaatagccccatctcaaaaggctatatattcagtgataaacttaataggctctctagaatctgaatcaagagtccaatcttgtacccactgagagaatgtccatctttatacaattgtcacccatgctcagcatcagcattcccagtgatggggagtttatcgcatccctaaaccactatcctggacagatctcatggatatgaagtgctttctcacattggtcttaaacgtgctttctctacattatagataatgttgcagactcagagacataataatcttcatcaagtattaactgaatattgctcatggaatatgttattttcttgcagaacacttatgttaatttgtaaacatgtatgtacttgtgtaattatctaatgtctgtatccctaccagaccataaattctaagaagaatggatgatattgactgtttttgtttgtctgttatcactagataacccatactagcacagggtcaaatacctaacagatgcttaataaatattttaactggatgaataaataactgaataaatagtatctgaggtttccatggtgatatcctgtaatctttccttcttctcttaacctgtcctaaatccctttagctatttctccaagtgtctgacttttaatttctgcaccacaaaagtcctcctgtcagagtgaccaatcaatagtccagtgtaatatgaatcagcagtgtgatatatagcttaaaacaaatctgtagttttttctaacactatttagcagaaacaataactttcttatctgtaactttgtaatactttgtacagactttttctattttattaaaattacatttatacctccttcctgtcagattttgagctcttttaggatcagacttgtgcctggttcatcctgtccttctcaacacacgacatgattctgacacaaagatatgctaaaaaaatcattaatgaataaaagatgaatatactacttaggctgtaactgaagtaccttcagtttttggttctctattctaaataggagttaaactgactgcatcacacgcaaaaagtaaagggaattaagtcacattaaggacactgaaggaatgagtgatgcttcattttgaccagaggagactgcagtagagacgggttgggatcagtatgacaggtgctgagccataggtggagatcacagggtgacagtctggggttcatgtaagaaacacttttctaaaatcacaatgaaataataagcttctgggcagtgaaggtgttcaagcaaagactggataactcttcatgaaagttctggaaggagaatgtcagcatctgctgaatcgaggttaatggtctttcagctctctttctgctcacaggcctgagattccagactcgcaaggtgtctcctattcagtgacagaatctcatgtctgtggatctgtgtgggacagaacagaggcaagttctcaacccctgctgtgtgatcacccatgtgtctttcactgctaaagcagtctctggcagctttatctgaaagtggctggcagaccatgagggtatttgaatgaatattgttctttctatagaaaacctatgtaaaagtgaggtttgaggatttttaaattgtgcacaactatgcaaacatacacaggcattgatagagattcactcaaagatacagaggcatgatgagagaatctgagagaaacatacagaagcacaagcagaattgtagctagaaacacacttattgtatacatacctcaaagacacagactgatcaaagtgtcttgatcaccttgagggagctttgtgaagtgtgagttggactgagaggcagaggaccagaactcacaatggctctagaatggacctcaggtgggcaccagccaagagaggaggctgcctttatgcctctgcggaattgttcccagatgccagagcccctggggtcctgctttgcctgagtgtgatgctgtgctggtattggggaaaggaggagggttagatcttaccttgggaataaaaagataagaaaaagcaaacaagaaactacttcacctggagatactgccctctctccactgataaaatgaaatttcaactccttccttataatgatgaagttggagacaaattctccaaacttcatagcaacaccccccacagttatccagtctcaaaagtgcaactctgtgctcagaacccacagtctagatccctgaattctgagcttaaaactcagatctcaggcaaaacctaaagcttagattccaacgggaaaattccagagctcacatctcagagactggagcttgaaggccagagacaaccccaggatttaagccagagaggatatgacctgactgcctcaatccacttagtcctacacttccctcctgaactcccactcccatggtctgccaagttactacaagttaagggtctcctccaaaagaaacattccaggatactgaaggaccatgggttcaaaatcatacagacctaattttaagtcctggccttgccacctgattttagaagattaacattcctttagttttgaacctgatttataaaaaaggatagcacctaactacaagggattgagattcaaatgagaagaaggaagtcataggtttgtttctttttattgaatttatcacacatgctagttatcgttaagttctcttgcgggttttgatttcaggtctcccaaacagattctttttcccaacacctgaacttcccattaaataatccattttacttcttgttcatctcagttttagagtgagggtgtattgagagaaggaacagcaggaaggctctctcccttttctatcaagtggtgcgatggttcagggagggaaatagaagatgtaatgttctcttccccatgtggagcactgaaatatcaaaggaacagaggaacagtggcagaagaacaccttctacttttcattattgttataggattggttggatcaaaaattatgcgttgggaaccaggagatgaaattcaggagtaatcatgaatcatgaccttgtaagttaggtcacagaatcatggacaaagaaggaaacaaatgatgcctcatattgggcataaatctctggcaaggagaggcagggctttgagaagtcatgatgtaaaatgactctagctatgttattagaggcagcatgaaggggaacaaacctggagatactgccctctctctccactgagaaaatgaaatttcaactccttccttataatgaagaagttggagacaaattctccaaacttcatagcaacacccccccccagttatccagtctcaaaagtgcaactctgtgctcagaacccagagtctagatctctgaattccgagcttaaaactcagatctggatctaaacatcagactggatccagttttttcattcatttaaatagttgtttggttattcccttaattcacatgtactggtgtgaccaactctgtgctgagtgcagagttttagcttggactgccattatctattgctcttttttagatatttaaaatgtctttttccaaactcagtttctgcctccattaaatgagggcataagtcaagaaaaactctaaatatttgttcactctgataatggtaatactaaacaaaacatccatgcaaatctcaagacgagggcttattgtattaaacgtcatttgtggggaaattttgaagctttcctccccacaacaaagcttaaatagagaaataaatatatcctgtggagtggaagttaaacttttaacaatggagcaaagcagagatagacgcaatctgcaggtaaacgcttggtaaacaaaaatacaaccagattaaacatatcccatctaaagagggaagaagttaatagactgcagaaaagaaaaagagttaatagatttgcagaaaagtctccgaagacttcctgatcaggagacttgtgtacagtgaagttccattgacaaatttctcttgcctaaccatctcagtatgacaatcaactgttctttctctctctctcgtcctctctctctctctctctcttccagttctatttgcctgaatgggagccctaaagttggagtttgcctgaattttcaatgtcaagtagtttggcatgacaggaggtaggaattgagggaaaagaaggaaagcacaatatgggattatgactgtggggtggctggaaattgtgtatcaaattctcctctgaagctatttctgtcttccacctgcactgtctcatggagatattaaggttataaatctactctacttcccttcaccaacaataccatatgcttaattgtgatacactgagtttcccactttaaaagtcattcacaagtttacttcagcaatctctcaagaccttgtgccccagtgtcccagttggaaactccccgtttgtctaaacagttatctgtaaccaatattctaggttaaaagttctcaacctttaatagatatggaaataacttgcagaatgtattaaaacacaaacttcttggtctcactcctgatagttttttgttcagatgtctaaagaaagtcctcagaatttgcatctctaacaagtttcgatgcaaagctgatgatattgatctggaaatcatatatcgagaaccacttttccaaactcttgttaatcatgagttttgttactcttgttgcacagcagatgggcatcaatctaatacctgagtgctgtcagaaaagagaaacattgtccttctcaaggtataatcacccaaggttcttatcaaaagcagttctcattcagtaggacttatgtggggcctaagaatctgtttctctataaagctaccagaaatgtcaatgatattgtttagtagaccatacttggaatagtactgttctaaacgtttctgcctaagtgtttcttctcaggcaattatctctgccaaaatcagtacccttctttcttcctgccatcctgaatcaagaattctaacttctctcatccttcacaagctacttcataaccactcaacatagcctgtttttattaccacaaacaaagtagatcttctctcttgcattaaatacaaagcctccatatattttgtctctctttaatatttattatctccttcactctgggcaggagcagaattatttttgataaattctgtttgccctgctgaacttcattattcccgtatatgtcaaacaagaatttttcaggataccgatggctcttttttatattttctcttcacatgtctatctggttacttgacaatatttcatactcaccattataacatgcctagtagcaactagcacaataattttcacataagtattgaataaatatgtatgccattttatagtcaaatattattttattagtgatacattcactactatcaagatcctgggtcctcttcatccttactttagcattccttaagttgttaacatgtcccaatccttcctccaaaggagcttttggggccttcagccttcctcaggcctgggatttatggaagaacttgagaatccctttgcggatctccttggttttcacactgtagatgatagggttgagcatgggtggtacaaacaggtagacattggacatcatgacatgaacaacaggtggagcacttttccagaagcggtgaatcatggagacagcaattatgggcacataaaaggccagcactgcacagatgtgtgacatgcaggtgttgagtgccttgagccgctgttcctgggatatgatgaccagcatggctctcaggatcaatgcgtaggaaagcaggatgaaagttgagtccataccataggtaaaaatgatcaccaagagcccataaatgttgttaacatggatgtctccacatgctactttcatgagatctggatggagacagtaggagtgatgcaaaacattgcctttgcagaagggcagtcgtttcaccacaaaagggaaagggaagagagtggtgaaactcttggtaaggatgcccagacccatagccaatatacggttgtgagtgagcacagtgacatagcgtaatggataacaaatagccacaaagcgatccaagctcatggccagcagtatgcctgactccatgaaggagaaagtgtggatgaagaacatctggaccaggcaagcattaaacgcaacatggttgtagttgaagcagaaagtagaaatcacagtgggaagtgtagaaaaggacactcccagatcattgagagcgagcatagagaggaagtagtacatgggctgatgcagagcaggctcccaaaacaccagagtgagaatgctgaggttacctacaatggagatcatgtagaggatgcagaaaatcagggcaacccaggtgaggcctgtttgtatcccaggaatgcctgtcagctggagtgttgctggctggaagggggtgccattgagacccagcatggtgggagaatatagatagggaatggacccaagagggtgtgttgggaaacttcttcactttctttcagatatcctgtctccaacaaaaggtcatagattgaaaatgattgcctgtattcctgccttcccagtaagacactcatctctttaaggaagcaaccgggttctaatcgtttgtgtaccaccagggccctgctcactatctaggccatagtagaaactctgtggtttgatgatcaaatgagtgcccataacatagcaaggcataataggagacaacattaacaattgcttctggtagaccagaaagaggaaatgcatcctaggctttggaaagtctttggtagatagcatagatggaacatctactactataaatttacagattcaataacctgtagctcagacttcaccccagcctcccaatcccaatggctgcccctgaacttgtcatagccaaaaacttttctatccctgaaatcctaaatttactgttttcatatccttactctaggcttctaccttccaaccttctcatgcccgtgcacttgctcttgagtctccatgattcccccattttcctctggtctatgaactcttcttcctcacttttctcctgaactactcacccacactaaaactggtattttcatctcctctttatctctctttcaccttcatatagtaaactgcaacctttaataaattctacaatcaaaccaggtatgcagctggataaaaccaaagaagaaagtattttatgggaataaaaaaagagaaaattattacttaaccattaccaaaattttaaacttatacacacctttattcattcttaacctctattttctgagaaagagatttctctccttctccaaggacaggctctccaccttcaggatttcatttcttgtcactccttcagagcctttttcactaatccagtggatattcattctctccctttctgcctcttttccttcagacaataagtatgtgcaagactattccatcataaagatgcgataacattcttctctacccaccactctatgaccctttcccaattcttaaccaaatttcttgaaaaattgtctctccaggtacctgaaaatagaagcttgtattttatcattattattttttagttatttgcctgcttctccagcttgtttctgagatcttcgatgtcgggattcaatcttacttacattaccttctatcactgctcaattcattatatcgtggcttccacactcccctcctctgagttgaaacaaatttctctatggtcacctagtgacctctttgtctctgaatctaatgaaaacattctctctcctaattcacttgatcttcttgctacagttaacactgtctttaactcacctgtttagaaccaccttctccattcaagggtactatttgtccacaattgtatttcttccttggcttctccttctctgccttctttactgaattatcttttctgtcttttttttaagcagcctcagcctaacttcaggcaaaataaacaatagtcagaatgatgcaaactgagaagtcacaccataagagacttcatctcaacctttatttaaaatagctcttctactatattttcatggtatttgatatctcaaaattaaacctccattctggaatttcagcataatgtctcttttattatttttctcattttagagttcccattttattcctaccactcctcataaacagagtgaaattagatggtgacaaggtgctggatcatatcgagatatcagtcataatcccaaatatatataggtagtgagaagagattcatctattcctttggtttctctctcctcccaatgaaaaggcaaagcatccatttaatgagtagtgttttctccttatgggctactctccttgctaaacctctcttcccctaaacccacatttaaagtccatgtctctaagaggtctttttagatctagcctgttcagatctgttttttttttttctttacctttgctgcaagattttctctgagtcatgaagaaataaaaagactcttctaagaattcatccacaagataggtttacccccgtctgtaaccactggcatgcaaattgaggtagtctagaaagtaatattttatctattttccagattttcatcagtctacaaagcaactttgaaaacttttcctccatggagaaaattccccaccaccacccccaaaacattttttctttgctttgtccacaggagtgtccatgaaaacttcctaaatgtgacctatcttggaaggaaggtcaagaaggtggagagacacaagcaatgcacagaatatcatgagcacacacacacacacagtcactcaaaggtaccagaaaaatatacatttttacactcttatacttacacacccggtatttataggcactatctcatacccacacatacacacaaactatcaaacactcccctactcacacaaaatactatcatgcaacaacttaggaagactcattggtattatgcaatatatttcaaatattctcttatttttaagctctcctgaataaatgtttatacacacacagtgtcacaaatgcatcagcattaacaaaaccacaataatatctccaccaattattttcccatatacatacatatatgctgacatacacaatactgaaaatccagctaagattgacaactacattgttaaatgacttcagtcatttggttctgtaacttttctccagctgtacacacaaaagtcaggtatcaaaggcaaacattcaaatcgtaggcttttaaataagaagtataaaatatccttgagacaaaaatctataaatgatgcagcagtaccttaactcagtgatatgtggtttggtattatggttttgatttagatggaaacctggcatcaggtgtctgtgatcctggagtttggaaggggtcagatttggctcacatttagaaggggagatataagggttaaaggctgcctggaattttggcaaaagtgttaaaatttagaataaaatctagataaagaggtcaggtgggcagtgtgaagcagggagcactcactggatggaagatgctttccttgtagctggatatactatgctgtgggtacagctggcagtggcatcagctcattctcctaagacttataaatttatgagccctccagaacaccaagtcttgcttgtgtgtggtgggaggagggaccatggaaataactgggaaggtggtatcagtgaagagtgagttgggccataagagaattgctcccaggagaatatctttcttggcacaattatccctgatgtaatcatccatatctattagtgtgttaatccttctttgatcagggaatgtaaacacactgcatacatgtatgcacagaaacataaatagccatagctctcctgagaccttcacagatacccccttagacctatttaactatttatttactaacattcacattgcctcattcaaatttacatacatacaaacagataaatacaaatatactcaggcaattgcccagtgctctagtcactaattgtatgtattgtcacatcaaacacacactataatctatgtattcgtacattgattatatagaccaatttaaattatagacaaaacttagaaaaagactatgaaatagagacttaaagaaatgatcaaatatgttttaaatacatttccctgcttaaatagctaaaaatatatattgcagatacatattcacattctcattaacaagtcaataaaatatccaacaaattcagatctccatatttattcagattcatatgtggaatttaagtgtgttatgtattttttgtacaaatgcatgctagcatccatgtaacaaattccttatgcaagcactccttttactccattactatatggaacctaaaaattataatcagtttattccaccaaccaaacagataaaaacagatttttgagcaacattttagtctagatattattatcagcacttatagtatacagaccaataaagacgcagcacctacccttgcaaagaacataaatatttaaaaactaatccacctaacaggctaaatgtacctccaagccctatctagaaatatgttataaacatatttcacaacaaagccaatgcatttatcaaaacttatctagtgtgcatgtaagacttgtgcagtatatgtctgaaagaaatcaaagaactatacaatgtattgaactacaaataataatataactgctgaactatttatggagaagtgtgttgttgttacaacttactttgaaatgcatccaaaaggtgagctgtattgataaactagtagaaagatggatacatcagaagataaataagaaatcaaatgcagccataaaaaatgctgagttcatgtcctttgtagggacatggatgaagctggaaaccatcattctcagcaaactatcccaaggacaaaaaaccaaacaccgcatgttctcactcataggtgggaattgaacaatgagaacatttggacacaagaaggggaacatcagccactggggcttgttgtggggtgggggagagtggagggatagcattaggagatacacctaatgtaaatgatgagttaatgggtgcagcacaccaacatggcacatgtatacatatgtaacaaacctgcactttgtgcacatgtaccctagaacttaaagtataataaaaatacatacataaaaaaagaaagtagaataactctcatgaggtaacccaaaaaaaaaagaaatcaaggataataaaatattcatggtagaatttaggtcataagtatactggtattcactgtgaaattctttcaagttttctgtgtttgaaatttttcataataaaatgttgggaaatttttaatgaaaaaaggatgaagcaagacatagtctattatgccatgttcaaaacaccagtgaaaattcaaactaatacaagtgatatcaatgtcctttaaactaaccccaagcatcttttatatcaactcagtatttagcatgttatgggataaattttacgtatttgacataattgatatttttatatgactaaagaaaagaatcaaatttttcagttgaagctattttgccaaagattaactacttatgttcaacaaataaacattccctgccatgcctatatcccattctagggacatctatttcttcccccacaggactctctgtccagtggatgccacagaaacatgcagagccaactataatagagtgtgatcactgccttcatggcagaactgaacagtgttgtgaagaaaagaggcattgatcctacttcagtgcgtaaggttttagggatatggggatataaatcgtgtttgatagtgtacctgccagaagtagttcccagagaaatctgggcatctggctttaagggagaagatcattttgtacaacagaatctctactccctagaactctaaaacatcaattactttcatctttcatggactacaacaagttgatgctttgcatggtgctgaccatgaaaatgaaagcccctaggagatcatgtatctcacaatgataataatacaataagaatgaggctaacaaaatgtgcttctgttctgtaccaaggctaagcctgtttaccctcaagtccactcctgactcttttgtgactctttatatcacacctatccaatcattacttgaagaatatgatggatacagctggttgggaagcattgacagatgcaaggtatctctcactccactcccctgcctcagacagagtctctagtgtgagctgcatctcttctatggttccagcttccactggttgggctcactttggctgtagttctagtaaccccacctttggctttccagtctataggtggtagtagcttcctgctgttacaaatctctggactatgttactatctgctggtcagttcctcatttcttttgaaatctgtataaataatttccaggattaaatatattcagtttttttgtacttattattatgttatcaccgctcagtctcaatcccatatcttctataccattttttgtgatattgggattgagcctctgcaaactgcattcctcctttgccaaccagctcccaagatctacaaatatggggcattaggaagctggggcaggaagaaggaacttgtaccctacttcctttctgtggctctttccccagtggcacttcttcacccaagtactagtggttcaattccagtggccttggttggttatattttgaagctttccaacacttctagaaccagccttaccatgccctcttaaagacctcagaattagccagataagtctcccctcaacccccatctcagaagagtaagtcctagtcatagggaacctctcttctgaattcttgagaccccagaatcacctaaacagtgaccactcctcaaagtctgagtttcagctttgcagcactcctgtttcaaatttgtaaggtttaattatgccaaattcctacctttgttcctctagtcctaggcttagaagctatgtcctcaagttgctgcctacaatgataccttcatattccctttttgtcttgtgtgttcgccaatatttggttaacaattcattaatttttctcaattaaaagagctggtgtgtttcttatattctgaccagaccataactgaaccctaatttttgttcctaggttagattgtgactgatccatgtgaagccaacagagtcacttaatatgatccacacccagtagatgttaatctaaatgaataaattaacactgataaacgtacctttctgctctgatagcaacatttaaggagagactattgttgcattgaggtagggcatttgttgtaaaagcctgaccatttcttgaatggggtacaagctagagagagatggcacggtgttgtcttatgtcctatccaaaagactgcaagattccacaagagcaatctaggttgtggaaggagttataagcaaccacacagaataatgatatattagcttaaaccaagtggagaacaagtaaaaaatgagaagaagcttctaagaataacctatgaaagtaactgtaagaaagagtcagctttatacatttaagagacccagttaacatgacaacaactaactgcagcaccaattaattgtgaactttccattcccccatctgtctgtttctgggaggagaagccaaaaaccagagttagcacatgaaggatgaaagaagaagaaaggatgtagctctgaatgctggaaagtttgactattattctagattaaaccttctagttattcaccagaagatattttattatctgaatgtgaccagaaaatttaaagaacagagttttcatccaggaataacaaagaagaaccagccccactcaatatatttaaagagacaagaagagtaaaaatagtcactttctgattgcacctcaattgatgggcttggtcatcatcacataaagccagaatctcttaggaggtaatgagctcctctcttacagcgattgcctgtctatcactagaagatgttttgagtggagcagagaattggtctgacagattgctaagttctttttcagctaaaagagcacaggctttattctcagtagttattatggacctcaggagactaaaacctccctgaagaattttcagacacaaagtcagcatcactgccctctaccgcagggcctgtcatgagacataaaagtggcaaggatgaattcacttcagcagagacagggaagaacttgttctgtgggtgtctcatcagtctctcttctggtgagttctgaaactctataggaataagccagctgattctcctgaagcctgctccatgaaagcattagactgggcaaggggtatggtgaggggaagtggaagagactggtggagggtatctgatagaagcatcttagtagaatgagcaaaggagcaggaaagatctctggacttggggttcttgttctggcactgccatgtactgattgtataaccccaagcgattcattgagtccttacttgccataatcaatttctctgtgactccaagtttcaaaggtcaaagtttctgtggctcattaacattgctgcaaattcagagagggaagcaggactcaggatacaggaacggttcgggaatctagaagggaagtggtcacaacctatcccatgacaaacagctgaagcacatgtggtttaattttgctcttcccttatgaattcagtgataacaaaatacgtaaaaatctccaggatattaaaaggagaaatcagctaaactgtagatgaacaatgaatagctgataattttcattctttattatccatgatacagattgaaaactgtggtctttagacagcctttctgtacattcctccagcctctaccttctttctgcccccataacagcaccatagcaaactctcacaggcattctttgcttgattaaaaagtaaaattaagtaaaagaacatcaaagccataaaggatctcagagaatgtccttaaaaataagacatacaccaggcgtggtggctcatacctgtaatcccagcactttgggaggctgaggtggtcagatcacctgaggtcaggtgttcgagaccagcctggccaatatggtgaaaccctgtctctattaaaaatacaaaaattagccaggcgtggtggcaggcgcctgtaattccagctactggggaggctggggcacaagaatcacctgaacctgggagacagaggttgcagtgagccaagattgcaccactgcactccaccctggatgatggagcaagactcagtctcaaataaataaatgaattaattaattaatgaataaaaataagacataggtctaaaaaaagaaatagatatttctacgcttatatagccagtaccttccagagccagggtcaggactcctgacaccctcggggtcctttcttctaaaccacctggttcctatatggtttcagaaatctcaaggttctagttccaggaataggagaatttgtgttcagccttggagacaggtacttttgtgtaattttttcttatgtatctgcctttaaccactcactttgtttaggggtacctgtgaaatctttgttcagaaatgcattcctctattttccttttaaacttactctccaatgccttaatgatacttcgaagaccttggtaagagagaagagagtcactgttcaactcccgcttatgagtgagagcatgcggtgtttggttttctgttcctgtgttaatttgctgaggatgatggcttccagcctcatccatgtccctgcaaaggacatgacctgcatgctctgcacatgtatcccagaacttaaagtaaaaaaaaaagaaaaagagagaagagagtcttaaaagtctttaaattaatgttttatcacctggtctccataaactgtgaggaaagctcatctcactggctctcagtgtccatatctgttaagtattaaacgagaaaataaatgtaaagttccttgcagagcagctgacatatcacatgcgttcaataagtattcattttctttctcagtattactttattcctatctgtccagacaacccacaaaattagcaatccccaaggtaagggaagggatataattctggaacagtcaggcagtctttcttctacaaatactaaagcataagtccccagacccagaatggctttggccttgccctgaacaaaatcctgctttcagcctgttttcttctcccttctctttctgttacttttacattggcttggttctcttctatgtactgtgattactttctacaagactttatatgaagaatgagagtgtagtcaaatgggagaaataagagacaaacatcagttctggatcccaagtaatcagagttcttgaagagacacaagcatatgcagactgagctctaagaccagaagggacatattcagtacaacacggagggacagccactgccttgctggaaaccatagtacctgtgagttatgtattgctggggatattttaaaaatgcttcctggggtgacaatgcttcattgcaccccattccacaacctctgttacttttagatacctcatatgttcctgggtcccctttctccttcattcccatcagaaagaactctgagagcatggtccggtcttgctttgttagaggttggagaggaaagagaaaggaaaaacagcggtatgtaattctggggtccttctctaaaatgagggtgacctattagcttgaaatgtctgcttagtgaaaagccttctagccttctgtatcctcatccacgatgaggcaatgaacacaaaagtgtgtcaaaaacagaataaacaatacaatcactgtgacagagaaatggctgtaagaaataatatgtgaatgccagcataagaaaaatggtaaataaatacaagccattaagggtttaaaaagtgcctgtgtgggttagtagattaatatcagtgggcagtccccaagcatgtagatagaagtgttgtgtgagtatacaaatctatgtgtctatgagtgtgtatacatgtataaatcctgcatatatgtcagtgcagactgagagtatgaggacaagatctacatgttaaatggtataaagatcaagaggggccgggcacggtggctcacgcctgtaatcccagcactttgggaggccaaggcaggcggatcacgaggtcaggagatcgagatcatcctggctaacacggtgaaaccccgtctctactaaaactacaaaaaaaattagccgggcatggtggcgggagcctgtagtcccaactactcgggaggctgaggcagaagaatggcgtgaacccgggaggtggagttgcagtgagccgagattgcaccactgcactccagcctgggcaaaagagagagactctgtctcaaaaaaaaaaaaaaaaaaaaaaaaaaaaaaaaaaaaaaaatcaacagggactgtttgaatatatttgcacaacaagagcgactttacgagatatggagatatggagagagtatgtgaatgagcgtcttcttagactatgaatgagctttcttactacctgttgtgaaggtacattaatgtgtccttgtgactaatgggtattttgagagtacatctaaccatgtgatggtatgtaagtttgtatttggaacaatgctctcccacaccgaatgctagtgtacctatagaatatttagggacaaatacataatttttccagaaacagatacagccttgtgcctttgcacaaaaatatgttatttctgttgttgcttttttgcagtaattctgccaatgaaaagctcatgactgcctctggaggcagtcaattacctccacagcccactgtccttttccctctccatccaagcacacaacatgatacaaaacttgctctgggaaagtctctcattaatttgtgatacatatgaattaagcaacattttcaagaaaatatttaaatatttccaagtgctactgataacacaaactcctgactttcttctcttgtggctatgaattgtagttagcatatttctattgaatcatgcctccaaaatatatgcaagttgtagaaatgtagtttaaacattttccttttaactaatttctattattgaagtatttgtcaatgtcttccttgttcataaaatagagggaaatattagctcagcctgcaggctgatcatcataaaatatgaagaaaaggagtttgcctgcatcatctcaaaagcagtgatttcatgaatgcgtcagtttccatttatgtcaacatcatcgctttgtctcttatctcctgatttcttgtcctccagcaagtgcaactgttagaattctccaagtcagaagatctgactctgaaaagtaccctaagtttgttttgctatggggttgttcaatgtcactcaccctgcattcttcctcctgactggtatccctggtctggagagctctcactcctggctgtcagggcccctctgcgtgatgtatgctgtggcccttgggggaaatacagtgatcctgcaggctgtgcgagtggagcccagcctccatgagcccatgtactacttcctgtccatgttgtccttcagtgatgtggccatatccatggccacactgcccactgtactccgaaccttctgcctcaatgcccgcaacatcacttttgatgcctgtctaattcagatgtttcttattcacttcttctccatgatggaatcaggtattctgctggccatgagttttgaccgctatgtggccatttgtgaccccttgcgctatgcaactgtgctcaccactgaagtcattgctgcaatgggtttaggtgcagctgctcgaagcttcatcacccttttccctcttccctttcttattaagaggctgcctatctgcagatccaatgttctttctcactcctactgcctgcacccagacatgatgaggcttgcctgtgctgatatcagtatcaacagcatctatggactctttgttcttgtatccacctttggcatggacctgttttttatcttcctctcctatgtgctcattctgcgttctgtcatggccactgcttcccgtgaggaacgcctcaaagctctcaacacatgtgtgtcacatatcctggctgtacttgcattttatgtgccaatgattggggtctccacagtgcaccgctttgggaagcatgtcccatgctacatacatgtcctcatgtcaaatgtgtacctatttgtgcctcctgtgctcaaccctctcatttatagcgccaagacaaaggaaatccgccgagccattttccgcatgtttcaccacatcaaaatatgactttcacacttggctttagaatctgttattttggccataggctctcatcagtagcatcgtcatcatcatcatcaaagtataagatagattgtgtgctgcgggaaaagtaggccaggagatggtgatgcaaaacttataacacaaaacaaggagttccaaatgaatagtacattcactaaataccaacagtattcttagaaagataaatattgggggcaattgagtaattagacaagttttacagaggaagactaatttaagctaggaattattttctataataatgaatattactaatataataattaacaaacttagtcctaaaatgtatcaagtactattataaattatttgtgtgtattaattcacttaatattcatacaaatcctctaagacacagagaattaagttaattcttcagcctaacacagataatatgtggtccagttgacattcaacactaatctctctctagtgtcagtgcagcacccaaccggtataaatatggcctgacggtcaaattggcatcatttaacattaccattgctgcctttgctttccccaccactgtcattctcaaacactcatacattgctttaacttcacaaagtgaaatcagcttaactattagaactcaccataaaatgtatgaacaaatgtgatccaggtaaactgatagatattgccatttaggaaaatctccagattcttctttacttcttttatctgcccaccactcaatccttaccaacagaaaacaatgttcaatatctgaaatatctgactcatagaattttgggggaaagggggaattgtggtaggggcacaatttctatttctctttccttcttgagattttaactgtcttccacaaaatgacatgttaagagatgttagaaattaagtcagtctaggatttccagttgcaaaaaaaaaaagcctaggatagacagactagagcacttatggtttagataccagaaaataattctttcagaccttctcatacgcttcccttgataccagaggtaggatatagtaagaaattccttggtgctaattttggtgctgtcatactaagtttagatctacttgtagatcaaaagagagcgagggattgggggagaaagaaggggggagagagagagagaaagagaaagagagaaagagaaaaagagaaagagaaagagagaaagagagagagagagatgcactaggtagtctaacttaactcaccatggaaactcatccagaaaccacgtagtagcaaagcatattgttatctagaggttttttctctttgtattgaggaaataccaacaagagagagagtcagaaagagggagctattttaaaaatgagataatgtaagtacttgggattcagatttttttcaaaaatgtctacaggtacaataagacaccaataatatatgtgtcctggcccactaaatagattgcttttagaagaatgtttggatagcataacttagtatgatttccaatggaaaattattagaatatttagtggtttaaagtatggtcttcagtcaatttaaataataacttttctgattcatattagaagctcctatttcaacatgaaataataattttaatgctttgatattttagtttcaaatatatacaacaaatacataaatgcaaaggcaaggcttagggaagccgccaaatgaaagtaaactctcactgattcctacctcagaagcagcgagggatacattcttttgaccataggccttacttagaaacccaatggtgtaacatagaaagggcaaggaacaagaaaatatgagcctcccaaaaagcctctggctcctttgtaccttaatttcaccttccttttttcagcattaattaaaagagctactgattttcaggttctaatggaaaatgcacatttatatttttccctccctcatgagacagatgccataagaaaaatgtagggccactcctgcagctctaatcctaaaaaggtctaagctaagccctgtttttgtttttttgaccttgggttaaaaactctttaacttctttttatttaacataatcttttttgaactcaacattttccgctattgaaacagcaaaaatacttgaattttggtctaaaataaaggtaaaaatcaaactttgtttttgaattctttggttactttttctttgctcaacttttaatttcaggcagtacatgtgcaggtttgttacatgagtaaattgcatgtcaccggggtttggtggacaaattatttcatcacccaggtagtgagcatatgacatttcctgcccaaatctcaggttgaaatataatccccattgctgaaggtggggcttggtgggaggtgactggatcatggggacagatttctcatgcatagtttagaaccatcttcttgatgttgttctcatgatagtgagtgagttctcatgaagtctggttgtttaaaaatgtatggcactgcctacttctctattagtcctcctctggacatcagatgtgcctgctccatcttcaccttccacagtgattttaagtttcctgaggccttcccagaagccgagcctatgccagcatcatgcttcccgtaagcctgcagaaccattatttctttacagcaatgtgaaaatgaattaatacagcatagtaccccaaaggtagttttttgaaccccatactcttcccacaatgccccttcaagtaggcctgagtgtctgctgttcctatctttgtgtccatgtgtattcaaagttttactcccccttatatgtgaaaagaggtggttttggttttctgttcatgcattaattcacctaggataatggcctcaagccgcatccatgtagctgcaaaggacatgattttgttctttttatggctacatagtattccatggtatatatgtaccacattttctttaaccagtccactgctgaagggcaccttgatttcatgtctttgctattgtgaatactgctgcaatgaacatacaagcgtatgtgtctttttggtagaatgatttatactcctttgggtatatagtaataggattttggggtcaatgggtagctctaagttatgtgagaaatatccaaacttctttccacagtggctgaactaatttacattcccaccaacagagtataagtgttccattttctctgcaacctcaccagcatctgtaatttttttactttttagtaatagtcatttctcactggtatgagatgatatctcattgaggttttcatttgcatttctctaatgattaataatgctgagcattcctttatatgcttgttggccacgtatatgtcttcttttgagaaggatatctttatgtcctttgcccatttttaatggagttatgtgttttacatgttgatttaaactgtttatagattctggatattagacatttgtcaggtccatagtttggaagtattcactcccattctgtatgttgtctattcagtctattgatagcttcttttgctgtgccaaaggtctttagtttaatgagttcctacttgtatatttttgttttgttgcaacggcttttggagatttcatcatgaaatatttcccaaggcctttgtccagaatggtatttcctaggttttattctaggatttttatagttttagttataatattatgcttaagtttttaatttattttgaattgatttttgtgtatgatgaaaggaagaggtccagtttcaatctactgggtatggttagccagttagcccagcactgtgtattgaataaggagtcttttgcccactccttgttattgttgactttgtcaaagatcagatggttgtaggtgtgtggctttgtttctggtttctctaacctgttccatttgtctatttgtaccagtaaaatgctgctttgcttacagtagccttatagtatagtttgaaatcaggtgatgtgatgcctctggttttgttatttttgtttaggaacgctttggctctttgcattcttttttgtttgttttatatgaattttagaatagtttccctaattctgagaagatgttggtagtttgataggaataatgttgaatctctgaattgctttgggcagtgtggttattttaacaaaattgattcttcctatccacgggcatgaaatgttttcccatttgtttgtgtcctctctgatttctttcaacagtgctttgtaattctcattgtagagatcattcacctgcaccgttaactgtaatcctaggtattttattctttttgtaactattttgattgggactgacttcttgatgtggctctcaacttggatgttattgatatgtagaaatgctactgatttttgtatatcaatttgtcttaaattttcgctgaaattgtttatcagatctaggagcctataggcaaagactatgggattttctaggtatagaaacatgtcatttgaaaatagggatagtttaacttcctctctgcccatttggatgccttttatttctttctcttgcttgacgctctggctaggacttccaatactatgcagagtaagagtggtaaaagtggacagccttgctttgtttcagttctcaaaaggaatgcttctagcttttgcccatttagtatgatgttggctgttagtttctcatagacagttcttattattttgaggtataatccttcaatacctagtttattgagtgtttttagtataaaaggatgctgaattatgtcaaaagccttttctgtctctattgagatggttacatggtctttgcttttagttctgttaaagagatgaatcacatttattgatctgtgtaggttgaaccagccttgcatcccaggaacataaagcgaacttgcttataggggattagctctttgatgtgctgctggattaagtttgctagcattttgttgaggatttttttcatctatttttatcaggaatattggcctgctagtttcatcaggaatatattgtatctctgccaggttttgttatcaggatgacactggcctcatagaatgacttttgtcagatgtatgctttgcagatattttcttctgtgctaaacaaatctacaagaaaataaaaaccattaaaaagtgggcaaaagacatgaacagacacttctcaaaagaagatatacaggtggccaagaagcatgtgaaataaaagcccagtatcactgatctttagggaaatgcaagtcaaaaccacaatgggatgccatctcccatcagtctaaatggctagtattaaaaagtcaaaaaagaacagatgctggcgaggttgtggagaaaagggaatgcttatgcactgttggtgggagtgtaaattagttcaaccattgtggaaagcagtgtggtgattcctcaaagagctaaaaacaggacaaccattcaacccattaatcctactactgggtatatacccaaaggtatataaattgttctaccataaaaacacatgtgtatgttcactgcagcactattcccaatagcaaagacatggaatcaacccaaatgcccatcaatggtatactggataatgaaaatatcaaacatatacaccatggaattctacacagcaataaaaaataaagccataaaaaataagatcatgagatcatgtccttttcagaaacatgaatggagctaaaggccattattcttagcaaactaatgcagaaacagaaaaccacatgttctcacctataagtgggagctaaatgatgaaaacacatggacacagagaagggaacaacagatactggggcctactggagggtgaaggatgtgaagagggagaggatcaaaaagaattaactattgggtactaggcatagtaccttggtgacaaaataatttgtagaataaattcccatgactcaagtttacctatataacaaacctgcacatgtacccttgaacgtaaaagttttgaaaaaagaaattcttctactgaattttttatttctagaagttcagtttggtttgttcttaaaatggctgtgtcatctttcaactcgagtcattttactgctttccttgaactgtgtttcaaccttcttcagtatctcattgagcttccttgccatcagattctgaattctttatctgtcattttagccatttcaatcaggttaagaaccattgctgggggagctggttcagtcactggtaggtaagacgacactctggcctttagagttaccagaattctttccctggttctttctctgcgttggctgatgttcccttaatctttgaagttgctatcctttcaacagggcttttgctttcatattctttgatgcctttgatgatttaaatgtgatataagtttggtttagttgattgcctttgttggtagatgctttcaaagggccaaggttcagctcagcactcttggcctacatgctgtaaccctgggggtctgggaccaagcctctggctttgttttctggcctttcgaggtcaagcacctgttgcactggaggggccaaggtgctcccagctcactggcaacaacactctgacaggggctgccagcaaaagagctgtggccaggcagtagttgagggggagattgccctacggcatggtggcatgggggcacgtgtgtgctggctgcagctggggggctgcgtgtgagggtgcacaagcggatcacccactgatggggtggcaagtgagggccctggtgagtgcatgccaatgggatgactggggtccccagtgctcatgtgcactgctcgggcgatggtgggtcttcctattcatgttgagaggctgcaggccagggggtggaggcgaggcgcgccggcggggaaggctgcaggcaggtgcacacctgcaaggatctatctgcaaaagtgttccgagggcgggggttgctagcaaaagagctatggcagcagccactggcaagcattttggcaggacagctgagactgcactgcaagctggtaaggccaggtggagaccctgggagaggctggcagactggggctcattcagatcagacttgccctgtcccgtgggcaagagagctctgctctctccaggtctccctgctaactaaggctaaagtcacctacaggagtgtggcaagctttggggtaatgggcatccatggccatactccactgcagcctttcccatgccaaaccccttgggccttgcacagactggagttctgtctctgtcaactctctgggcagttctccctgccaattaaaatgcccatggggattgtgggttctcctgcaggtaggatcctgaaggtctgtggcaagagtgggtcactacatgcctatgtttctcatcccgtccctaccagcactcagggccagaaaggagtcctggtgctcgactaccccatacaggctttccagcttctgcctgtttcagcatcctcctgtatccactctggatgccttctttccgaagatctgttcagtgtgtgttggtctcttgatgatctggtctcttcatgggagaagctcctcctggctgtggctagttaaccatcatggctctctccccaatcaaagaaaatttgtacttctattttttaggctcgttaggccttcctctaacaacacaagaaaatcaaatactgaacataggtttaaggtgtgtggaaaaaatatgtgaataataaagtaatgcttttgtcttgccctgtcatgggtatgtttctcgtcctccagggccagtgctgggtaggttggtgaggagagagggaggagacactcagaataattatagtaggatgaaattcttgctctctctgtttcatgggcaagaccaacagaagggttaagagaactagaatctaatgcagaatgaaaaaaatacaaatccatgttgctcagagttttatggaattaatttctgtgtgaactcagggaagaggggaaaggcgaaaggagaacttggtagaagagtgtatgtccctaggatggctgaccatcagcctcattttctgattaccacaaagaggtcctgacctacctcaattaagccacctacagacctgatgggctctactatggcaagaacttctttgctcttgtggttatagttcagttggatgagaagttctcttcacccagatagtgttttaaaaaacgacaaatggcagcagaggcacagagtttatcctctgagttgagtaatgtgcagcaagggcacttcctcatcaggaggatatccaatattccattatcaactggacacttttctacctgggctgatgcactactttggactcaggaccctctgttgtttaatttcattctcagataagaagtaatctacttgtaggtgcttgtacatttgaacacaggcaaccagatgccctccagacaactgaggagagcatttgctcgtaaatgctttcaggattcctagaaacagcatacagtgtatgaagtcatcagttactttgtgaattctcatcttcctaacatcaaaaaactaatcaagaatctgttccaaaaaattaccctctgcagggaataggaggactattaagcaaatagtaactcgacacttatgtcagaaatcaagatttggtctcattgttttgtcgtattaggggtaggtgggtgtggtttcattcatatgtataaaggatttttctttgtttccattatgcatggaagacttctccgccaaaaatatgtatgaaatagaataaattatccattgaataggcaattaattagttcatttgatttgtacatgtacaattcaggcgtcagttgacaataaatatttgcacaaataaatagttgcacaagcctccagtactcttcaagtgtaaagtataattgccagccaaactttctacagatttctggaggcatgtgtaacttatccaaggcattggtgtgtgataggctttattaaaggtatggatgacatactgatctcaactaatagaaatgcaaacagcagtactggctatcggaccaccttgatatatcatttactgccagccatgttaatcaagatactctccctaaagtgtttctcaaccttcattcttcctagcagagatatttcgtcactatcttttactcaatcccagttttaaaacactgaagatattttggggagtggatataattctggtggttatgtatttttcctcccagctttgtttaggtttttgtttgtttgtttataaggaatataacagctcattcatttattttgttcacaagacaatatttattgaaacctactatttgccaatcccagtgttacatttgaaggactcagtgaccctgggatttagtcattaggttttatgggagaaacctgtctaaagagatacaggagggatatgtcaacatatcctgagatttgtttgctaaccaaatattccttttaaaatgcttttaaattccttctcacaaagcctcaccatgatttgaatggctgcactgtgagggcagtgtgttactggtggacgtgttaatgttcatgtcaactgtatgaggacagaacaacagcttagaaccaaccacagtgctatgtatttaaggcaaataccccagaactacaagctggggaaattgcttttttatgatggaaaacagacaataagcaactatgactggcagtcagtttttaattagtcttaatagctaaacctaatgtctctgactgggacaaattattcagtgaattttaaacagagtagaacttaatcatttgccaagtgggtttttctatatttgaaaaagcaaatatattgtgaacacaaaatgcattgggtgattttaacacaaaaatctgagaattagaaagttaaggttgataattttttaattatactttaagttttagggtacatgtgcacgttgtgcaggttagttacatatgtatacatgtgccatgctggtgcgctgcacccactaactcgtcatctagcgttaggtatatctcccaatgctatccctcccccccacccaccccaccatagtccccagagtgtgatattccccttcctgtgtccatgtgatctcattgttcagttcccacctatgagtgagaatatgtggtgtttggttttttgttcttgcgatagtttactgagaatgatgatttccaatttcatccatgtccctacaaaggacatgaactcatcattttttatggctgcatagtattccatggtgtatatgtgccacattttcttaattcagtctatcattgttggacatttgggttggttccaagtctttgctattgtgaataatgccacaataaacatacgtgtgcatgtgtctttacagcagcaagatttatattcctttgggtatatacccagtaatgggatggctgggtcaaatggtatttctagttctagatccctgaggaatcaccacactgacttccacaatggttgaactagtttacagtcccaccaacagtgtaaaagtgttcctattggctgggcgcggtggctcacgcctgtaatcccagcactttgggaggccgaggcgggcggatcgcgaggtcaggagatcgagaccatcccggctaaaacggtgaaaccccgtctctactaaaaatacagaaaattgtccgggcgtagtggcgggcgcctgtagtcccagctacttgggaggctgaggcaggagaatggcgtgaacccgggaggcggagcttgcagtgagccgagatcccgccactgcactccagcctgggcgacagagcgagactccgtctcaaaaaaaaaaaaaaaaaaaaaaaaagtgttcctatttctccacatcctctccagcacctgttgtttcctgactttttaatgattgccattctaactggtgtgagatgatatctcattgtggttttgatttgcatttctctgatggccagtgatggtgagcattttttcatgtgttttttggctgcataaatgtcttcttttgagaagtgtcaagctaccaatgactttcttcacagaattggaaaaaactactttaaagttcatatggaaccaaaaaagagcccccatcaccaaggcaatcctaagccaaaagaacaaagctggaggcatcacactacctgacttcaaactatactacaaggctacagtaaccaaaacagcatggtactggtaccaaaacagagatatagatcaatggaacagaacagagccctcagaaataacgacgcatatctacaactatctgatctttgacaaacctgagaaaaacaagcaatggagaaaggattccctatttaataaatggtgctgggaaaactggctagccatatgtagaaagctgaaactggatcccttccttacaccttatacaaaaatcaattcaagatggattaaagacttaaacgttagacctaaaaccataaaaaccctagaagaaaacctaggcatcaccattcaggacacaggcatgggcaaggacttcatgtccaaaacaccaaaagcaatggcaacaaaagacaaaattgagaaatgggatctcattaaactaaagagcttctgcacagcaaaagaaactatcatcagagtgaacaggcaacctacaaaatgggagaaaatttttgcaacctactcatctgacaaagggctaatatccagaatctacaatgaactcaaacaaatttacaaaaacaaacaaccccatcaaaaagtgggcgaaggttgataatttatcatttacgtagacgacaatacactgtaaaatatttatattaccagtttgaacaaatatattttatttcataaagatgaggcttttttcataagtctgttaattagggaattaggcaatactcattagacaatagtaaaactatatctatatttacatatatgtgatgatataaatgataggaatactttttagtgttgcagaagtactcgctcttcccattcatatgccttattatgagaattcccaattttactgtggaaatgaaaggacgcattttttaaaagcctaaaaaatattgaagtcagtaatgtggtttctgatatttagatgcagacactgaaatgttagcattaataaaaaaaagacttgaaacaaaaaggagggagattgctatcatcagcatggccctgagcgccatggattcatctttgtcattgatgtcttttatttttgctcataactgtgtatagaattagcacatatctcttttttgtctctctatataagtaagtatagctttctgggatgacttgtgggatcctctgaagggagaggcaatggcagagtagcttttatagctttgcagctctaggggtccctctgttgctgttcaaatggctcaaagtagcactttctttgaggccacttctgtgtgtcagagcgaagtctggtccaggaggacattctgcttccttctgttccagccccagaacgccacaggttttgggaagctgtatttagctgttgcatcactttcttgtgtctgctttctctaagccctttcctctacgatcagagccttctttctctcttatgcaagtggatctttatttgcttaatgtactttcctttgggctgaggctatatccttttggaagagctcatttgctggacatttttgagattttcaaatgctgaggaccaccacagcacttctttatcctcttatgtttatgagcacttagagcctgcaagtattgttcccagtttcaccagtcaatctcaaaaccatatgcccagatttttgcttagtatacagtcctctccaattgggggcaagatttttctgtcatgtgattttgccaaagatgtcatctgtaagttttaattttgttttgcttttctctcctcgttgcttaatgagacgttcagggggtgtttgggagaaattcaagtctatactgcaactatgtttagtaaatgatcatgttatttgatccctatggctttattttaaaaaagttattccatgatcctatgaggaaaaaaaattattagctattgctttttaaaaagtaattttcttcttacatgtcttcattccctaatcatccattggagttgagttatgccatggcctgtccactaactgtttactctccagttaaagtccacatatcattctttttaaatctgttaagtgtgcacctgcctgtgtggcctgggttgtgtcttcttggcatggtttttcagaggatttctttctttgtggctttctctgtgaatttgctgacagccttcagctatccctcttctgctcaggcatgtgcttaagcttgttgtctgggttgctcactgcaggacacgagcccatatttcagccaactatgctgccaagcaaccactgccactgaagtggacttgccagcccatcaatcaacaacctctgttaggcttcgatttggagtgttgattagctgcctctagtcattcaatcctctctgtagtcatgcccaatgatgacagcatgtgacttttctataaaacatttttctttgtactaaacttctgaattccatgtgttgtatggtttctatttttgttccattttacagaactctggattattcttatttatttcagaagtgtaaacatggtcacagctattacatatctttagtttttgagtttaaagatattcagaatgattaaatattctgggttgatatgatctcaggtaacataatctacattataacattatataacgaatgtatgcattagtttttgtctgtttctgagaattacttgaaagcatagatgttattagtacattgggacaaaaaggattcagttcaagactctctttcttgttgggtctgagagaagtcacttgtggcaacctgtgacagttaattacaacatagggcagcctgatgttttgcgttacaagttgtagcctggctaacccatataacttctggcaggtacacaattataggtgtacgtctggagggagattgaaaggctccgaaggactaacctggtacacccaaacatcagcaacaacaaagaaactctaagcctttccaggacagttttccttgatcagaacttagctcccaataacatcttgtgtagtctcctgcgaatctccttagtcttgatggaatagataattgggtagagcattggaggtacaaagagacatgaacttgtgcacatattcaggagcatgcctcccaaatcgatgaaccatggacacactaaccataggcacatagaagatcagcactgcatagatatgtgacacacatgtgttgagtgtcttaagcctctcacccctggaggcaatggccagcacagaatgtagaatgagcacataggagaggaggatgagcagtgaatctacaccaaaggcagagatgacaatgaacaggccatacatgctgttgatggtagtgtctccacagggcagccgaatcaggtctgcatgcagacagtaggaatgggccagtaccacactggccttacagaaaggcagtctcttcaggaggaagggaagtgggaataccatgcagaagctgcggatgacaatggatatgccattgtgggccacacggacatcagtgagcactgtggcatagcgcagcgggttacagatggccacatagtggtcaaaactcatggccagtaggatgccaaactctgtccaggaggaaaagtggatgaagaacgtctgggccaggcaggcatcaaaagttgtctctggggcatgaaaacacacagcagccagtacagtgggcaatgtagaaaaggacacacccaggtcattaacagaaaaaagagacaggaagtagtacattggctggtgcaagctctgctcttcctttatgataaagaggatgaggatgttgcccaggaaggaaatagcacaaagcagcagcagaagggcagccagccagtgctccagacccttcatctcagggaagcctgttagagtgaagctggtagtacttgagatgttagtcccaaagccccccatcagggtttctgagtgacttttaggcaaacgcaacctgggtgaattgaggtgagatggtgggagaagtgaagactaggagtggttgatatctaaaactaggagagacaatgatgcttagattccagtgccaaagatttggaaagttcaaaaaaaaccagattacatttcagaccttctatagcctggcagcacccttagatctgtcatgagctccaggttcttccccatagaaacctttgactaatttttagatattatcctttatttttcttgtgtctatatagttttttacattggttgacgtctttctctaatggtgaaaaatgatttcccctttctctctactgggtcatagccatcagtttcttccataagtgaggtgcaccatgtcctccatgaagtctttccttaatattcccacccactgattgattctgtcttgtgcaagtgatgacatcttttgtgtatattctaagctgtctctcctctcttgcctatactcaagcattatttcagttctctgccttttccttgtggcttgaacccctcacttattcaccaagggtccagaatgtcacattcctccacacctgactctcttggttttgcctttctatattttaacatggattttgttttaatctctgtttagaccacagattctcaaattgtgctgtatgctagattattttaagaagcattaaaatattcctttcctcagaagaaacctataccaattaaatttgacactgtgcaagtagaactcacaaatcagcatgtgtttaaactcataggcaattcccgtgtgcagccaagtgtgagtatcaggaatttaggtcactcctatcagcattcaaatatgtcccacccattatcacttcttccccccgaggatcaattttgggagttactatcgtagaaaacaaacaatcacaaacttcagcaaacctcttaattgccccctcatttcttctgagtaatcacccattttccactcactttcacaactaataccttggaaattattgtctacccataatgtcctccatgtctctgctctgtgcctcaattatcccaaatatatgtctgctgcccaggcttctcttctcaatatgtattcacgcagccaatttccaactggacttccaaatgtaagagttcattgtcatcttaaacataatgtgcaaaattgaactttatgtcaattatcatgttttatcctcttcaaagttatcatctcatcaccagtcaccatctattcacgtggtcatgccagaaaaccctggaagtcattcttaatatttctcaccctctcctatttacaagtctattaatccatcgtaaacgctggtttcctctctccatctcacttccaactgtcactcatccctcaacatcttcaaccaaaatatctgcagaaccttcctgaggatcacccagcttagtatcatgcctctgtctaattcattcgacacaaagcaaccaaattatttgtttttaatataaagtgatgttactcttttactagaaacctatcaatggcttcacttaccttatgaaataagaaataaaaattcaagtccttaccatggatcatagaagctgcaagaccacataagaacttgtcgtcttccaataattctgatcattcatttcatttcttctcataattttggctgctgtacatactcacacatattcttctttgtgacttttcttatcacagcttaaattttagtgcatttattatgtacttgtttagttatttgattagtatctttgtttccccaaaaatttataactccctgtaactgtctgtgtttcttctcattttattctcaatgcttaggcaagtgacagggcatagagagccctagactaggactcagagattaccagttctagttttaatggttaaaatattgatcaaataggccaggtacagtggctcatacctgtaatcccagcactttgggaggccgaggcaggtggatcacgaggtcaggagtttgagaccagcctggacaacatggtgaaaccccgtctctactaaaaatataaaaactacccaggcgtggtcacacatgactgtaatcccagttactcgggagtctgaggcagtagaatcccttgaactcgggaagtggaggttgcagtgagctgagatcgcaccattgcactccagcctgggtgacagagcaagactctgtctcaaaaaaaaaaaaaaaattgatcaaataaaacattttattaacaggaagaatgtattaacataagagctacatgtttttactgtaaaattgtttaggtaagtaaaaatagctcccctagcatctaataactgagtttttatttcacttttgctacatacaagctgtgaatttacttagcttcctcacgtcttattttcacatctctagaatagaaagagtaatgcaaagtaaacattgaaggtgcttattcagactcccggcacaagatgtactgaataaatggcaactaggaaagttgtgataaagagggacattgaggggctgaaagttccggatcccatctccaaactgtcttcccacattcagtttcccaatcaaaggttcccttcttttgtttcaccattttatccaccatctatgagaatattggcatatgagttaatcgcactgaggcattcacaccaaacaaaggcttcagaagatgcacctctgagccagagctgtacacgctcagaaccacacagtgaagctccaagcacgaagccagcatagtggcagttcaggcaccaactagatgggggatgtgcatgtggggagagaaatggagtgtaggaaaataaaaattaccttaaatcacagactgtctctccttcaaatccctgtaccctaatcactaaaggatttcgaagctatgaaggaggtgcctgagggcctctgtgggggaagagatgaggtccccacttacctcctcagggtagctctggtgggtgggaggagagaggctggtgaagtgtccactgaagggagaaataccaagtactgcacacactgcacacagccccactgccagcctccacccactccctgctctgagctctataaagctgcgtcttcagagtcccctggttctgctaagtccaagggctccaagaggtagctgggcagcagggattctaaaaaatcttgagtgaaggactcctctgtgctctgccatttctcccacttagaagtttcaaaggaattgagaatgaagactggcttgtcctgaagtgatcaacattttcagctcctcattttgtaggagagctgacgcccaggaagaatccattcagtaagccaataacagagctgaactgaatcctagaccactgattctcactgattctcagattagggttctttccagtaagcataccacaacttaaatgcatttcaagaagtcaaagggcacaacggagaggagcctaattatttagagtcatcaaataaggtgaccatccttgtttgccccatcctgtactggttttaacactgaaagtcccgcattaggagaaactcctcagttttggcaagctgataacaacttgccaccctactgccagacctggattcaaaacaagctccttccctgtctaaatgaatgtcattaagaaaattagttgatatgttcatgtttcaaattccttatttgtaaaatgatacacaaattcctacacatcttggcatatttgaaacagtatcacattgtaaacacttattaaacaagaactatcataaagacttgccaattttttatatgccagaaaaaaaatcttgaataaggggtgcaaatgcctgttgactctggagttttggaggagtctgaggggtgtttgacttttaagaaactaatgtaagggtcttaaattttgtaaaaggatgtcggggccatcttgtatcacattcaacctttcataatgaagaaatgaaggctttaaggggtaagaagcttgctgatatgcacagacaaattatttaaagagttagaaattgtacagagttcaaacagtgttagataattataattatcctgatgcagacccaaattatctgcatttatcttggctgaagagttaatgtgagaacaatatttatttactaagtatctgtgattctgctaggttttttgacacagttagctcatttagttatcagtgaaaaccttatgaatacattttatcatacttgaaagcaatatggaattatttaatggaaaaataagcatacacatttagagcatcagaagagtattcaaattctttataaatatatgtgtgtaatatttgatgccttaaaacacatcaaagacttcctcatgaaaaactagaacttcattggaaattttacaactgttttaaattataggacaaaaaatttaattgttttaaattacaaaatgagtgtgtgtgtgtgtgtgtgtgtgtgtaaatgtgtgcatgagaatggggagagagtgtgcacgggaaagtacctgtagttactaggaaatgagaaaaataagtctgccttcttagaattcatcagtaattccatcacaagacatcagaagagggacataaaaagacacccttataggaaacaatgattcccaaacatttgagatttgactgatttaacctaattacaaatataagccatggaaaataattactatttattgatgaccaagcacataccataaacttacaacaatcttcatatgcattatttaatattcaaagcacctatgagtatttttattcaccttttgtagatgaaatatctgaaattcaaagagattacacaacttgccatatcataaaattattggttgagaaaagatttcatttcaatccaggattaaaattcatgattataaacagatgtactccccccaacacacacacataaaatcaccacttacaggaggagataaaggcgaacaacacaagagacttgaaggacaacaataatcaagcaggtctatagagaagaccctactagcctgctaagtaccatgatttaatgaactgttttttaacaaattaataatttaaccaattaataaattgtttttggagattgatatttatctatccaaacttaagacacgaaatttttgaattttgtagttaagccttttcctcttgtttgttgtttacccagaaatataatcatgatatgtttctccccaggtagtgtttactattcaagttgacaagataatttgtgccaatgcaataattctatttctcattggaaattaataacatcacacatacatttcaatgtgttggttagtgtaaactcatctttgagagaaaaaaccacgctgaaggaggtgctcaggtatgacagtgaacaggataagcattttctcaaatctcacagtgatcaggacaacaggctaaacaaataattacatgcattaatttgctttagagagtaagtttggggtggtaggaataggaaccactttaatggagaagaactaaaataatctggaaaattagtttaattgagaccagaaagataaactagaaatggccagataaaaggaggagtaagctcaataaataggtgtttgacttatgaactctacttgcaaaaatattatatccttttggatccaaatcctgaatatttttctgctttactgacgtcttaccagtcctacagtcactctctagacccaaatatcaacatttcaataacatcttaatggacttccccacattattcagccctcttctaattcattctccatattacatcaatattaagtcaactttcatcatgctattttcatgatgataaaatccgaacactcatattgcctgtaaaacactgtgtaatatgatcttcattttcaactttacattgaatatattcaatcattgttctcttgttctgttccaaccaaaatgacctcctttcagttcctcgaagatgcaaggatcactccaacctcaaggccttaacaaatgctgtttcacatgtcctggaagcttttccccatgcactttcccttcactgggctagttatttatccaccaactcttggtggatattaaatattatttaaatattactgccttatggatccccctaaccccttagcctgaatgaggatctactaatacttacataacattctctagtgatcttgtctaacatcttgcagagttatgattaaatgatctaacataaatggaaaagtatgcatttattgcctttcttctatgttattatgtaaattccatgaaacatgaccatctctcctattctttaatatattcaaggcacccagcatgatgtttagcaaatattaggcatacaactaatatttttgccataaccaaaaccatcagcataacagcatcagcattccttccacaagcttttgcaaaattggatgacacacatggtagggtacatgtgactagcatacacctattcaacctatgtttctttgccattgtatctagatccatagcagcctcacagtaccatcttgtagcatggaccacactggaggcttgattctttttagatgaaactgaattccagtccaaaccctctcttcatgcctcacataaaatcctcataaagtgatttactcacttttctaccttaattaatccaagtccatgcgcagtagagaaatctttagctctataggctgtgttagagaatccttttcttggataccacagacagtaatcatgacatctcagtggattataactatttccccccagtaataacattcatgtatacttattgagagctttatgtgttgactaattctataaactcgtttaaatttgaaaacattatgaaacagattcatattttgcatatcaaaatggagccactgtgagttaaataacttatctatagtcacaaatcacacaagtgacaacaccagcatttgaacctaggtactcttagctgttatgctgtatggccacaagggggcactcagagggtaaatgcctgtttgtatcatactccaaggattcccttccatgctgaaggggtctgacatgtttaggtgcccaaaaaatagtcactggatgaaagaatgagcctcctttgtgacttggtatctcttaggtctccagcctaaactgagaccatcagtatttcatgtatttacactgaacaagccgataagaggaaggacaagaactgtaagacttttcacagtgatgtcaccaacccaaaataataccagtcttggatttgggattcagactatgtgagtttcatcttctgttctttgacttactagttgtgttatcctagacaagttacttaatctgttctttacacttcagtgtcttcagctgtaaaacaagaataatattttacctatatcattagcttgctgatatgttacagagttagatagctaactagctaggtaaagtaaaatatcctctgaagtttacctagcacattaacaggccatcgaaaaacaggaagatattggtcaaaaggtacaaagtttccgttatacaagatgaataagtcctaaagatctactgtacaaaataatgcctatagttaacaatactgttttgtatattttaaaatgtgccgagagggtagatcttaagtgttttcatcatcataaataaatagagtgggaaggaacttttagaggtgatgtatatgtttatgatatggattgtagtgatggtttcatggctgtatacttatatccaaactcatcaactgaatttcgtgagcgccaggggagatgagtctcttgggggccccatgagtagtgatggtgggccctttgcagccaataaccacatctggagaaaatggctctgacaggaaagagaaacacttatcccttgagatgagcacagaggtgcacttggagagcacctcagtggggaaccagtgggcaccacaatcctaccggtcaccttgaggctcacctccttgaagctcccaggttcattcctgggagcattcctgcctgcattcatctcaaaatctatcctctttctgtctcagtttattacaaacctaatttatatgtattgggggaggagccaagatggccaaataggaacagctccggtctacagctcccagcatgagcaacgcagaagacgggtgatttctgcatttccatctgaggtaccgggttcatatcactagggagtgccagacagtcggcgcaggtcagtgggtgcgcgcaccgtgcgcgagccgaagcagggtgaggcattgcctcacttgggaagcacaaggggtcagggagttccctttccgagtcaaagaaaggggtgacggacgcacctggaaaatcgggtcactcccacctgaatattgcgcttttcggactggcttaaaaaacggcgcaccatgagattatatcccgcacctggctcggagggtcctacgcccacggagtctccctgattgctagcacagcagtctgggatcaaactgcaaggcagcagggaggctggggaggggcgcccgccattgcccaggcttgcttaggtaaacaaagcagccgggaagctccaactgggtggagcccaccacagctcaaggaggcctgcctgcctctgtaggctccacctctgggggcagggcacagacaaacaaaaagacagcagtaacctctgcagacttcaatgtccctgtctgacagctttgaagagagcagtggttctcccagcaagcagctggagatctgagaacgggtagactgcctcctcaagtgggtccctgacccctgaaccccgagcagcctaactgggaggcaccccccagcaggggcatactgacacctcacacggcagggtattccaacagacttgcagctgagggtcctgtctgttagaaggaaaactaacaaacagaaaggacatccacaccaaaaacccatctgtacatcaccatcatcaaagaccaaaagtagataaaaccacaaagatggggaaaaaacagaacagaaaaactggaaactctaaaaagcagagcacctctcctcctccaaaggaatgcagttcctcaccagcaacggaacaaagctggatggagaatgactttgacgagctgagagaagaaggcttcagacgatcaaattactctgagctacgggaggacattcaaaccaaaggcaaagaagtggaaaactttgaaaaaaatttagaagaatgtataactagaataaccaatacagagaagtgcttaaaggagctgatggagctgaaaaccaaggctcaagaactacgtgaagaatgcagaagcctcaggagccgatgcgatcaactggaagaaagggtatgagcaatggaagatgaaatgaatgaaatgaagcgtgaagggaagtttagagaaaaaagaataaaaagaaatgagcaaagcctccaagaaatatgggactatgtgaaaagaccaaatctacgtctgattggtggacctgaaagtgatgaggagaatggaaccaagttggaaaacactctgcaggatattatccgggagaacttccccaatctagcaaggcaggtcaacgttcagattcaggaaatacagagaacaccataaagatactcctcgagaagagcaactccaagacacataattatcagattcaccaaagttgaaatgaaggaaaaaatgttaagggcagccagagagaaaggtcgggttaccctcaaagggaagcccatcagactaacagcggatctctcggcagaaaccctacaagccagaagagagtgggggccaatattcaacattcttaaagaaaagaattttcaacccagaatttcatatccagccaaactaagcttcataagtgaaggagaaataaaatactttacagacaagcaaatgctgagagattttgtcaccaccaggtctgccctaaaagagctcctgaaggaagcactaaacatggaaaggaacaaccggtaccagctgctgcaaaatcatgccaaaatgtaaagaccattcagactaggaagaaactgcatcaactaacgagcaaaatcaccagctaacatcataatgacaggatcaaattcacacataacaatattaactttaaatgtaaatggactaaatgctccaattaaaagacacagactggcaaattggataaagagtcaagacccatcagtgtgctgtattcaggaaatccatctcatgtgcagagacacacgtaggctcaaaataaaaggatggaggaagatctaccaagcaaatggaaaacaaaaaaaggcaggggttgcaatcctagtctctgataaaatagactttaaaccaacaaagatcaaaagagacaaagaaggccattacataatggtaaagggatcaattcaacaagaagagctaactatcctaaatatatatgcacccaatacaggagcacccagattcataaagcaagtcctgagtgacctacaaagagacttagactcccacacattaataatgggagactttaacaccccactgtcaacattagacagatcaacgagacagaaagtcaacaaggatacccaggaattgaactcagctctgcaccaagcagacctaatagacatctacagaactctccaccccaaatcaacagaatatacatttttttcagcaccacacctattccaaaattgaccacgtacttggaagtaaagctctcctcatcaaatgtaaaagaacagagattataacaaactatctctcagaccacagtgcaatcaaactagaactcaggattaagaatctcactcaaaaccactcaactacatggaaactgaacaacctgctcctgaatgactactggatacataacgaaatgaaggcagaaataaagatgttctttgaaaccaacgagaacaaagacacaacataccagaatctctgggacgcattcaaagcagtgtgtagagggaaacttatagcactaaaggcccacaagagaaagcaggaaagatccaaaattgacaccctaacatcacaattaaaagaactagaaaagcaagagcaaacacattcaaaagctagcagaaggcaagaaataactaaaatcagagcagaactgaaggaaatagagacacaaaaaacccttcaaaaaatcaatgaatccaggagctggttttttgaaaggatcaataaaattgatagaccgctagcaagactaataaagaaaaaaagacagaagaatcaaatagatgcaataaaaaatgataaaggggatatcaccaccgatcccacagaaatacaaactaccatcagagaatactacaaacacctctatggaaataaactagaaaatctagaagaagtggataaattccttgacacatacactctcccaagactaaaccaggaagaagttgaatctctgaatagaccaataacaggagctgaaattgtggcaataatcaatagcttaccaacctaaaagagtccaggaccagatggattaacagccaaattctaacagaggtacaaggaggaactggtaccattccttctgaaactattccaatcaatagaaaaagagggaatcctccctaactcattttatgaggccagcatcattctgataccaaagccaggcagagacacaaccaaaaaagagaattttagaccaatatccttgatgaacattgatgcaaaaatcctccataaaatactggcaaaacgaatccagcagcacatcaaaaagcttatccaccatgatcaagtgggcttcatccctgggatgcaaggctggttcaatatacgcaaatcaataaatgtaatccagcatataaacagagccaaagacaaaaaccacatgattatctcaatagatgcagaaaaagcctttgacaaaattcaacaacccttcatgctaaaacctctcaataaattaggtattgatgggacgtatttcaaaataataagagctatctatgacaaacccacagccaatatcatactgaatgggcaaaaactggaagcattccctttgaaaactggcacaagacagggatgccctctctcaccactcctattcaacatagtgttggaagttctggccagggcaattaggcaggagaaggaaataaagggtattcaagcaggaaaagaggaagtcaaattgtccctgtttgcagatgacatgaatgtgtatctagaaaaccccactgtctcagcccaaaatctccttaagctgataagcaacttcagcaaagtctcaggatacaaaatcaatgtacaaaaatcacaagcattcttatacaccaacaacagacagagagccaaatcatgagtgaactcccattcacaattgcttcaaagagaataaaatacctaggaatccaacttacaagggatgtgaaggacctcttcaaggagaactacaaaccactgctcaaggaaataaaagaggatacaaacaaatgaaagaacattccatgctcacgggtaggaagaatcaatatcatgaaaatggccatactgcccaaggtaatttacagattcaatgccattcccatcaagctaccaatgactttcttcacagaattggaaaaaactactttaaagttcatatggaaccaaaaaagagcctgcatcaccaaggcaatcctaagccaaaagaacaaagctggaggcatcacactacctgacttcaaactatactacaaggctacaataaccaaaacagcatggtactggtaccaaaacagagatatagatcaatggaacagaacagagccctcagaaataatgccgcatatctacaactatctgatctttgacaaacctgacaaaaacaagcaatggggaaaggattccctatttaataaatggtgctgggaaaactggctagccatatgtagaaagctgaaactggatcccttccttacaccttatacaaaaatcaattcaagatggattaaagacttaaacgttagacctaaaaccataaaaaccctagaagaaaacctaggcattaccattcaggacataggcatgggcaaggacttcatgtccaaaacaccaaaagcaatggcaacaaaagacaaaattgacaaatgggatctaattaaactaaagagcttctgcacagcaaaagaaactaccatcagagtgaacagacaacctacaaaatgggagaaaattttcacaacctactcatctgacaaagggctaatatccagaatctacaatgaactcaaacaaatttacaggaaaaaaacaaacaaccccatcaaaaagtgggcgaaggacatgaacagacacttctcaaaagaagacatttatgcagccaaaaaacacatgaaaaaatgctcatcatcactggccatcagagaaatgcaaatcaaaaccacaatgagataccatctcacaccagttagaatggcaatcattaaaaagtcaggaaacaacaggtgctggagaggatgtggagaaataggaacacttttacactgttggtgggactgtaaactagttcaaccattgtggaagtcagtgtggcgattcctcagggatctagaactagaaataccatttgacccagccatcccattactgggtatatacccaaaggactataaatcatgctgctataaagacacatgcacacgtatgtttattgcggcattatgcacaatagcaaagacttggaaccaacccaaatgtccatcaatgatagactggattaagaaaatgtggcacatatacaccatggaatactatgcagccataaaaaatgatgagttcatgtcctttgtagagacatggatgaaattggaaatcatcattctcagtaaactattgcaagaacaaaaaaccaaacaccgcatattctcactcataggtgggaactgaacaatgagatcacatggacacaggaaggggaatatcacactctggggactgtgatggggtggggggaggggggagggatagcattgggagatatacctaacgctagatgacgagttagtgggtgcagcgcaccagcatggcacatgtatacatgtgtaactaacctgcacaacgtgcacatgtaccctaaaacttaaagtataattaaaaaaaaaagaaaagaaaagaaaagaaagagtagaaagtacagctaaaaaaaaaaagaagagaaaaggaagacaaggaaagaagtgaaaaagagatcagaatagaggaaaagacaggctagctgtttaatttcaaattcccttgaaaactcactggaaaatttcccttgctcatttttttctcaattatcaactgcttcttatctttccctcaatagatggaccacagatcaaatccttaggggatgccacctgggttttcccacctgcacatcacagaaagtcaataaataaccccgtttaccaatccccttgactagaggaggcagaaatacagagctgaactgaagacattagcccagaaaactgagaaaggacaagacatttcaacacgaattacacattcagaccctccactctctcataccatactcccttgaacctgcagagaaacacagccttcacttccctaaacaaaactttgcatccagacacacacctcctgccaaagccactgcaccaccacactctttctcccacacagtttcaccctcatacacacacctttacaccgaggtccaacttctgcatgctccacctgcaaactcatgtctcttgtgcaggtaagttcttgaaatcagattcctcagcaatatgttcagtcaatgaactcacagctaagttactgacatctaggtgtaagatggggacccagacacaggatcctgcaacaagttaggaagggtgcctgtattgtgaacctaaatgatactcaagttcaatatcgttttcccactgttttctaaagggaaataaatgggacctgctcctgcctcaatctttctggtccacacatccttagataatcacagagtagcagttaccttacaacagttattttaaagctttcttagagggcaagaataggccagaaagaaaggagaaaagaagatggtagtgattccagctctctagactctgtcgtccaagcttgtttcccctattaacacaggtcagtgccaatgctgagcccaaaaccatctagtgtcatcactaaaaaatatcagtgcaatgcattatgataatatctaattttatatagtactccacaaagacatgtgttcacttgatcttcccaatacttctgtcagaagtagaggaggacttgtcttcttcggtttaccaatgggagaggttaaatgacctgcccaaggacacaaagccaggaagtagcaaacctgggccttggcccttgtctttgaacaacaaacccgacggtattaccacagtaccaacttgcctctggctaaataaacaaacattacatatgtattatttcaaaatattattatgggcaatgtgagaataaacctgccttttaaaaaagtttttatgctccaatacatgttatacagtatcaatattcttcatagctttataggttttggttgattttagcactttcagatttgacaaactggcattatacagattggctactctttctctggcaatgaaaagtacatcatctacataacctgcaaagaatatggtaccctaactatgatttcaaaagaataagtcagaagcagatttcccatcatagcacccctccaccaaaggtgatggaaggtagatctctgctgttctccccttcactcttagcccagcaaaagaaaaaggataaaagaatacacagtacacaaatcctgcaaaattttaccaaagcacatatgacataaaaataaccttcctctcacgttttctaagtgcatcaaaaagaaggttaacagtaataatatcaagaattgaggcaacgttcagaagttataatagtgagagctctagaaatagatgtatctttcccacaaaaaatgtgttaattgtttctccagctattcagccttgcatccctggtgccgtcagcataagcacctgatggactctgcttgggctgagcaatgaatttgagcctgaacttgcagatcaccagcaatgtgatttctcccttaaggatccccctccaactcagagtgaaagtcaaagtcccttctgtggcctaaggatctagcctatcttgcctatgctccttgcacccccacttctagtcctccagcacaaaagcctctttgctgcttccaaacccatcaggcaggcctatgtctcaaagcctttgcacttgctgtccccctgtctgaaatgttcttccttctgagatctgcatggctagctcttttgactcaaggctttgctcaaatactaccttcccagcaaagatttccctggatgtctgttacaggctgaattgtgttggtctccacacccccaaattcatatgtcaaggtcttaattaaccctcagcatctcagaatgtgactgtatttaatgataagatctttaaagatgtgatagtttttttaaaaaatgtggtcactaggatgtgccctaatccgatatggctgttgaccttttaacaaggggagatgagggcacaggcagagagggaagaccaactgaagacacaaaggggggtcatctacaaggcaaggagaaaggactcacaaagaaccaaacctgccaacatcgcgatatcagacttccagcctccacaactgtgagagaatatgtttctgttattaaacctctcagtctgtggtgctttgtggtgacagccctagcaaactaatacaatgccctaattagaatttaccccactcccactacctctttttctttctgttttattttttcaaagtccttatcattatctaacatatattttacttctgcattttgtttgctatttatctgcctttgctaaaatctaagctctttcacggcagggatttttgtctgattgttcattgctgttaccccagttccacacagtgactggtccatggtatgtgccgctaaatactgttgggttactggagacctgaggaggaggagagggaagaaatgtgggggcatgtgacacgaaaatgtaagactctgctttgggagagcttctctggaaacttcttgactcacttctgagattgagcagccacaagcagctctttagcttctaagtttgcctaagacatctacagagcacacaatgggcatccccgcccctgcattcatcattgtttccagtctctcctctgcattttaaaccaaagcagagggtaggaaggcagatgagctaagtgtctgggctagataggaacctctagcacagccctgcactggctgatgcccatgactttttgtttgctctgtatcttttgtctcataacttcctaaacaccatcggtcatcagttatctttactgcagtaaaatcgtgtttctttgtattacagtcctaggtgctctgttatggtaggaatcaataagatgcctcctgttcttacaaaaaaaaaaatctcaatgcaaataaaggggacttcctaattccacctctttggagctaagataatgagtaaagatacttcagcactaggaattgatattagacaaaaaagatattagcctcatttgaaagagataggaattcaagtattggacttattaatggacagtagggtgaggcaaaaacgccaaactctgaatcaagggacatgagacctaatcatagttctgcaaataaaatgcctcgtgatctaaattatatcagttcacttctctgggattggtcttttcattggttagggatgtaaatgataactgtactctcttttatcgagagtatatgttgttaaaatataaatatcttatttttttaggaaaaaataggggaattattctgggtatacaaatgtttaattccatgaatagtcatcttttgtcaaccacaaaattttgtgaagttaggtcagatggtgtcattcccaatttaaagataaaaactaagccacaaaaaggctttggaatttttttcaatgccacatagtgagcagacagaaaatcagagaatgactacattcattgccctttctaaattgagactgtccagataagtaagagatttgttcaaagtcacaaatcaataatgttacagaatcggggctaaaattcagatttcctggcatttctactcagaattcttttagggatacatgttactgagacaatgtgtataatactagctatccctctacagcaagaacagaatccccttccagtccctttatgggtggtaaatccagaatacctcactttttatatctgtctctaatagcacttgccattctgatctgacctcacagccagccattatagtggtggattggaggactatacgctggctttgtcatggttgagtgcagtatcctcaacaagcatatctgatttacctcacacttccttctggtatacccatgtgaatgctcaaattgctgtatatattcaatcatgatatgaaagcatattcaggttgcctagcctcttcataggcacttcagatgatatatatatacaaaagtgatttggtgtatatttggcacataacaaatgcagaaaaaaagttaatgcatcattatatcattaatttaaaacatcaatgccatgttactaagaatgatcagaatttagtctttattgaagttgtcaaaatgtctaggtacaaatacagtcatgggcagtgtagaggttacggttgcataaagacatagttctaacccagcagaattttgtaagatagtggaagtaggaaaaatacaaaattagagattaccaagaccagtttagaaagggaaggcctctgggaagcagggaaacttgtattaaaacttaatagagaggaggaaaataaaggaatgagactccctaggtaagagaaaaggcatgaatgagaggtaagaaatatcccatgatgtggatggactagaggtcaataaatgatgtgcaggatatggagggagataagtctggaaaggtcagtttgagaagactaataaatacttagcttggtgctttggatatagaactcaaaacatcattgttcaatatagaaattagcagaaggttttaaaatgaattatatgtggtagtcatttcagatgtttgtacaagtgaaaaacaaatttttttagtctaaaaaagattatttcacagaaagatctttgttttacataaatcaaccaaatatctgatgttacagggcaagcataacaatactattcagaaagagcccttcatttgccaggaagaatgtcagattccaacctcagtgataaccatcttccagacaccttcttcttaacagggatcccagggctggaggctgcccacttctggattgccatccctttctgtgccatgtatcttgtagcactggttggaaatgctgccctcatcctggtcattgccatggacaatgctcttcatgcacctatgtacctcttcctctgccttctctcactcacagacctggctctcagttctaccactgtgcccaagatgctggccattttgtggctccatgctggtgagatttcctttggtggatgcctggcccagatgttttgtgtccattctatctatgctctggagtcctcaattctacttgccatggcctttgataggtatgtggctatctgtaacccattaaggtacacaaccattctcaaccatgctgtcataggcagaattggctttgttgggctattccgtagtgtggctattgtctcccccttcatcttcttgctgaggcgactcccctactgtggtcaccgtgtcatgacacacacatactgtgagcatatgggcattgcccgactggcctgtgccaacatcactgtcaatattgtctatgggctaactgtggctctgctggccatgggactggattccattctcattgccatttcctatggctttatcctccatgcagtctttcatcttccatctcatgatgcccagcacaaagctctgagtacctgtggctcccacattggcatcatcctggttttctacatccctgccttcttctccttcctcacccaccgctttggtcaccacgaagtccccaagcatgtgcacatctttctggctaatctctatgtgctggtgcctcctgtactcaatcctattctctatggagctagaaccaaggagattcggagtcgacttctaaaactgcttcacctggggaagacttcaatatgaatgctgagcagaagttggagatttaaaaaaaagtgtaggatggctgtctagatacatttacatggacacacagtgatgatgtgaaaggaatggtatgacatggcaggaagctctggaaggaagaggaatagccagatgaatcagagctatcaattatcacactgaacatactattttcctgaggctccttggggaactctgaataccccagaaaggtgataatattctcacacttgtcttaaaagtgtctgtgacttactaaggagaaagtcaattcctggtcttcagaggcatctggatttaagagtaggaatattctcctgtgactccaagtgaaaaacaaagaaaaggtttggaatgaatttgagtctgaattccaccactttgaatattgacgtattggttaaaagcacaaagtataaagtcagagtgcctgcgtttgaatcctggctcctctacttgtgaccttgagcatgtttgaaatgtttctgtgcctcagtttggccaactgttaaatggggataaaaataacatctaactttgaatgttgtagtgagaaataaataagttagaaaaattaagacagtgactaacatgtactcaataaatgaatataaaatgaggaagttatgtaacctctctaaacgttactagtaaagacacttatataaaactttttttacattacctcacatcacagggttattgtgataacaattctataatatttttaaagtgctagagatatgactggtacttaatacaactgtatattctttcactcctcccacactcatccattttgaggtctctttccttttagttataaggttatcccttattaagaattcaggggagccagccccaaatccaagttccttttttaataataatgctttagtaatctcagttctgaaataaataagtccagccatctccttccaactgttcaaagagatgattgttgttatttgcattataaattaaaagcctgtcattcagggagactaatagcctaaggttatggcatttattgacaatatctcatacactgtccagtattttattatgggaagattatgagatctgtgtgcagatgaccatggacttccttatctactagctgcaagaattagggcatcccactttactgccctcagcattagtgaagtgtttattataatctcaggaacaaagcaagcattcaattctgactgctggcagttggtagtattcagctaataatttttaaatttataaaggtatgctagattttatagctgcatggcttaatctgcagtgttcatttatttgcttttgaattgataaccattttaatacttcatcagactaggcatttcatctgtgccttgcacataattaataagcactcaaaatattatgggaaaagtgttagagattatactggtatgtatcatagtcttagttgatttaatgaataaatactgtcttcattatgctaatgtgtagggtaatgaaaatatatgtctacacagtgtctggcacacagtaggtactcagtaatttgattcttgtttattcatattacactgaggctgttcagatacagtcacatccacaagaatcatgacgaagagtatttttacctagaaaagcaattacaagaaaaagtatcacaagttcatgggtaagacaacagggtaagtgtcagctgtggccatggagagctcctagttcagttgtggaggtaaattcatgcacaaggagctgtcacaggtcagggacagtcatgtcttggcccagagaagctcagaggagaatgatcagaggggtggaacagattggaagaggaggaggtaccaggcaatggtgcaggaaggagacagcaaagaggattactgaaagagcttgaggaagctgggggtgattacatttcgagggggcctcaaaagccaggcccagataagaagacacgggcagcccttacaaataagtcaggctccactgaaatagtgatggatcaatctcaatcaattgttactgaagtttgaagtaaagcaatgcaaatgactaacacagaaaggcagaatttcccaaagtgaaacttccctgattaccaatcccagtgtacagcatcatctttccctaaaaaggcatgaaatatggttttacctatgcactaaaaagaaattcagcttttgagtatagatagatgtcaccagccctagagcatgtgcaaatcatttagactgctgcatgaacctgatcctgctagagccttaaacagtccttctcctggaccactttgagaaatgagttcacagtttggcacataaatcagtgcaactgccaaattgcaaagaagacttaacctcagaatcttgacctattaggtaaatttgttcctttatccccaagtctagctgtttcaatttgtgctgagggagactctcttaattcaattttaagtaattcagcactggtaaggccctgaagaactaccctgccaagttctccccaattccatagcacatctccagaaccagaattcacctcaccccaccaagtctgtctctctcacaaaataaacacacacacacactcactcacacacattttcttgtatatgtagaattcaaaaaaacaaaaaataaattcttccctctgagctctgaagaaactcaccctgttttctctttcttccatctcactccatgttatttgactttattgtgatgtgctaacaatggttctcagcagcagagagacactcaatttgctcttattataaatatattaatagataatttcttcattgtgatttagattattctcttaatttttctctctgagactctaaattcccaaagagttggaacttaattggtccctttctctgtgtaaaggcaagacaagacacactttctgttcacctgttccaagggaattgattgattctgactacagagcagcatagagccaagattaccaactctggaatccaagagctctggttcctacatctttgttaatcaggcgggagtacagtggcacaatctcgacttactgcaacctctgcctcccaggttcaagccattctcctgcctcagcttcctgagtaactgggattacaggtgcatcccactacatggctaatttttgtatttttggtagagacagagtttcaccatgttgaccaggctgatctcgaactcctgacctcaagtgatccacccacctcagcctcccaaagtgctgagattacaggcatgagccaccacacccagccagactctctttgttatttgctttaaacagcaacagaaacaaaattaatgtctttatctggaaacatgtttaacatcagtctgatccaccgttgaaaaatcctaccgtttgagtttgataaaggaatatggctgaatggaaaagacattgatcctaagagctagcttaggaaatattgatttcagtcacctatcttccactaaattgctgtacactggccatggcccagccaaggcctcgagtccttgttcatataggaacagaatgaagatatgtataattagtccaccccatctcactggggtctgaaggcagcttgcacttctgagacctcaagcttgagaaatcgatctacctgattctaaagagacatcatcatgttccccatatcaaggttgagaaatcgatctgcctttttctaaaaagtcatcatcatgttcccctctcaagtttgagaaatctatctataccattctaaaaagacattattttccccaagaacttataaagtttctctcagataaataaagaattatctcaactccgagaatcagagctgagacatgagaaatcataagaaggtaacagtttgagtctaggtcggttaaacttaacaactattagatttaaggtattaatatacctgacaaggaaacttgtcacttaggagaaaatatatttcaactgtaaaagcagaaaatagtaagtctccaaagaactgtgttgaccactccaggccagaggagccctagggtaaagtcatatctctgcagcaattatttttatggtggtggatgcatcagactatcttaggtttaaaccattaattgctaccatatacttaacttttctgattctagaattttcaatgactaaaaaattaggatttggctgcctagaatgacacctccagaagatgatgttagacataagtgacatgaacatttagatccctctgcaattaccttgtttatcatatattcatatatatttttacattgtaatttgttttaaccagtatatctaggatacaaccaatattaagacttgatactttgtaatttctgagtttgaaagaacttcccagccagcggatacttcacagactgagcctcatagctggctgtcagccagccagactcagcataacttctaccatacaagtattgctagcaaaaccaattcatctgaaaattcccattgggtcatccccagtggaatcagatatccaaattaaagtttctggctttgttttagcaaatgcattaatgtgtggcaagaaataacattattccaggtaacaattattcagaaccacgtttgcatgtctcatggttccaggcattattttccccctcatagactttgaggtgaaccatttctttgtctcttcctctgtggactttattgtcagtacctgaatgtctccttcccaagcatcacatgacggcctttcccagtccacttacatacttgtctctcttaaggcaggagctccgtccacattacccactgagttcttcattcagcacaggaaccatactttatctttctggaggagctgacatcttctgaatattttacgtcgtgtatatattccttttagagttataaaataaagtaacaataatcaacttgccaataaactatttaaggaatataaaaaaggattctggactttctggagtgaaacaagcctggtttaaatcccgctgccatcacttcataaccttcaacaagtcattttccctttttaagactgtgtttcatcatgtatgaaatgatattttctcaaagatttattttgaagattaaggagtttattcctataaagtataggccaaaatgcttggcacagagcagatgtttattaaatattattatttcaatacaaaaaatctttggtacatcttgtggtcaggttggtaactggattgagaaacagagaacagataggtctgtcagggctgaccaaaggttcagggacatttttaacagcaggtgatatggacaactccaaacataccactggagaaagtatggtatccagaaaaaccttctgtcagaagggacattagcaacataatgaagtagaagtttccagctgctatccccctagagaaacaccaattttgccaactacccataaacaagaatacctttgtgggagccctggagtccagatgagaggttctagcactacagtggagaaaaatattcaagagtggatgcactgaacgagttcatcaccactagaccagccatacaagaaatgctgaaaacagttcttcaagttgaaatgacaggactataattagcaacataaaaatgtatgaaagcatgaaactcactggtaaaggtaagtataaagtcaacatcagaataatggtgtaatggtaatgtgtaactcacttttaatcttagtataaaagttaaaaaaacaaattttaaaaatatctatatgataatttgctaagggatacacagtgtattaagttataaattgtgacattagtaacacaaaatgtgtaggtgaggagaagtaagtaaatgtagagtttttgtatgcaatttaacttaggttatcagcttaaaatagactcatgttttatgcaagctttatggtaattacaaactaaaaatctgtagtagatacacagaagacaaaaataaagagatcaatgcatatcactacaaaagaaatcatcaaatcaaaaaggaaaacaagaagagaggaagaaccaggagctacaacacagtcagaaaacaattaacaaaataatgatagtaagtccttgcctatcaataatcactttaaattaaatagattacattctccaatcaaaacatatagagtgactgaatggataaaacaagatccaactatataccgcctgcaaaagactcactttagctttaaggacacgcataggctgaaagtgaagagatagaaaagttattctccataaaatttgtaagcaaaatacagcgtagcagggtggcatattgcaattttttttaacttcatatgttcctgataccttaacctctccatgaacagactctgagcaacccacccctcaccaagttaccaggtacaccggtgtgataagtctggttcctgccacaagttcctcttcttgccttccctgattgtgacctagtgatattcaaatgtaccagtaaaatcccctcatgcttcttgcttgtgtagtccacgttgactctcaatggaggtacctgcccatgggttcacattctctcttggctctcctgcttgatggagcctgttccctaggagttcttctcatagggccccttgcatggcatgcctctggttccctctagaaactgtgattataaatttttatctcttatgcatttctgagtgtgatttccatgccttgttgtaatgatttgaattggcaacaaaaatgcgatcattccaaactccagtgaaatgtccctcagagatgccctttcaccgctcatggtttaattgcctaactacatagggctctactgttttggaggcctttctactccgatgacattcttgtgtactgccttgcatggctttgtattacctcttctgaatactgccaagaatccccttcctaaagtctagatcctgtcccaatcccgataacacactccaggatactgcattccaacttgatcccagcaagagggggagcctcttttgaattggccatgtgacttggctgtttttcagtgcacctttgagtgattataatttgaggaatatcccctgacactagaagtggagtttcccccatcatagggtcatgggtgtatatattgctgaatgctagctggaaagctgagggagccagtaggctgcagtagacgtacgtgatgctgcctgctctcaatagcacttgggagaagaagataattcactctcctccctccaagagtcaaatggtcctcctcccgaggatagtcctagacagcacttcattagagtcaatgctgctgggaccagtggcaccttctctgctgcatccttgtagccattgctcattggtctccaaccccatgggctatcacagatcccatccacagaagatggtgaatcaatgtttaaaaaaaaaaaaaaaaaaaaaaagagagaggaaaggaaagagaggagaaggaattctttgatcttgtttctcctaagacacttgaagatgtttctcagctcattgtaaattacacttcacctggtaaatgcgttgagtacttttaagtgctggtacatattgacatgttaataatctcttccttaaagcctgaccaacatggtaaaagcccgtctctactaaaaatacaaaaattagtgcaggcctgtaatcccagctactccagaggctgaggcaggagaatcgcttgcacctgggaggcagaggttgcagtgagctgagatcgctccattgcactccagcctgggcaacagagcaagactccgtctcaaaataaataaattgtcaaacaataaataatttaaaagacaaaattgagtccactattggtgatgtagacccccaggctctctaaggttgattgggacactctagagagggtatccatcagaacacttgggactaccaggatctcctcaggtaagcattcaaagaaaacagagattaaaaataaaaaacaagttgaggggtagaaggactgagtatcctgtggttaaggttgctgcctagagacactgggtcccttcctttttctcttgtcagtcaaagacagaacataaagacaactacaggtggctaaactcctattttaacaatctctcaccacgtttgcctccaccttcaaaagaactcaatacaccttttgccagctacccatggagtttctcagcagctttgccatcacacacagtcttagcagagaggctcttaactatacacacctttctccaggagcataggtatgacatcacattcatagtatcctcttccaaggaaatgcatttgacacgtttattaatggcatgaaacaactaatgactggttacctactggactctccaggaaataggggctcttacaaactcttagcatgtggtcttccactcccacctgcccattatgttttgggttttaaaaactaaccttcacaaccttggcacagctagtgaggcctccctaagacagtatggaaccaaacttgagccctataggatattccaccagcagaagaggtagcttcccctgttctcagttccttgccaaatgccatggtgctggaggaggtcacccttccctaaaccccttagctatctttggcgatccttgggattagctgagtgaacagcagtggtagttcctggactatgccaatggcactgctaaccatgacaggtgatagagcttagtggaatgttgctgctttccatccattagccaggatgtccctaacaaaggacaggacccaagaaacatcacacttaatcttaatcttaaggcagtcaccttaacactggatgccctggccaacaaatggtcctgtcttcatatgtattataaattattgggccattacctacaaattgtcttcttcaaggtaaaaaaaaatcaacatattagaatctcttgctcacgaatatacccaaaatgtaagtcaaaacgatattagtttcagtatgtctccttatataccaaggtcacaatacaaggccttgccaaaaccctcattcccttcagagttacagacattactaattgtaaccaagatacaccctttacttcttaagatacaccatgcatgctgggtccttgggaaaggcattcaatagaactttcgtgttcctgacaggtcccaggtaacagatttaatagacaaacatgatgacctcctgaaaaatctcctctttaaattccagtctgaccaataagcctctaaatgagtttctgttttgccacaggccttatcctatctttataaattttcaatcttacccccattcaataagggctggaggccagatgaagggcatgtactctcctgggatgcattaatcatagattgtcccacaggtcagggagctattattccgacatgggacacatttgaacataaaactttccaagaaagtacaaggctgcaaaggcagggactgaacttctagaatgaagttcaagttgacagggaaattaggggatgacagggcacaaagttcaactgcttgaccttctgacctaggttttcttaaatgatgtctatgaaaaattggccccagtgcctccctatcctgttttaatgtggagatatgatagtacagccattcaaaatagcatttaaattgttaagctcaagcctttggttactctttgacctatttctgtgaataattctatctctgtgaatttatgaaaacaggatttataaatttggatcagctctgggccccactcttgtttctgtctgcacagtagacctggatgataccattcatggctttcagcaacacccacagatacttaggaacagcaactctacatcactgggttagacaaataatccagtattttttatattcctctgaatatgcccagaacttaaacttgtcatctccacttgaagtctaacagggacctcaactagcagggtcaaaacagtattttttatattcctctgaaaagcgtcttcctccagttattctccttcttaaaggccactatcctcttaactgcacaagtcaaaaagccttctgtcccatgttaattccatcagcaagccctttctaccaagccttaaaaatatgtcctgaatctatcaccctatcagtactgttatgacacaagtctaaacaatctcttccctggacttctgcagatccaagtactagcttgtcagcttccactcttgccctcaccacccactgccaacttaacagccaagggaaatgagttcatttcactatcttaattaaattcccatctgtgactaggactcccgtggtcctgataatacagtaatgagaacatggaatatgtaatctactctgcaaagaattgccttttattttggcaaataggctctagagtgctgatgtgatccctgcctagcctaggggtataagagacagtgagctcacaatcccggccctttgacctgctagaccattttgcaaaggacacagtgaccaaattatgtgcacctttgtgagaattatggaagcaatggggatctacgcccacctactcttctgtgtatttaatttcacataacttttgccctgcttctttgctcttgcagtagtaaacccaactgaaagctacttgaaaccgttctaaatcaccatgctcactaatatctatctcagaccatagtgccctatgtgatctgaagtatataagtaaaaggattaacaaaactcctctgttgcatgagaatctgattttcagttaaacttactggctctgtttccctgaaaaacagacaactgtaaaataccaattatattgctagtgtgaaaactgtcggtaccaaaatggagtcattcatgtcaaaatcaaactaaatggagccagaagatccatttagtttgggaccttcataaaaggagggtcctcatgtatatttgcctgataacaagaactgtcataagagactctgccaaaaccacaccttgcaattaagccgcttcgacgaggacatctttccagtaatagtcctaattgcggccttgcaagtagctttactaaaccacaaccctgtagtcatgtcacttctatgaagacccactcctaactatggtcagtgcacatgtcaccaactgtgggaagcccctatgaccaatgaacttttgtttcaaaacgaccttcatatacttctcctttttgcctttaaaagtttcccttgcctccacctccctgaatatgcctatgatctgtcatagcatgcatatcccaggttatagtcctgtttattcctgaacaaagtaatttatttgggaagcttgtctctctgccattattttaggttgacactaggcagcattgcctgtgatagaaatgacccttgattggcaaacttgtctgaatgggaagaagttataatgaatcataaatacctgttggagattccatagtttgggcagccctgagtttggggaaattataataaggcatttcttgcagagtctagaacataggtgtatggagggctgaaaagcctgttagctactatggggcaccaggacttaacctgcagcctctctctgacttgcctgatacagattttgactccttacacctgggagaaaatgacttctgggtggctatactaacctatgcctgggctacaataagaactcccaccaaaagaggaatgcctgattctgccctactggtgatttttgctttgtttcctgtgtccttcgagtagattcgggctaaatgtggcttacgatagtcttaaaagtttatttaaataaatcaaataaaatcctgatgggagtagcaaaagttaccttcttattatactcaggataaaatccaagttccttgactagctctaaagcctcccatagttgcactcctgcctgtttccttgacttcctcttgctgataattttcctcttgtctaagaagcttgaccacactggcttctcttctccttctagaacacaccaagcgcccaacttacccttaaagctgccacagtagctgtttcctaagactttataacaagattgtcccttttaattattcagatcacgttctcactaattcactatcctatcactatattttgattatatgcacagaatttaccattgtgtgatattttcttctttgcttattaatttctccctgtttattattatactttaagttctagggtacatgtgcacaacgtgcaggtttgttacataggtatacatgttccatgttggtttgctgcacccatgaactggtcatttacattaggtatttcttctactgctatccctcccccagcgcccccaacccccgacaggcccggtgtgtgatgttccccgccctgtgtccatgtgttctcattgttcaactcccacctgtgagtgaatttctccctttctttaatcttgcacatttaatctcatcagaaagctttgtaaattctatctccaaaatatgttctcatttgtccacttcttgtcatacacacgtcaggaaccctattctaagccagtaccatctctcacttgaatgactacaggggtcttcagattggctctgcttctccgcttgtcactctctcattcattctctgtgtaagttgagaatcaatgtctctacatgggtgacaaagccttcctgaccttgcactcacctgtctttcccacatcaccttgaagcactctccctctcattctctgtactccagacccactggccttgtttaaatttttccatgaatgtatcgagctccagtcaaaatcaggattctcttttatcctttctcctttgcatgagacatttttcccctagctctttgaatgtctggcttcctttcacctttcaaatctctgtataaatacttcctccacagagattctatcattctaaaaatacatccctcctcctgccatatgcactagcaatttcctgcatgaaatttgttgtaattataaaccaataatcatttgtgtaatagaagtgagagaagaatgtggtctctagaaagaccggttcaaattccaactccagctcaaccattccttcacatgctacctaatcttggactagacactttaccttcttatgccttagtttacttacctgtaaaaataggtgtaattatagagcctaccttacagggtttctgtaagaaataaatgaatatatgcaaaggctatagaacagtgcctagttttccgtgagatctctttaagagttaactgaaatatgtcattgccactatattttaaactccttagggtaggaaacatatctaatcttgttcgccattgtattcctagcaccaaacatcatttcttacatacaatatgtgcaggaaatatttattgaactgtgagtgtcaaagggtaataacttggaaaaattcatgatatattaccaagttaaaaaggtaggttatgaaactatgcacagtacaatcatagttgtattaaaatatataaaagtacaaacatcatagtattggtagtgctatctgtgtagtgaatttttctatattcttattttacctatcttatgtacaacttacatacatacaaattattagaagagtagaggctttgcaactatttatcaaagatgcatacactcgattgcatgagcatctattaacaaagatctgaagtaataacacagcaactggtaatagcacagtttcatcacagtctaattcacccagaaaatataatgaaaaaaactgtcattcaaaataacaatcaaaaaatgtcacgtgtaaataaacccaaatgcgtaaagcttatttgaagaaactacacttttttttacaaagaaataaagtttaaatagaaatattccctattttaaaaggaaagactgcctattgcaaattcctcaacatgttccaatttataataaaaagccaatcaaaatctcatttggccttttctgaaatttgacatctgctataaagtgtacttggaaaaatagacaaaattagccaatggtatcttgcaatgtcaggcattattctttttgtcattaaatatttcaaagttaaaataattgaggaagtgtagtattagataaaataaaaagcaaagaaacaaaaacatctatgcatatgtaggctatggtaatgacgacatttcagtctagtgtagatactcgcaggactcgggggtaaaaatttcaatatcacaaattctgccctgctctactttttgaggggtaaggattaaagcataaattaaattaacttgatttattgcagtgattaagagtatgggctctggaattagactgtctaatcctggctgtaatatgaagtgctttatagctttaagtgatgtacttcccctcttcatttgcctcagctgccctcatccataaactagggatactactaatatctgcgctaaaggactattgtgtggaatccgatggtaaaagcttggaacagagcctgacatatagtaaagcctcaataagtgttagctaaaattaatattaaataaatacaagtaatgaagccctaaaacatatagaaaaaaaatatgggcatgtgtttatgatgaagatattagttttgtttttttaaagaaaaaaaagaaataacactgatgcttaaaagcactttttatggtttggataactttctccttaactgccgtctactttcctagctaattgttatccacatcagctctcagtattgcagactttaacacggcttgtttttctgctttctagcaaatctcttggtctgaagaaagagtacaatttctttggaaagggccatgcagtaggcccagcatgaccaaaactctgtgactctatcttctcttcgccacctgtgtaacccccttgtcatgtccttccacaactcagatttgatcttgggccatggctgatagagtgtaagaacagggacagcagatgggaagtcctaggaggcctgctctttcagcaacatcagcctgcagggacctcctccccctaaaattctcatagcctttattttcccaagcacaagctttggtcctgtgacatctttaatttgatttgtatctatccagtgtccccagtcacttcctcatttgttttctaacttagtcactcattgtttaacactccttcaatcactgattgcacactttccacgtaccaggccctaccttagctgctaggtagaagacagtgaccctccctgccccagaagcctcctcctcctggattcaccaccttggagccaggcatgaggctgatgagtttactctttaatgaagctagagcaaggattccaagcacccagtcaattgtgaagagctctaagaggttatggcaagagaattatccactaaatgaacactcttctccctagctaagacttttagacccaattcacctggtgtcttccctgatgagcagggcttaacttcaaaggagcctcaggttttctttggcccagatgaaaggcagataaaaacagtaacatttcttcccattaggtgtttttttgttttgttttgtttttgcttttttcctcagacccacctggccttccaattaacaggacttcacttcatatgaccctcaggttttctttggctcaaatggaaggcagataaatgcagtaacattgctattaggttttttgtttttttcctcagacctatctggacttccaaggatggaaatttggggttcaatgtatatcttccccagtcagaggcagacccagagaactcacctcatgaacggaagaaaatggagaggcaagactttcctcttcatttcccctagcaccaccataaacaataggtttttctttaatctggacaaaaactatcccctaatggggagtggagtgaggggaaactgaagctgtatttgtccgttttcacgctgctaatgaagatatacccgagactgggcaatttataaaagaaagaggtttaccggacttacagttccacatagctggggaggcctcacaaccatggccaggagaagcaagtcacatcctactggaatggcagcaggcaaaaagagagcttgtgtagagcaactccggtttttaaaaccatcagatctcgtgagacccattcactgtcacgagaacagcatgggaaagacccacccccatgattcaatcatctcacaccaggtccctcccacaacaggtgggaattatgggagctacaagatgagatttgggtggggccacagagccaaatcatatcaggaaccttgtgctccacctaaacattgaaacctaaatcgctagaataaatgttttcccaaaggctgcttttatctcctttaaaccgtgtgctagcagctctaagttacacaggctgatcaaaatatcctgagctccaagtagaggttccctctctcccagtactgagtctctgacatctaaacacacaccacagccacttttaggtatcccccatcaagacctctttacttccttgataggaaaatactgtgaatgtttcttaggtttacacttccattttgcgatgaaactctgatttaacagactgtgttttgtatgtatgcttgtacatatgtacatagaatatacccatgtgaagacatatttaagtggatgtgtattgtgtgtttgtgcgtttctctacagtgggtttacctgacacatttgtgtgcatatggactggaaagcattatttactggcttgatttatgaattgcaacacttttaccctagaagtacatggttaatggaaggcatccttgaatgcaaacaaggatctagtctgagatcccaagggcatcttctatgtgttatgcacctcctacctcagtgcctttgtacataatagctcttctgcaggaaagctcttccctccgccttgaaagctttacctacttaattcttaccactttttggattctagtttgcagtacacactcacagaagcctttcctttctccccagactagatcaagaccctgttcatgctatttcacagctcctcatctttttctttacaccatttctcatagtttgtaattatatataatgtgaattatatagtcacaatttgcacaattcttgctataagatcataaattcattgaggcagggcagtgagtaaaactcttttgctcatattgaattcctaatagctagcaaaatgctatacacaaagtatgtcttcagttttgagcttgaagttgcaaaaaattaactctctggatctggctacaagggactgtataaagtcggtaagattcaggaatctgagaagtcaccctgactcctttgctgctctatctctatctgcttagagatcagcatcaaatcctggaagtgcaagctgcttgggggatagtcttcaggggagataaaaataagaaactataaccacttttcagtcaggctagtggtagggagctcggaaaaccagagcacctggtagcagctactacaggacacaaaatctgaagaaacgctgaaagaacactgggaaagttgcaggcctcgaccttcaaaaggttgcagcaacatttcctcctctgttcttcatacctgtgagtcttctaacttcagaccttttagtttccctccaagtccttccatccatgtagagacagcccttatcactacttcttctcccatatccatcctttttctcatagcccacatgaatgagactcaggcaagagttcacattggaaattgggtgtaattgcatctcaagataggcataagcagagcttagactggggccccccagtggtatagtggtacaagtggttgactcacacacagcacctccactatgttttggccattagtcttcctcgttgactctggaacaacattgcctccacagcaaaggacttcatagtaaatttggtttataatgcagctgtattcaaaaatgggagagctagggaactaggatatgggaaaaaggcacagaggaaaacgtatggtttgaatgaataaggctcctacgactgtctcagcttctccacagcagcatccacgtcgccccccgtagcaatgagggcctgaagattggcttcacgattcagaaagcccatggaccgcagttgctccagctgcacctgaaagtgagcctcaggctgcagctgctggggatttgtactaactaaatcttgcagcatatggagaaagggaggggaaaggaagcccagctctgcagagtccagtgctgggaacacctcaggaggtggatttgggagaggatcctcagacataaggggatcttctctagactctatacctcctgccacactacccgtccctgctaggcaaggcatgaaccagagtaggaggcgaggtgcttcagtagctaggacctgtagaccctgctcaatctgccgcagggcttgcagggcacgggggtttgccatggctgcctgaaggtgcatcagcagtggcagctgtggttgtatctcatcctgtaactgtggagctggattcatgccatctggcctcagagatcttggataagccggggatggcagccagggaggctcagggattccaggaatggctgccgtgggggaaaaagataagggagcaaatggaaccctgttggcagaatctcccagccccgagacaagatcaggcaagtttgtgctatgtccagtagagcttttccctgcaccatcttggtctccaccttgtccagtactgttctctgtggggtatctcaggaaagctgggcaggaggaccttcccttgattgctactgactcctcggggagaggctggcctgacccaggctcctgagatgagggtgacgatgggggaactctgtttactgatggtggtggttcctggctttggctgagggcagatgcagtcccctgtagataagttcctagggactgggggttctcgtgtaattgctggagatagtcatagagccttataatacccagaaagtttggaaacctatttctaatgtcaggtgcatcctgatccccatcctgccttccttgcctgctacctgagcctccatgtgtggaagtccaggggttggggagagggtcacaattctccatccttgaaggttggctggtggtggtggtggcattatcagtagtggcagtggcaaagggattgccgccaaactgctcctggactgcgttaagcattgggtccataatatctgtgtacatagtgcaaagcacattgtagccaccaggaatgctctccaagttactgagcacccggtcctggctacgtatcatctcctgcatcatggcagggttacgtaaaaactccagtgtctgccgcataatttccgggttgttaagaatatgcccaatctcagggttgtgctggatcagctgctgcatatgggggttgtcaagaaccagctggcgtactaggcctgtgttggacagcagacccgggatgaaggggtcatcaatgagctgagtcacaaactcaggcacagacacatgctgccgcatcagggagcttggctggtcagggaagccacgataggccaagcccagcctactgaggcctgtgaggagacctaagctaaaggcagggggcccatctgctgggtaaatggagcttggctgagggagtgatccaggacttgggccctgggtagggacagaggcagctgggcactcattgcccatggcacggtgctgcctcttgatgaccaggtggacagtgaggccatctcgcactccacactgtgccagtgagtcaggatccttgaggattttgccagcaaagattagaacaagctgatcggggtgggccttaaagcgctgagatatctcttccttcagctgctggatagtgcatgtgtctgtaactgagaaatcctccttgtctttgggcgtcttcactgtcaccttgatgaggtggggatcctggactggtgctgggctgccctgtggcagggcttctccacctttggccatggtggcagcaggaggcccagatctgtggggacacagctaggggcatggggattggagaccaagatcatcctttcaggcaatggcaaaagtaggaagggtgagtatgaaaagggtcttgaatatcaggatagggaaatctgcagggtctacatgaaaggggccatgaggtttctggggcaggatgctttaggaagattgcgggattgagatatgttggaatcaggggagggaaatgcagggccctgggaaagaggtctgtagttgatgaatacagggacaaaggtagaaggaagggcccagctggggtgtacataccagtcagctgtggtcccgtccttctctttatgcagggctccaaacctccctcatcttgctacacagccacccctgaggccttctgggccagaacccgcactatcaggtcccttctgtgacctcagtgctgacgtcacagcctcacacagagaagattcttgagacttctctaaggagctcgggatccctgggaactcttgctctcccatcttttaccacttctacttcctccacctcaagtgccttcctgtggagacttctgtggaggctcagactgggattggaatgttataaaacatctctcagtcctctctgtctccattcagacccacattcagctacttcctggtccagggtcttcttcctggtatcctatgtcccagttttctgtcttattcaacattaaccatgaattctttacgtattttcaaagtattgattcgctgatggataggatttggggtataagggaggagtcaagcatgagataactttttttttactttaaaagaaattgttatccccaaaggaactcaaaggattgaatatttactaagacaaagattgggaataagcactttgtctaaattagcaggttgttaaacagttttacatacatttgagatgtctattttacatacaaatggagatgtagtattgtagtttaatattataagtccagagtttattagcattcaaagggtacttaacatcatggactggtttagattagctagttagtgcatacaggcaaaatgatagagattttaaaatctgagttttgtggctgtataacatttagaaatctggaagatcagaagaatttggcaaaggaaacggagaaaaaataaaagagtaaggtagaaaaaaagagagagaaaagagaaaggccaaaggaagaagagtttcaaaaaggagagagtaaccaatcatgtgaaatgatgctgctaggtcaggaggatgaggattgagaattggccactggatttgaaaaaataaagaattggagaccatgatgagactagctttggaaggatagtagaggcaggaagcctaatcagagtgtgtttaaaagcaaatggtttgggaaaaagtagatccagttagggcattttaaatgcaagaaaggggatgacggctatgtggggatgtggggttaaaggctttttagatttttttcttaagaatagtgtaatgatgtttatattctgatagaaacaatccagtgagtagaaaaaattgatgcatgagaaagggaaaactattaagttcttgaatagataagttagagagattgggagcaagtgcctatgtggagagcttgatttaggaatatgaagtttattcatgatagcagaatgaatgggaggcagagtgtattgggacagttgtaagctagttggttgatttcatggtagacacaggtagaagtcccttctgattattactgtctttcttgttgaaataagcacaactttaagatttagaataagaaatggatattgaagatctgagaagagaaaacaagatatgaattgatcatctgaaagaataagtgttaggttttgaaaggaaggcaaggcttaaagaaagacacacacacagcaaatgcagggtttatgtctagcataaaacctagagaagtgtgggaccagcctaatgccagagcccaccactgcttacaggctggggtaatttataggtatgggagggaggggtctgggcagtatggcttgctgcctggcaggatattgataagatgtgctcatgatgaggcagtttggtccttgtttctgtaggatgtcatcgtggtgttcaatggacctttgcgcagcaagatatgatagggatgttgctttagttggacctttgtctgccttgtggtcaggtggttaggcaggatgtttctcacagcctgaacccccgtgaaatgtttcactttgaccaaggtctgcaaaatagtgggaagtttacaaaatggtgcagtttggactaacaataaggtagtgaattaactaggatagtggatttccaggtatgatctccaaactgacagcattagcatcacctggaaacttattagaaattagagattttaacccaacggtagacctactgaatctaacacccttggaatgtcgggcagaaatctgtgttttaacacgccctccaggtgatcctggtgcagattctggtgagaatcactggactgggaaaatgcagttagaattactaagacggtaattaaatcttttggtaataagtttaaatgaaactagtcagcacagctgtatgccgttttttgcctaaacagagactaggtgaagagttgagtatcaccatgataagttaactaggcaagtattatgccacaattattatcttcatgcatcatgaaataatcttggagccagaaaactgggctgagaagcagcaagatggtgcaagagtgacatctatccacttccaagtccaagggaaacacagatgtagccactgctggagaagcagtgtcttcactagacattcagatctccattatagcaaaaaggtgtagtcatccttaggaagaaggttgtagatatgtgggcttttctattgctaaattatgacttctaaatggtaggatgaagaggctggaaaactggtgacgagtagaaaaatgagtcaagtgaggaattttcagagcatattgtgatgaaaataaaaaagatgacctggatagcctgagctttttatgcaagctgtagcaaagagggtatgaagcttaatcatattaaatggggaggtaaaaaatccattttcactgtaatttatttattgagacttatctttttggtaggtgtagacatgaagtaggggtctttggcagtgagctttctagaaacacttggaagtttgtaggcccgcccttcactcttaccgatggccatgttggggctcagaaggggtggtctgttgagcacacaaatctctgtggatgggtcccctttagagtccagaatctactcctcaacacctcccctgctcccaccctactgcaagaaactactgtttctcaactgctctatcataaaagcctcctaactggtttccctgcttccctggttttcctctaccacagtccattctccactctgaagccagactgataaattgaattatttgatttatttgctcaaaactcaccagtgactattacattcacagtaaaatccaaagttttcaccagacctataaaacttttcacaatctctctgacttcctccccattccccgctcctttttgtccatttcagctacatcacctccttgttattcttaaaacatagcaggaatactgctaccttgggccttttactttcagacagcccctggatcttccttctcccagtgaattgcatgttcagttctcgtagttacttctgacttctgctcaaatgtcaccttttcagagaggccttccctcatcaccctatgtagaatatcttattctgattcatttttcttcacagcacttaccacttaacataacttgtatctccacaaaagaaagtaaagtcaataaataaaggatctttgtttttttcactgctatttttttcaatgcctaaaacaacattgaattattatggtaaaagtgttttaaattatttaatcatggaatcattaaaacacaaataattgcatatcctgccatggtgggatactctaggtgaggcagaaagagaaaaaggtggggcattggcaaccatggaaaatgtaaactacaaacataagatagatatactgaaggaggtgatattcttggaaggtgctgtgccccatggagggctggatttgtggtgactgggatatacagtggagatggcagcagctgcatctctgtgtgctaaagagacagtagagacagcccatcaccatcttataatggtggcaaaatcaacgagcaggaggttccaatgatgataactattcatccggacttggttaatatgtgaattcaccctactctggccctcatattattcctgttccactttcaaacttgaacaatttgggtttgagaaattcaggcagtctttatgactaaatatctgggcctatctatgtaaaatgtttccctttctgtttgagcatgttatgattgttttccctacatatgggtctatttatgtgtctctaggtatttgcatctgtgtttgcacatggctgtgtgtactcatatgtggactctatatgcctgtatatgtgaattttttactatgtgagcttgtgtacatacacacacctgtccaaggtgacatgctcaaaataatcagtttcatataccatgctcaagtttcatataccatgctcaaaatgctcatgttttagagataaaaacattatttttatctctatattaatatatgcatgtggtttgtgtgttaatgtacatatagtaggtgagacaaaaatctcacacagctagttttttctttttttttttgcaaaagaagtaaagccaaacctcagatcgcagcaagtgagtgtagccattttattgacagatgtttcagccacgaccaatgatctattattcagtacaagacacattggttgataactcttattccaggacttctcctggctggaagcatcaggaaaggtgcaaaaggcaaatgagatggtcaggtgggtcagcaggcaggtagcaagcaaacaagtaggcatggtggttagaatctctgggatctcttgagcttgcggatagcagcattggtgtccccttcagtagcaatgagtgcctgtagattggcatggtggttcccaaatcccatggcctggagagaatccatctgtttgctaaaacaaatctcaggagcttgcagagggtgggaagggtccccatccggggattgtagcctctgcaggactgttccaggcttgtggcagcactcaggtcccttgggctcagctgtatctgaaacattccaggaacagggcactgtgtcaggatagctgcagctgggggcaggaagccaacccaggccccataggtagggtgcaacccaaggcagaagaacaggagcctctgtggccagcagctggagggcctgctcaatctgcaatattgcttggaatgctttagggttgcctaagcactaagcagatcagaaatctgtgtctgctgcaggaatgtgggcagctgctgcctccactgttcactcagctggggcatacttgtgaacaacataatctgagctgccaggtaggggttgttcataagcaactgcatcatgcctcctgtgatctgggagctgctctgctcatctgacagctggagatcaccctttaatgtctgtctggagctacttagagaaacagtggcatccttgtattcttcttgaagctgctgggtaagctctatgctaggtaaggctggtatccaagctggctgccgagtggcacagatatggctctggcccttggtggaaatcatagcagtgttggctttggaagtgtggttgaccttgttaagggtgtcattggctgaggtgtttgaagagaaaccaccagagctattatagatgactcgggttgcaggatgctgtgtgagctggtcttgttgttcctgtgatggtggtggaggtgggggtgaagactggacttgttctagcacttgtcctgccaggagagctgtgaaagggtttcctccaaaaggatcttgcatgctgttcagcatttgatcattgatatcagcatagttctgacccagggcattattcccacctggcattgtctctaagcccagatatggctgtgggttcagtggatactcaaggttttgtgaaggttgttggatctgcattatctcttggatcatagcaaggttcctggccagctccagagtctgcaataggatctcagaattatcaagaagaaggcgggaaacttctgggttctgctgcatcaattgttgcgtgtctagatgttctgaaatgaactgccacatgaactccatgttggacagaagccgctggatgctaggattctccagcatctgtgctttgcactctgggtggctcacttccaagttttgggtatgcactttgggtgcatcagaccccacaaagtgggccagttccactggagcttgattcataccagttggttggtgcactctgctgctgtttcctttggtgtttctgtcccggtggcagggatcattcgttggcaggtcccggaaggaatgggctagagatctggagccctgcttggacttgatgaccaagtagatggtgtggccatccatgatgcccctctggctcagtgtgtcatggtctttgagaaggcaacccatgaagaccagcactagttggtccatctggcattggaagtgagccaatagcatctccttgaactgccttaccgagatgtcatcagctaccataaagtctttctggttgcctgcagtcttcactatcactcgagtggcacttgaagagatatttttgtctgccagcagacctgatggacatccactctgggacatcctggatgttcgagagatggcatgccacatgggctttagtgggtgggcagatggggagcaggtggaagctggggcagaaagggtgagggcagacaaatgtttctgctggcctttgtctcaggtattgtgctctcaggccacaggatagtttccttgttgccctaaaagggatgagtgaccagactggggccagatattttgtgatgttgtgccctcaccccagttctccagatgtggcccagctgaggcctggcatagctactgattcataattcacccatggtggacaaagtggtgatgacttctcctagggctacccctcctcctaccccacccaccaggggcatgaatcctcagaaaagggatattgtgatgtcaactctatcctcgcagtcaccctgggccagctggggaaggaggacatatttaggggtccagggctctacaataaaataaaataattttccagaaaacagggacaaagttctctggatggaactagtaagaaaacaaaaaagtaaataaaaaccatatttttaaatgtgggatgtgtgtttccgtgtgatactgtgtgtatgttccttatagggatgttagacttgtatgaaaagttgggtctactgaagccatagataaagccacattcctataagaatgcagtctctcccataggaaggagcgcattaatttttttaatgatctggaaatttgggtcttatatagagtctagattttgggattctatatttaattgtgctcccatgtggtggggaaaattttcctctgtcctaggaagcaggagtagggctaaccaggaaggctcttcataggcacatgccaaactaaatgtgaattagctcttttttataatatgccttttattcacatatcacttggtctcttctacatgtcaatataacagaagttttagaatgatttgtttcaatgtcctaacccactcttgtgtgcccacctttatgtcaaagcattaagggggaatgtcgtctgtaaatcaagaggtgggagaggaggtggttagtagtaaaattcttaaggggacaaatacaggcaactaaaaagctggattcttggtcccatgtaaatttggagaattgtgtttggtttttatttagatgcagatggaaataattatttatatgagtgagagtgtacatgtcttatcgaatgtatatatgaaattgtatgcatattctgtgttactaggaagccttcagggtctggattttatatattccatccacctgcctggagagggaggagcaccacacagatagctaaggaacaagcaaaaagctcgagcccatatgttcccagtgtgttgaagacaagcaaagggatgataggccgttggccaggagaccttctgctatcaaaccaatgattctttattgagaatatctagacccccagcaccatccatgtcagatcctcatcatgctataaggccagttgctaacttactacagcaagactcaggcctattctcttgcaattgcactcaaaagtgagatcgatccaggacaatgaaaaattgattaccagaccaagatcttgccccttttctccccagggacctcacaggaaggtggagataagaaagggaactttcatatcctactctaatgaccagctgccctgcagcttctgcactggaatcaggtgttcccaacctgagattgacaattctagatcacagaactcttgagttccgggagctggatttatgaaaaaaggaatatgagatgccaaagcatcagaaagagagggtaccattttcttagctaatattttactttttccctatcaaatccacctagaccattattaaagggaaccttaatgtactgattgagatattaattacataaagaactcactagatataatcagtcttccaatcattaggaccaatggccactttgggatgtggtcctcctggaggtaaggaagagggcacacttctaccaatgctctgcctagccctggggtctcagggtctggaagcctcgttaggtttgacaggttttggtggagcatgagccccagagggcctcctggtgggtggtcttggtagcctggtcttcattgtcaggaaggtgaggtcataatttatcaggtaaccatcactgaagacatacggcttgtggtctgaggggcagtagttgatgccctgcagcttttccagcatcttgtccaacaggatgctgaggcggcgctcctgcccggtggtggtgtcaaaagcatagaagatctcctcttggtgggtgttcagtgaatgtaaggcatagagcaccccacaggccatgaaggcccctgacagggctggcttgtactggctggtacgccaggttttctccacttctagggtgctagcgttgagacgactcacaaccaggttgcccttgctctcctcagtggcatagagaacccacagccccttctcatcaccagcaaaatctaagtccttccagggcacaccagcataggaaaagcggttgttataggtggcaccaggcagcagacgccacagcaccagtgtgttggaggaaaggtccattttggccatgtcacttgtgccacagtagttaaagtacataaagttcttgtacacaacgtttccactgccatcaccatagcccatcttcctctcttcatagtttttcagcagtgcgaggtcattataggatttgcacagccgatagtagtcaaagtacctaggccaagtccctgcattcagaattattgggtgacagccataactaaggtaacaaagagctacaaaaataggcagatcagtttgctaattaagagcaggggctttgctatcaaacaattgactttagttcatctttcacttactcaaccatgacaaactaaacaattatttttaaaagtaacagtaataataaaacaccaatagctacagtgcctattagacactatatatgcacaatcttatttaattataataacagcactgtaaggtaggttttatccttacagatgaagagactaagtcttagaaaggttgagtcatttgctcgaggtcacacagcttataagtaaaaactgtaaacaaaagtaacaagctactttattgactgttaggactgtccaaaataaagcaaagaaaacaattagtacagcatttgtttcaataagcaataaaaaatggtagctattattttttcttccttatggagattcttctgtatctactctgcactgccttccacctgtcctcaagatgcaagggtcctgtaacaggacatatttctggagctggattcagggagatttgttctcatgaggtcacattggaaagttccttaaattatctctgagttatgagtaatcttatctcttaacattgttctgtaagtcctgattacctatagattttgagagggttccaaggcgtgtaaatgtattttataggctacaaagtatagcacatatgagttatatgctacaaattgtggcctatacaatacattttagataagcatagaattttgggaatattattttcagtaatactaattttcagtaacactgatctttctgagttgagcttcaactggagctcttcaatgactggttcaacctagattcatgtctctctctcgcaacaggtctatatcacattttcacacacactggcttttaacattctgtgtgttgggcctacctccctagcaaggttgacaatgtattgaaggtcttattcgtctatttattgactcttttagccattctttcatctaataaatacatatcatcacctatgttttacatacttttctatgtaatcttatgtgatcttctcaaatatgtataattatcctcattttacatatggctaagaaaggttctgagatgttaattcattttcccaaggtcacttagcttaaatggcagtatagagtttcaaacacagattggcttaattccaagtctcaagcttggccagagacatgctctgaacttctaagcaggaagttagaattttgaggcccaggtgtagaagagtttgttctttacatagaatcagagtagaagtagaaccatctttgagttactatgggattaaaatttgtaggcagtggatttgtgaaggaaactcagggcagtctgggtcacgcttgtctcatgagaagagcgttaggaggtgacctgtcaggcctaggctaggtttgctttggggcatacttaaaatagaagaaaccagcgtggggctgtaaagaaccctgtttgggtatgggtaggggacatttggaattaatccgattgcagaacagaagtcactcagggctcacctgccatctgtacgtagaggagcaacccagtaaagggaagaggctggattgggtgctgagtctcggccccagggacctgccttatatgagaagcctctccgagtgagctgcaccacaagggatttgctaacttcctggaggcctccatgggcacaagaagctaggggaaaaagcaggcaatatataagccaagtttaaagcacacaacccacaggtagctgagtgtgaaagtataataaccatgtgtgggtttgagtgtgtatccatgcacctgagtgcatatacaagcatatcagcaggttgattttgcataaacataggttattttgtatgtatgattatggggtgttcatatgtctgtgtatatgtatgctcatgtatgagaatatatcaatcttggtctgcatttttcagtgatgcacaaaacaaaaaaaatgaaagatttattctctatcaagatttgtacttgggctgggcgtggtggctcacacctgtaatcccagctccttgggaggccaaggtgggcagatcacatgaggtcaggagttcaagaccagcctggccaacatcgcaaaactctgtctctactaaaaataaaaaaacttagcagggcatggtggtgtgcacctgtaatcccagctacctgggagcctgaggtgggagaatcacttgaacccaggaagcagaggttgcagtgagctgagattgcaccattgcattccagcctgggtgacagagcaagactccatctcaaaaaaaaaaagaaaaagatttgtaattccttcccctcagtttaccatagccaacatgcactcccaacctggtctctggagagataagaccttgagaaattcagtctgtgcactcaccggggggaggggtggtccagggtgtccaaaggcctattctttctccttttctctctcacattcacttagttgactctcaaggacatccacctcctgctggagagcaccaaagctgcactggtcagagtcagccaaaagtttgagtgtgagactggcgttagtcacctatggaaatgagacgcccgagaagtgggttgcagagtgttcttaaaaactgaactctggctgtcatattcctcaactcagagttttcttccccagaaagaagtaatgttggaaattgtccaatacatgaggttagagaagacaggaggctgtgacagggagggagatcatatatatatatatatatatattttttttttttttttttttttttttgagacagagtcttgctctgttgcccaggccggagtgcagtggcatgatctcagctcacttcaacctccatctcctgggttcaagcaattctcttgcctcagcctcccaagtagctgggattacaggtgcccaccaccacacttggctaatttttgtatttttagtagagacggagtttcaccatgttagccaggctggtctcgaactcctgatcccaggtgacccacctgcctcagcctcccaaagtgctggaattacaggtgtgagccaccgcactcagcctagggaggagtattctttaatccatccacatacctggctctgaagttggtggaggaggtccccagccacactaacacctcccatggctttaagttgagtcaccaactcctgtgctccctccagctccaggcacagcaggttgaagcctgggttctcatagggagaagcaagggcactgggattccaggacttcagcatgtgactcatttccagaacctcattgtctttatcttcaatggcgcgtgcacactcactgacatcagcatgcaggggatgaacaggaagttgctccaaatgtcaacacctgtggcttctcccattcagttgcatcctcccaggccaaaattgccctgtttgcatcttccagtggaaccatacccattaattcatccattactatgggaggcaccccctacacaagcctctctatagtctgttactatcactggagatcccaaggatagtacagaattaccccttcattctaaagattcatctcaaagatgagggctgtgccacttccttcaaacattttctacttccaggactcatctccatgctgtgtccagtagagactatgcttgaataactcctagccccagctccagcccacagatcaagcactcactctagacagcttctgctcatacttgcaaatgagctcctgagctgtactttgtagctgttccagctgctccagggggatggggttgttgggtaggtgaaccatacaatggcatgtgcctccttcatccacagagcttgacacacttctcaccagctgcaaaccatggccacaggcacagtaaacataatgaagcatgttggagcaccctggactgttcgcaaacatgaagcaagagaagaggctgagcctactttggagtgccagagaagcattgcctctgcccaggggtttcttcttgactgtctgttagggcatccctctgttaggggattgagttatgtttctcttgatttcccagaattgaagctgcgggtcccttccagaacctactgatggggcctacctcaccctacctcatgcactggctggatctggctgcagttcacattactggaagctgatttttcttcaaggccctgtgggagagagcaaagctggtctacagagatgtgttaggggataggcttaggaagcctcagttgtctacagtatccccactctagagatctggcagattcctacaactttaccttgtattgaagacagcagggacagagagttgcaactcatcaaaggaacattagcagtaacaataccataatgcaccagtatggttggatatttagcattcacaagacataacagagggtgaattgtaatccacattttatagttgaaaaacatgagggtctgagagtctaaaaatattttgctaagttacatgactaataagtgacaatgcttcgagcttcccccaggtcccatctttgttctagatcctatgctctggcaactaaggaagtagcagagatccaagttatgttggggtagacatgcagcacaggacaaaagggtaaggctgggaggcaactcccttgcctcagctagatagagagagagggaaagtttctagagagatgcataatttgatctcttctcccctgtcatatgcctatcatattacttccatactcagagcccaaacccactgatcccatagccatatttcctgagttctaatcctgactctgggacattgggcaaattacttaatttctctgtgccccatcgtcttaatatgtataatgggggaaaatgtggtgtttatcttattgttttaagaattatagatagagttatagagatgatagatgatagatagatagacagatagatagatagatagatagatagatagatagatagatagatagaatatttgtaaagtacttagagcagtgcctggcctgcctctgttaagagtctttatattagttatatttctctaaatccatctcttagtccgattttggagctggataaaccagcactagattcaatcaagactccttcccaatttttttattgtgcatgcaacacccactaaggtttccttacaaaatctttttgaataaaaatgtctgtggcccctgtccttctctgagatgtctcactcatagcttttctggctttggcatcatagcttaatctggttatgccttcagcttgcaactccagcccaatagtttacttttgaaggataataaaataaagattgcatagccttttatagccaccatgagctcctacaccctgagcacaggaagaaggtggcagattattgcagaaaacagtgcctcataactgagcagggaatacagcccagagttccttcctctattgccttcacctttgtctttcctcgctccccctgtacccatacatacaagcaaagggaaaatcagaacatgcaggctatcccatctttcttttcttcctccctgtttctgtctaccctcactctctcccaaaacctggaggttcttgaacagaatcagagtggtgaaggaagccagcccaaagcacaaaacaatctccacctgctgctgtgatccctccaacctctgcctgtacccgagactcttcctgggagcaccaggggcagcagctgtagagtggtcagaagagctgcaacaggtggcatcttgcatcaactacaagagcgcagtaagtacttggggctcccctgggcttttatttctgtgtaagtaaatagtctcagtaggagggatatacattttgacatttgaaagggccgagaggatgaagggggtgtggagagggtatggaaaggtggagaagagggttgagacagactggtgcctctaaacatggtggtagtgagtttattatgataaacagggtcttccgcatccatccctaggcttagatcttccgcatccatccctaggcttagatcttcctccaccctgctgggcccccttgtctaaacagattaaggtaaacctgaaacatcctgcaggggccctgggatgggtccctttcaggagtgattatggtgtttccctcaactttgacaaagggaaggctcaagaaggaaatgcaattctatctgttcaatctcaagaacagaagcatttacttaacagggtgcacttggatgagggccaaagtgtatatctggggggatcacttcagcgacactgtactggactcctctgttatatatcttccttcaccccgaggagtttgcctcctgcactatgccaggtactgtaaactattacatccattccactatttaaatgcttcccccagttcctctggtcttaatgccagctgcctctactgcctgtccgtcaagaaagctccctcccaatatttcctaacctgccacatgatgctgtggagcctcaagtcttctggcctctgaactgccgttatccctatagaaaaggaagagtgtagttcctgagcctggagaaggagtcgcaaagctcagtgctcttagtgccagccacccaaaagtattctcttttcttctgctatctctcttgagtatttctcagacagtggggattctcacatttgcccaagtgcctaggagaatgtcagatttcctatgaagagtgtgttgccccatttttccattgaggaattttgtctctgtagctctactacctctatcctttattgtttctttatctttcacagacccttaactttagattataggctgcttagtataaagatcctctgcttactcatctcatcctttagaatccttgccctggcatatacctagtagagaaaggtatatgaaactgcgacttcccttctgggaaaagatttgagaagttttgtggatgtacaactccaggaagacatgcccagagctttgttggacaatccttgctgagaggtcatatccttttcttactttacagattctcaccctcttactccatgctcaaggccagagatccattcttcattagcttctctagcctggccttgccttagccattgggtccagaggagcacagaagttaggatgataagagaggaataggttgggaaacctaagctgcatgaagcaagaaacctgtctgggatcaatatccagatgagtgacagtagaactaaggcatcttatggaagaaggaatgtaggaaaggaaaaacgaaagagcatgaagatagagcatgaagcataacaactgctgctggagttgtcgtccccatattttgccgtctacaaatagccattagcacaagttgaaaaacacaagagtagccttagtatctgattaacgtagggaaagagcttagggaggaagccacagtattgtgcactctcttcccatccaaagccaacaggtcttccaagctctaggtattatcaccaaggtcagaaaccatgtccatttccagagctgtgctctattttattcacatcatgccatttccccagctcctcctgacttcatccccttagcaaatagagttcctgcttagtgtcagacattgtacaagggacccaactcagagacatgtttcattcatcttgttttggctggataaactgatggagaaaagataagatcctagtcctcaggacgtgtcctagacctcctagactgtcacagtctaggaccaaccacttctatacgtgtgtaatccctctatggggatcaatacagacttagaaacatcaggcatagagtgggcactgtagagctgggcagagagaggtcagttcagtatattctgcctacataatgggtgataaaatagggctggagtgagcatagggccacctgacggcagacaatggagatgctttagtcagagctctacccagatgggtcctgcagcatcacttggtcatctgggcaggcacgctgaagaaaatagggatcacatttattcctgtggggaggccctctcagggccaaccttcttcactgctcctgcccagaaaagttgaagcaagttcctgagcctctgagctctgctgagtctgcactccatagaccacaggattgaaagctgggaacaccactgcgtagaggttagccagtaggatgtgaatatggttgggcactgtgtgacacccaaaacagtgagcaaggaaggagaagagggcaggtgtgtagaagagaccaatgatgctagcataggtcccgcagttacccagagccttgtggcaggcaacatgggatggcagacggcagacagcacggaaaatgagggcataggaagcacctatgagccctaggtccagggctggggagagcagtgtggtggccagtccatacctgatgatggggcacgtatctccacatgccaggcaagccacacccatgtgttcgcagtaggtgtggggcagggcccactgtccacagtaaggcagtttcttgaacaggatcacagggtgtacatgacacagacatcacgggtcatggtagtcagagccactagacctaccacaaactgggccagcaacgccccatagcgcaaaggctggcagtctacggccgtggacagcagcactgaggactcagcaatgtggcaatgattgacacatgggcaacaaagagttgagccaagcagcctccaaatgatatctcactagacaagccccaaagtacagccagagctttgggcactgtggatgtggccagaacaaaatcagcagctgccagaagccacagcagctggtacatgggtgcccagagtgccttgtcagtgaccaccagccccactagaagggcattccctaccaaagctgccatgtagagcaggcacacaagcacagagagccaggcatgcagagcctccagtcccggcatccccagcaggacaaaggacccagacccagagatcagcaagttctgactgaaagctggcagtgcaggatccagccccatctcctgcctccatctggctgtgtccctgcaggatacaaatggggcctgtgagaggcaaccagcaattgtacagagattttagatgagtgagggtgatgctagggcttaggatgctagagcatttgccaaatgccctctctgtgggaggcacttttctgaggattcagcatatagtgaactatgaattccctaacagtctagtttgtttgctaacattgccatatgacagatcaaagaattttgttcctgagaggttaataaacttactctaggtcacacagctggtaaacaaaagagctaggatttgaatctaaattcatctgactaaaggccatactcttctaacagccctctcctctggatataatgtcccttcatcagcccaggcacaaggagacattggggtatgtttttactaatcacttgtgccagaggaagtaattcgtgttctctacaccaaatccttccaactacagtacagcctctgtgttccctccaccctaggaaatatgtaagccaggaggaaggaaacatattaatagaatggctattttctactccattcactgacagatgctcaaagctcctgtttcatgatccatttccagaagccactttttaagctcagaccccaaactctccaaaacatttcattcctcccagtctgtctagtacatttttccatctgctcatggcttctgacacctctttctccagctctggtccacaagagctctaggcatctggttgatggaacttaatttgttctataaccagtatgattatccatcccttgactcaactttgtggttcttctttcctccaccctttttccatgagaagatacgttgggttccccacactggggccttttagagggtgaagggtgggaggagggagggatcaggaaaaataactaatgggtactaggcttaatagctgggtgatgaaatgatctgcacaacaaaacccatgacacaagtttacctatgtaacaaacttacacttgcacccctgaattttaaaagttaaaaaaagaagaaaaatatatgttgggttctatggaactcagtctgagaaaatccgaggccactaaggacgtagaggagcatcagggcggggctgcagtgcaagggactgggattagataccatggtgacagtgcaactgatggtccagtgaaagtggtaacgggaggaggcaagggaacactttgcttacctggatttaagtggacaaataacagcctgaaagaaagctctaagctaaggtgggctttccatgctccacctgaggaccagagttgtctccctgaacctggtgagagatagaacctgatatcctaacctgtcctggagactgaggaacccggcaggtgagcagaaactagaatgtctggccctgcgtgagatctcaagcttcccatgcagccccctcggcagcactgcctcctggagcttctctcacatccccacaccctgactcctgcagggcagagacaggcaataaagcagaccaggccaggtgcagtggctcacacctgtaatcccagcactttgggaggccgaggtgggcggatcgtaaggtcaggagttcgagaccagcctgaccaacgtggtgaaaccccgtctctactaaaattacacacacaagaaattagtcgggtggggtggcacatgcctgtaatcccagctactcaggaggctgaggcaggagaatcgcttgaacccggaaggcagaggttgcagtgagccaagatcgcaccactgcactccaacctgggtgacagagcaagactccatctcaaaaaagaaaaaaaaaaaaaaaaagcaaaccagactttctcacatgggagtcatattgccttaggagccagaacttccttctgaaggatgaggctttgtcaagttgcagagcttgaccctacccccctcaaaatggggccctaatggcttctctggaccctgggaacatcctgccagggcccaacttaccacaaggcaggcctagtctttacaatgcaagaagggtgtcaactgtctcaggatctgggaacgtctctcccaaaaccacagggcatgcacaacacgtaccttaagaagacacttaagaaacacaagaaattcttgtactcaagttgtgggctttactagcacactacctcttgaacaagtttcagggacaactcccccagatcatccatgtccacaacaaatatttctctttccatttcctcccataagctacataaagggtaggaagaggaagctgaggatccctttgcacccggactctcccacctcagcctctgccctgtatcttgttcttagcaggaataactgcacccttctcatctgccacctgcgtgttctgctctctcgtcttcccagcccctggccccatatcctagccacatcagctcagcttcttctgcaagttgagagtttagcaaaggacatgcagagggagaagtaaagtggcatctctattctgcctgagtttccatgcactggcctggctctgggctggatgtggctcagagttctggagcatcttattgggggtgatgctactgcagagacattacactatcttgtgcttctttctaggatcaggaaacccatgtgtaaaaaggaaaatgttacatagatctggggttaggaaccagattttctgaatgctagtccgagattgtttcttctcccgcattcttagcgttgttcctctcttgatgcagcaggataatttaggaatcagagagaccgaggggttgaggaggatacttattatttattatttaggtgcaccagcccagtcagattaacatccaaaaagactgagtcccgaacaaagagtctggttaccttttaagcattttttggggcagggggagatctgtgcagggggaagcatattatagaagcaaaaaacaaaaatagttattcagttgagacatgcattacatcatttgttacttttcaaggaaaaacatgtcttacgacttgagtttatctgcctagtgtccttgcagctgcacagctagagaaacagggtcttcacaatgcctgggaaagggagagataaggctcactagccacagaaaaacaggcagttactttttaagggacttcagctctttctcttcctcagggggaattgggttttcttacatacaactgggtttttgcttacacattctttaatttcttttaattcctgtttcattgacagtagttttcttcttgctggaaggagctgcctgtgccactcacccagattctaaagctccatttctttctgggtttccattcctactctaagggtgtgcttgtcctgactttattcatacacgcatgctcctaggggcctcagtggtgcagagacctgcacaaaccaccttcagactgagactgttaccataggattccagggtagagctcccccatagggttccaggctagagctcacactgaggtcaccacctccctcatctttgttctgttgatccttctcagggtgaccctggctcctagggcccattctgctaagaggggttcacatactacaatttgtctaagaggcttgagggacaaggcatcccctccaggttagagaagaacatcaagatacatattaagtgcagatggatgctctagagaaaaaaaaagggccatagtatcagttcaagaaatgaatttgaacaccctatgttcagtgtaggtggtgctgtgtgatatgggatggataaattaacaacttagaaccatcgtttaatcagaatacatggtcgttaccctgattttggaagatagaggtgaaagggaaacagcaaaatgctacattttttcctattcctgtttattcccacttcagcacaggcgtaaaatccagggcagactctaaagtcagatcatctaggttcaaatcctagatctgccacatataaactgtgcgactttggacaaaattctcaacttctttgtgcctcaatctccttatctctaaatttggtataaaaacaaatgcatctgctttatatggaacattgtaaggattaaataaaatgacatatgtaaaacaattacataggacacaacagtgcctgtaacacagtaaatgtccagcacattaaatgttatcattattatcattagcagtgttctatcactccttgaattcgtccctttaaagcctccttccactgcattcttaattctcagtttcataatctgatagtctctttttttttttttttttttttctgagacagagtcttgctctgttgcccaggctgaagtgcagtggcgcaatcttggctcactgcaacctctgcttcccaggttcgagcaattctcctacctcagcctcccaagtagctgggattacagatgcccgtcacaggcccagctaatttttgtgtttttaatagaggtggggtttcatcacattgaccacgctggtctcgaactcctgacctcaagtgatccctccgcctcggcctcccaaagtgctagggttacaggcatgagcccctgcactcggccttagtcttttaatatatcttaatttttttaagatgatttgggaactgaattagaatatttggaagcagaatagtcccaacttcaaaaaaatggttgaaaggcaagatgaaagattcagtttgatcaaaaaaagaactttctttgccaatagagccacaggaattagtctggttaaaagactacttctaaatgaaatgggaaatatggtgtcattgttcccaagccccagctttctacatcactctgacctgggatgagggagaggtgacacctcagccccagttctcaagcttaatttctgcactcgtcctcaactacatgctctcttttgcactccaaagttgctctctgaaaaaaagtctgagaaactcattttcatcagttcagagaggtttcctgggacatttcctggggttttggcacgtttaaccttcagtgtttggctcaatgtggaacaaatccagtggggttagctgaagagactttgcagaagccccaaactgtgtttagggtgtaactggtcttggctgaggaattcctgttgctgctgggacaggggcttctcacctctctgctgttggaggtgagattaaaaacgaggaatgagcatcccgtctccatccatccaatcctgcttcagtccctactgcctcaacatcgccattcagctaatagagcacctgggaactaaggcactccaagatgctcctttggaaaggctgagagaaggcaaatatgggtgagaagaatttatgggtctcttctgtgagcacttcagaggggatggactctgagccccaggcagattgatgatctgctagtctcagctgtgaactgttaatgaggaattagcagacagttgaagttacatctctatggatttttctggactccagatttacatgcctggcattctcaggacctggggaaaagtggagaccgatcagcgaggtctttgcagaaccactggatggggcagcagcaaactcaaatatacaagtgctttgttgtaaacaaatgacaaaccaagtcaccatccggaaattgacagctgtcattctttaatattgtttctgcctcttagctgtataaagaggcaaagcagcttggtggaaagagtgtagacttttgaataatgctgcgctactgtgttttttacagggacaaaactcagtgcagaagagccctcttgagcactctccttaactcttctacactgagttttttccctgtacaatgaagattaggctatcttccccaaaaagcggctgtaaagattagtgtaacattcataaagcacctattggggtcccttgagctcagtagaattgacacaacattatacaaggtaagtgacttagagtcagttagaagacacactctgcctatctgagatgcctgctggagccacacagagaaactgtttctcccttatacacattactgttttcacaataccttcccttcctcaaaaaaatgcacactctcccatttagggcaatatagtagaatgtagtaatggcacctctttcacaatcacccatggtttatgtttgtttttagtccttagtttgaatgaacttctttgtatacaatcacagaacaaattcacaacttatgaaaagcaacaacaaacatattattataaagtcgtggtcatgtgttttgatattccagaatagtacattaaccccctctcatattgagcttttccaagtggtaattatggtgtggcccaataaacaacaaccagcccactgttcaaatgtcatgacttagttctggccttcctcagtgaggaatccagcattcactccctcttgttactggtagcctctacccagaacaggttgcccattttccaacaacataactttgcatatttagaaactagttaatgataaggaagtccaactcacagaacaaataaagctcacaaagtgtttttcattgcaacttgatgaatacacagacattgctaacgtgataattattttttaaatgtgtgattagaacatgacagtgatgtgaaggaagaattattttttcgactttcttgatgacaaacctaactcttaaccttacataaaattgtgaaaaatacaatatcaacaaacacagtttagggtttaagtttggtgtaaaagcatgttctggtggaatagtaacagacaggtaaatattacttagcaaaagtgaaagagctagtttgcaaaattaaagaacttacacagaatgtaaatcaaaaggttttcaagggaaaaaaaagacaattaaactgaataatatatttagtgctgtaataagaatgggattataactagcttaatgtggtaaatactagattattctctttattgtgtggtaacatggaaactgatcagaaacaaggagttgccgcctgatgaggagcaatagctatgaaggtgaacgtttctattgagatgtttgccctgtgggatgaacttttagtgtttctgcagaatcagaaacctgtttggttctgccagattttcttacctggctatctttgttattttcaatattcttaatatgtcatgtaacatgttctttcacagtaagtaagttttagaggcacatattgaagttagaagtttggaagaacagaatttgtatagaacaattaacatatttttataataaaaattttcaataaaataatcgatgagcttatattacatatctgtaaaaagttatcactataccccttgctaatttaacagaatgtttgaattttatttcctatccaaaaaaatccacacataggaagttcatgaattcagaatctaatttttcactgaagaaaaaaaaatgagtttggccaggcatggtggctcatgcctgtaatcccagcactttgggaggctgaggtgggtggatcacttgaggtcaggagttcgagaccagcctggccaacatagtgaaaccctgtctctactaaaaatagaaaagttaaccaggtgtggtggtgtgcgcctgtaatcccaggtactcaggggaatgagacagccaatcgcttgaacccgggagggggaggttgcagtgagctgagattatgccactgcactccagcctgggcgacagagcgagactccatctcaaaaaaataaataaataagagaaaagaaaagaaaaaagaaaagaaaaaatgaattaaatttaactataaatgtataggataaattgttgaaactggccactaattaagcattgaagaaaaattttaaaaatatagcctgcttggctaattttttaaaaaatataaaaataattgtcttgaaaatgacaaaatgtctctaaaatcatttcttttattcctattaacagacctttgggagacaagttatcctactacaaacattagaaaagcaaaagctaacacaaacacacacaaaaatagtttaattataaattataaattattgcctgcaagtagcattgtcatcagtacaacctgaattagataaattaacaagcaggatgcaagttcacttgacataattttaaaggttgacataaactgtattcttccacctgtgtgtctagacttttaagataaggctttcactattttacttaaaacttttttgtttaactataattgcagaatgacaaaatctcatgtgtctaatataaaatctaagtcctctacattaatcgcccatatgcacactttcaaagaacaatgtatgcaattttggggaatactttaattattttctatgttttcttatactggttatacttattgaaagctttctatgtctttcaaatataatagtaaaagcaaggcttgaatttttttgcaactctgtagtgattaattatgataagcattttttcatatgtttgctggacactcatatatcttctttttggaaatgcctgttcatatcttttgcccatttttaatggagtgttttgagtttatgcttgttcaattgtttaagtttcttatacaacctggatgttagactttggtcagatgcattgtttcaaatattttctcccaggctgtttgtttgcactattgacagtttcttttactgtgaataatctatttggcataattaggtcctatttgtcaattctgggttttgttgcaattgtttttgaggacttagtcataaattctttcccaaggcccatgtccagatggtgttttctatgtactcttttaggattcttatagtttgaggtcttacatttaacttttaaattcatcttgacttaatttttgtatatagtaaaatgtagggttccagtttcattcttctgcatatggctagccagttatcccagcaccacttattaaatagggtgtctttttcctgttacttatttttgtcaacttgttgaagatcagatgactgtagatatgtggcactatttctggtttctctattctgttccattggtctatgtgtctgtttttataccaatacaatgctggttttgttactgtagccttatagtatagtttgaagtaaaataatgtgatgtctccagatttgttctttctccttaggattgatttgactattcaggcttttttttagtgccacatgaatttcagaagagttttttctaattctgtgaaaaattaaattagtaatttgatagaaatatcatcaattctgtattttgctttggtcagtatgaccattttaacaatattgattctttcaatccatgagcatggaatgtttttcgatttgtttgtatcgtctgtgctttctttcagcactgtttgtagttcttctttttttttttttttttttttgagacagagtctcactctgtcacccaggctggagcgcagtggcatgatcgctgctcactgcaagctccacctcccgggttcacgcaattctcctgcctcagcctcccgagtagctggtactacaggcgcccaccaccacgcctggctaatttcgtttttgtatttttagtagagacggggtttcaccatctctgcagccaggatggtctcgatctcctgacctggtgatccacccgcctcagcctcacaaagtgctgggattacaggcgtgagccaccacgcccagccttgtagttgttcttttaaagatctttcaactccttcattggttgtatttctaggtgtgtgtgtgtgtgtgtgtgtgtgtgtgtgtgtgcacgtgtggctaatataaatgggattgtgttcttgctttggctgtcagcttggacattatcagtatgtagaaatgctactgatttttgcacattaattttgtattctgaaactttaagatgttatttatcagttccaggatccttttggtgtagtctttggggttttctagattaaaaaaaaaaacacatatcatcaaggagagatagtttgactttttttttttctctttggatgcctttatttttttctcttgcctaattgctctggctaagacttccagtactatgttgaatagaagcggtcagagtagcattcttcttcttgctctagatccccaggaaaatgcttccagcttttttctgttcagtatgatgttggctgtgggtttgtcttagatggctctgtcattttgaggtatattccttcaatgcctagtttctcaagggtttttatcatggagaaatgttggattttgtcgaaagctatttctgcatctattgagatgactatacaatttttggttttaattctgtttatgtcatatgtttaggcatatgattgatttgcatatgctgaagcaaccttgcatcccaggaattaagtgtacttgatcatggtgaatgaaattcttgatgtagtactggttttcacttgctaatattttgttgaggatttttgcatctatgttaatcagggatataggcccacagttttttgttgttgttgtatctttgccaggttttggtatcaaggaaatgtggcttcatagaattagtcagaaaggtgtatcttcttgattttttggaatagttccagttgaataaatatcagctctccattgtatgtctggtagaatttggctataaatccatctggcctagggcttttcttggtcggtagggtgttttttaatcactgattcaattttgcaacttgacattggttggttcagtgtttcaactacttcctgattcaatcttgagagatggtgtgtttccaggaaacttatccatttcctctagattttctagtttgtgtgtgtggaggtgttcataagagtctctgaggaacttttgtatttctatgggattggttataacgccacttttgtttctggttatgtttatttgaatctctctttttttctttttaaatctagctaacagtctattaatcttgtttatcctccaaataaccaaattttgattttgttgattctttgtaagcctcacattattcttctgaacacagaagttacctctattgtcattgatatataacataaagcatatggtcaggagatcaagaccatcctggctaacatggtgaaaccccgtctttactaaaaatacaaaaaaattagctgggcatggtggcgggcacctgtagtcccagctacttgggaggctgaggcaggagaatggtgttaacctgggaggcggaggttgcagtgagctgagatcgcgccactgcactccagcctggacaacaaagcgagactccgtcttaaaaaaaaaaaaaaaaaaagcatatattcaatatttggcctagatacaagttgcaggtatctgggttaacataagggcaaatgggactgaggggtgagtaggactaaaatcccaggggctactgaaatggaataataaatatctaaagaatggttagatgtggaaagtctagaagagaagatgttaggaacttgttcattgattcttacaatttgtagaataccatactagattctgtgggtgagaagataaagtaagtcacaattcccctacggatggagtctccagtgtaagaaattgggaatttgcacaaagggaagatatataggataagatcatttgtgtgttgtaaagttacctactgatttttagataattactatgttttagtccaaaccagaacttgtaatttcattcatggtctaagaatgggatggaaaacttgcaaccttcctgaccagaaagaataattgtcacctagggtggtaaatgtgaacttgtgggaagcaaaactgagcctaacctgttttctactcctataaaccataaaaatgtgggaggattttaaatgacaaactgataagctcaggtttaaacacaatgggtctgaggtgagaatgacagcactaattagtaaagacactaacatattattgtgaagtatgttcttatacctagcttgttaagggttttttttttattgtgaagggatgctaaattttatcaaatgctttttctacatctattgttctgtccttaattctgtttatgtaatgaatcacctttatcattttgtgtatgttgaaacatcattgcaccccaggaatagaacccacttggtcacgatgttttgtttttgatgtgctgttggattcattttgctagtatttgcgtgaggatttttgtgtctatgttcattagagatacttacctcaaaataataaagggcacatatgagaaacccatagccaaccacataccgaacagagaaaattttaaagcattccctctaagaactggaacaagacaaggatgccaatttttactactcctattcaacatagtactggaagtcataggcagaaaaatcaggcaggagaaagaaataaaagccatccaaatcagaaaggaagaagtcaaattatctctttatgctaacaacacgattttatatatagaaaaccccaaaattctgtcaaaaaactctagatttaataaatgaattcagtaaagtttcaagatacaaaccaacatacaataatcagtagcatttctatataccaataacaataaagcagagaatcaaatcaagaaggcaatctcacttacactaactaccaaaaaacatgcctaggaatacatttaaccaaggaggttaaatatctctacaagaggaactacaaagcactgatgaaagaaattgtagatgacacaaacaaatgaaaaaataacccatgctcatggatcagaagaattaatattattagaatttatggatacactaaaagcccgtacttcaccactatgcaatatgtccatgtaataaaagtgcacttgtaccttttgaatttatacaaacaaaaaaatactaacgtagcagctaatattaaaatagcattttgcaatctgcaaagcacatttatctacatttcttaatcctagtcatcctatgagctgagaaagatcacatataaaaactaaagtatagcataacaagcaaaaagtttatatagtcatagaaataaatgaatcctcctggggaagagggtagaaaaataacagcagatgattgagccagagatagagggtggaaggaggaataggagactatatagacatcagtttctttttcactggggtttcttgggctatttgtctttcatgagagccattcatgtgtattagtgaataatcatgggtttcaacacctaccaggatgaaaggagtgtgtacttttaaattatctcaactctgtatcaatttattattccttccataaacttaaaaaatattatatcttggtcaatccgtgttctcagcaacatggtaataaccagaagagaataacagaatactagaaaatcttctggtatctgtgggcacttttgtaaattggcacagagagcagaactctcatacagtcagatgtggcttaattttaagtaactagagttcacattgaagtagatggtacaatggtggttaccagactggggagtggacaggaaaagggaagatattagtcagtgttcaaattttcagttagactagaggaatatgttctagtgatctattgtaccctatggtggctatagttaataataatgtattgaatacttcaaaatttctaaaagaatagatgttaaatgttcttaccataaagaaataagtatataaggtgatgaataacttaattagcctgatttaatcattccacaatgtatacatgtataatcacgtcacatgtgaccccataatatatacaatttatgtttgtcaattaaaaatttaaaaataactgaaatgtaaattaattaaaactttaaaaaagaactagagattataaaaaccataaaagtaggctctgatcttcccagatttttttcccttcctttggagtctattttcataagcatgaggccgtgtttaatgagaatatcactgaactgggagttagcagattgtattctagctccatattaataacttccttgctgtgtgccttggaaaagttatttatactttttgatcttcagtttcctcttctgagaatgagatttggatagtttcagttccacaggatctggccctacccctccccatccctcatgccctatcccctccctggatccactctgctgcagccgctctggccttgtttctatcctcaattcatgtcaagctcttttcagcccgagagtattttcatttgctgtcctctctgccattgtcctccaggccagttttagtccatcatcttattcaactttatttttttcatttattatattaatatttttaagcaatgaactaatttctttgttttattgcttatcactctcccaagaatataaaatccatggaagcaaggcagagacgcctcataatcccaaatgcttagaacactatctaaaatacagaaggtcctcaataaatagtttccaaatgaatggatgattttcttttttataattttacttttgcttttaagttctaggatgcatgtgcaggtttgttacgtaggtaaacttgtgtcatgggggtttgttgtacagattatttcatcatccagatattaagcctagtacccattagttatttttcctaatcctctcccttctctcatcctctaccctctgataggccccagtatgtgttgttcccctctatgtgtccatgtgttctcattatttagttcctacttataagtaagaacatacagtatttggttttctgttcctgtgttagtttgctaaggataatggcctccagctccatccatgttcctgcaaaggacatgatctcattgttttttatggctgcatagtgttccatggtgtatatgtaccacgtttttttatccagtgtaacattgatgggcatttgggttgattccatgtctttgctattgtaaatattgatgcaatgaacatatgcatgcatgtgtctttataatagaaccatttatattcctttgtatatacccagtaatgggattgttgggtcaaatgatatttctgtctttaggtctttgagaaattgccacactgtcttctacaatggttgaactaatttacactcccactctcagtgtataagtgttcctttttctccataacctcaccagcacctgtttttcttttcacattttaataacagccaaagaatggatgattttcaaaacaggatttattggagaaactttattgttcaagtagaatcttacctaagtgcttgatacacaagcaaaactagataatatcagatctgctgtgattgtggaaaaataagacaagaaacttccttcacataagccttgagatgcaccttaaagcaacctctcagagtccagctctttaggattacctcggaaaccactgggatagatcaactctacatttaataacagtttatgattatgcttctaatttccttctttgatctcaacatatagtattttctcagttccaatgcttacaaaatttggatgcgtttttccatggatgtgttactttattgtagttttcccaccctcattccctctcctcactgtaaaaatgtgtcttgcaatcaaggaactgcagtatatagaacagtgttccacagatcctctaactagtatggttacattattactttagtttctaaatgtacagaagtctaatctgtgtactgtgagaagtccagctcttgactcaaatctccaactattttgaggggttatgttctcccagtactaccactgcagctcactttctcaatgcatcttggggcctagaagcaactctcctctcccagcaccaaagccagcaaccctaccattcattgatcaatatgctaattcactcattcccttcatagcactgctgatataacattattttagcaggcttgtactgaaggctcttcaatttttcatattgtgtgtgcatagggaggaaacatttaaagggaattacagtgaaacataaaaggaagataattagaatcaaatgttatcattaatgtcctaaatatccatctggtaatcctctcactgagaaatttctcactgatctttttacttttattccctcttcctcagtgtttctgttttacttaacaaactcacttataatagctgcaaatctcaatttccaaatttttatctctttttcaatttagagtaattttgctctgtgttttcatctccttcttcctgatcatattctgtacagccccctatttcacaagcaaagaggtcatcaaggattttttttatacatatgaccatcattgtcatacagatcatgccacattcttggcacatgaaagcagtttcaggtagttcttgctttaaagagcatttgccatttcactctttctacatttctgtacactataaacttatcctagtaaaacatcatcctgtacccttagaaaacaaaagtataaccttatctctgatctgcttggtcttcactccgtaaaccatggggttgagtgcaggtgggataacaatgtagagattggcaaacatgatgtggaaggtgcgagagacattgtgtccaaagcgatgggcgaggatggagaaaaaggcaggtgtataaaacatgaggatgacacagacatgagaaccacaagtgccgagggctttctggcaggcatcttgggagggaaggccaaagacagcacagaggatgtgtgcgtaggaaacagcaatgagaatcacatctgagatgaccgtcatgatgggaacacaaaagccataccagaagttgatggagatatcagcacaggcgagctgggcaacacctatatgctcacagtatgtgtggggtatgatgcgtgtcctgcagaaaggcaggcatgtcagcaagaatacatctggcaggatgatgcagaagcttcgaaaggagatgcccatagcactcttgatgatggtcttgggagtcaagatggtggtatatctcaagggagaacagatagctacatagtgatcaaatgccatggccatcagaatggctgaatccaggacaaagttatagtgaaggaagaacatttgtgtaaggcatcctgggaatgtgatttcgcgagcccctagccaaaagatactgagtgctttaggcacaccagctgtggacaagatgaggtcagtcatggccagcatggagagaaagaagaacatgggttcatgaagactatgctccaccacaatgaggtagagaaggatgcagtttcccacaacagctacaatgtagatgatacagaagggaattccaatccacacatggaattgctccaggcctgggatccctaccagaatgaagggtcctggattgtaactgctcaggttgaaaatgatcatggcagaggcagatggcataaatctcagcccctaaagacagagggtgattaaggatagagaaacttgagtaactctcaaactttcaactaattataattattgcctcctgaagataaagtgaccatataatttgtcatccaaaatagaacctgtctgaaatgaacaaaggttaaaattagtaataatggtagcaacatgcaaaaaccaagattgttccagatacaaatagatacattattaaactacctgaagagaatcttttctttcttctgacctcccccagtagtttgcacagcttctacaggaagccttccagactggttacactcttccttatacactgttctcccatacaagttaacaaagtacagaatacactttttcatggtggattatagctcatatgaccttatggacatcattgtttaggatctgcttgctctgtcattgtgaattatctgtctctgcccccaagacaactgtttgcttctcttaaagctacctgatgactgtggctcttacatttgtaagatcagcacccctttattgccatctaaaaacctaattcagttcagcaaacaccagatgagttcctacactatgctggataacatgtgtaagtcagatttaaactaaaaaattcccttatagctgaggttcactagcctttctcctcaaaaaaaaaaaaaaattcaatagttttccaacactttatatactacgtaagtgaataatattctaatactgtggacttagtgacactatcagtcaaggtttctgtccaaaagaaggactgcttttttgtgaacatacatctattagagagacacatcgacccaagacacatactctctcaaacacagacccttaatacttacattctcaggcatatccagacctacacttacattctgtcatatattttgccaccatatatttacccatacataatcttacacaattacaagccccctgtcctcccatcttcccccgacacatgtgctgacaatataaacaaaatgtttcacaattagattttgtcactgtcacaggctttgtaaattcctaaaacctctccactggtcctataccttcttccccagtaatgcctctataacaactcacagcactcccaacttgtctgaggtcatcctttattcatacatatgtgaggaaaggttttctcaagtttttgtatttccatgaactcaaatacaacagatgttcatgaagtcatccaaaagcattcacaaacacacacgggtgcacagacggttaactctctcatttaacaatcagacaaatccacaatgtggaaaaatctacaacaatctgttttcttttttcaagtcaatgccattaaagggggaaggggaatattagataaggaaaatccatttccagattaaagtacatttaagagaaaaacaaataaatgcagtgtggttatttatttatttattttattgagacagagtctcactctgtcacccaggctggagtgctgtggcacgatctcggctcactgcaacctccgcctccccggttcaagcgattctcctgcctcagcttcccgagttgctgggattacaggcgcccgccaccacccccagctaatttttgtattttcagtagagacgggctttcaccatgttggccaggctggtctcgaactcctgaccttaggtgatccacccacctcagcctcccaaagtgctgggattacaggcgtgagccaccacgctcggcctgcagtgtagttcttgattgaattctgtttaaacaaaccaggtattgaattcaattaatgaatagttagggaaacttaaatatggactaggtattgagtgatataaaggaactagtgttaattttatcagcaataattatggtattatggtagatacacatacatactctcaggcatccacagtatgttagcaaaatattggcacagagcatgtactctggagcctcagaaagctaggtttcacaatttaatcctggttccacaatttactagctatgtgaatctgggcaagctatttaaactacatgatatttgggttcctatgtttttaaaagaaattaatatttctaatttttataattattattaggacaaaatgatacacattgaaaaaagaattttttttttgagacagagtcttgcactgttgcccaggatggagtgcagtggcacaatcttggctcactgcaacctccacctccatggttcaagtgattctcctgtctcagactcccgagtagctgggattacaggtgcccgccactatgcctggctaatttctttgtatttttagtagagacgggtttcactatgttggccaggctggtcttgaactcctgaccttgtgatccacctgcctcagcctcccaaagtgctgggattataggcgtgagccaccacgcccagccgaaaaatattctttaatatagtacctgaaacatagtaagcatgtaacaagttttacttctttatattaggttatattttatatcattagtattatcattaacaaccagaccatgcagtggaaaagagaacagaaattgcaagatggataaaaattaacaggagcacccctgggcatacacacataccagcacacttaattctacattttaagttagagttatggactcttgtcacatgtctgaaacagaaatttcctaacactgctaactgtggtcatacttaacgcagctgtgtaattgtccatctgttctgatcttttgatgcttaactcagtggagcatatacacaagtactggagatcaggacctcagtttataaatgggagttgctcaggaaagaaaattatagtgcccagcccatggtccctaagaaatagagccctggcttttcactcactttctctaagtcttgtcccaatcaaaccccttcaaacagccaatactcaccaaatcttggggatcaggccaaagggaaagaagaaagagtgtgttgacaaaatctacaagacagcagacacaccaaccaaaaaaaaacatgagtggaaggaaaaggaaggacgttagagaggttgattccctgtccatttattttctctgatcactcactgctccttgtggggaaaaggtaggtagttaggggattagagactctgacatgccctcttctcaccctcaagggaagaagatgaaaaagattctattaaccttgttcatgcctttgagttaacactgccttagagtgctttatttatttatttatttgtaagctgatgtgtatgtgggtggaaagctgtgtgtatgtgcctatcatatcacccaggtttcaagttcatgccctcacttaccagataaaggactttggatgagttacttaatttccattaaaaggtggtcatattagtacctgtctctcaagattttataaggattgacaaattaataggatactgctagtgaaaatgcttaacatatcggcaaacttatggtgtaaaggaataacctagggcacctgttaagatgaaaattatatggcccacatgaaataattctaatattatcttttaaaaattccagtggctttaggggtacaagtgttttttgattacatgggtgaattgtataaggttgaagtctgggtttctagcgtacctgtcacccatattgcgtagattgtactcaataggtgatgtttcatccctcacccctctcctagcttctcctcttctgggtctccaatgtccattatactactatgtgtgcccttgcatacctatagcttatctcccacttataatttttaaaacattaaacttcattaaacatttttattggtaaaaacaatatgagcaaataaaatatattcttatggagaaactgttaggtctaccagctggtactgtcaggaatttctgcaagtccagatatcaatttttacctaagaggcttttacccaacaattctgaaagccaagtcagtttttgtcaatgtttgtcaaacgtttgctaaatattgttgaatgtgttaattaataaagattgccaggagtccactcagtactctgaatgttctagaatatctggaataaaccagaactaatgagattagtattgtattggctcccaacagaatttttacctttcgctgaataaaaattgaggttgcttcacctctctatactaggataagggactgaagagtcacatgaacttgtgtattctgtaagaatgtgattaattgcatcacttactgcctattctttaagagctttctaaagatatttctccattcttcatataagaagtagttttgcttctctaacaattaactgtctgtaacttatagccatcatgaattatgtagctaatcatgtttaactctcacatagactgttagaaagcttacagctcaatttctgacccacatataataagagaacaaaaattcatagcaggtggaaagtgtattttcggcctattttttgtcttaatttttaaaaatctttctacttttctttttgccttttctatttatactttgtaatatgccacataacaatgtttctgaacaattgtcccataagattacaataccatattttagagtaccttgtctatgtttagacatgtttagatgcacaaataccattatattatacttccctacaatattcggtatagtaacatgatgtacagttttgtagcctaggagctatagaatataatagagagccaaggctgtatcacacaggtttgtgtaagtacactctatgatatttgcacaataataaaatcatctaacaacacatttatgagactctatcctcattgttaagtgggacctgactatatttttatttatggtatgcaaaatacatcaagtaattttggaaacaatgcatgtagctattgtcacatgttaagagatagactataaattcaaacacaattctccgagtccaaaggacattcttttctattaaaactatatgttgagagccattgtagaaataaaaattcaatgacatgtgaaaagggtagtagcacggggatgggaaagtagtctcaaggtaaagagaccatgaacaactctgatattttgagtcaagtgaaagcagtgagggtttgaactactggggtaggggaggagggtgcctgcactcagccggggaatccaagaggttatttagaaaaaaaccacaggttttgaggacgtatcagatttgaaagggaaataagacattgattatcattgctgcctggcagacacctaaaaataagtattactgaccaagtgactgaatgactcactatgaccaagttatgcatactggatttgaagagacaatgaatcatacagaggtacatttttggcttgtgactacatctctatggagatacaaacatgaaaaaaattgagaccaccaatgcttccaattggtcaagtcttaaacccacttcttagtctgtacgtgctttaccattttactagccataggaatttgccttcctccttttattccttgtggaaaactccacccacccacaactcatttggctttctcaaggttgagttaaacattgagttttatcattgccttatccctttgcttaatataaacacctgcactcttaaattaataattttatgattatttgccatttatttatttgataaatgttgcctatgtccctagtgtgtgctaggtattatacttgatgttgtttagaaattaataggagtgaacaaagtaaaaacccagaaccctgcagagtcatcaaagaggtaattttcctgccttgctatgatgtataaataaactaccatgataaataaatctgaaaaaccattcagatttgccaatcattacattgtcttcattaaaagttttataatcactttagagcaatcataaggaattacaaaagttcttgtttctagaagtcaaaaaatatttattatttcctagactcagaacttactttgctataactgaaatgattgagtagacttctgcctcaaatcacaaagaaagcaaaactcaagttttcgttaataaattttagtctgtcctttctcttgggtgtctgaacacaggttcagtctttgacctaacacacactaggaacttgtccctacctccaagagctcaggcacctatcactgggaccccttgggaaagagcaaaaggattctgttctggatttgcttggtctttattctgtagacaatagagttgagagcaggtggaatgattacataaaggttggcaaacataatatgaaaggtatgagggacattatgcccaaagcaatgggcaagaatggagaagaatgctggtatatagaatatgaggataacacagacatgggaaccacaggagcaaagggccttctgacgggcatcttgggaggggaggcaaaagacagcacagaggatgagggtgtaggagacagcaatgaggatcacgtctgtcatcaccgtcatgatgggaacacaaaatccacaccagatattgatggagatatcagcacaggcaagctgggcaacacctatgtgctcacagtatgtgtgagaaatgatatgtgtcctgcagaagggtaaacgattcacaaggaaaacacatgggacaaaaacacagaaacttcggaaacatattcccacagcaattttgacaatggttttgggagtcagaatagtagtgtatctcaagggtgagcaaatggccatatagcggtcaaatgccatggccagcagtatagctgagtccaacacaaagctatagtgcagaaagaataattgggtgagacagccagggaaactgtttggggaccaaaccagaagatgctaagtgttttggggacacatgtggtggacaatatgagatcagtaatggccagcatggaaaggaaaaagaacatgggtgcatgaagactgtgctctaccacaatgaggtagagaaggatactattggccacgacagccatgagatagattaagcagaatgggatgctgatccagacgtggtactgctcaagtccagggatacccaaaaggatgaacaggcctgtaccatggtcactcatgttgtacatggcctttaagatcaatagcttctgtgtcctaaaaacaaattgcttataatgaacatgaggaaattgtatggtaattcttcctccactgcttcctaggggctggtccgcctctttcctatattccaagaaaaaacctctcattgatattaacagcaatgttcatcacttgaagaaagactctcagacccaatacttctgatactaatcatccagttactctagaatcttcttcaaactgcataaactgctgttcccattttaatgactgagttctccctgggtcaatgtaagttgctgctatataaatatgagtatagagaaaagtagtctaactacatgcagggatagaaagaaactgaaaaatactgggtcacagttgggaaaatgagataattaacaattactgactcctagtacatgccagtttcttgaaaaatattatcttatttagaaaaaccttctgagatacgtatttttatccacctcatttttttttttttttacagaaactgaaactgagacataatcttacctaacatctcacctttagtaactagcagagccaaggtcattagattccacagccactactctttcatgttgctgttacaccaggtaactgcttcaactcactgtgagatgccaagaattcagaagaggcgtggacgtgtagcaaaggatgtaaagaaacggatcactggaactgtaatttgtcccaacactgaccctaccccaatttcaacgactgttctgatatctcagacactacatagagagacttaaggcttgtagaccagaatgttctctgagattgtgatgtttgatgcctcctatatgaatgaaatgagaaagggtatgaggctcaatctcagtccacccttaggaattaatgaggaaatcttgtttaagaatcagagaaaattggtttgtgtgctttttacaaatacagagaggacctctagtggaagaaaaatacaatttatatattctaaatcctaggtcaagctaaaagcaaataaactttataacagaagctaatattttttgaaaacctttaatatactacatgagaccacttttgtaattttcttaacaattctatgagacaggtaataatattatccacattttaaggatgcagagaaaagtgatttgtcaaaagtcacacaagaaggaaatggtagtgctgggaatcagacccacgagtcttttcctagactcctctatatataaccaaaattatctacagagtctgtatggcaaataacatgtataatatctgcatagcaaaagatacaaaattaaccaatatatagaaaactaaaaatataaaacaagttaacaacataaaaccaaatacatcatttatgcttataaatgtagattgctggaattcctctatcaaaaagcacaaagataaataaagtttaaaaattcaattatatgtcacttatatgagtaagatctaaaacaaaatgatgcataaaggataaacaagtgtgaataaacaaggataaaaaggatagacaagtgtgtttctgacaaatttaaatgtgatggaagcaagtctagcaaaatggaaagcataaaaagtaaaatttaacttagaaagcattaaacaggacaaaaggtagtttgcacagttaaaaggaacaaatgtttattaatactacaaataatttgccaggcccaggaaaccagacatgatgctaaaccttaggtattcagaaacacatatcagtctattcttaagagaacattacctgctaaagtcaacagatttgtaaaagaaaatttcaatgcagaatgaaagtcatagggaattcaaagatgcctgtggaaactgagtggagaggtattatcaaaacctgtagcatcagagaagatcttgagaaataggtgaaacaatgtgagtcttgaggatgatgcagattactcaagaagacagagaaaaaacatttcaggcagagaaagcaacacatacaaaggcttagaggcatgaagttatgatatattttggtaaatttacatcatctaggtatatttagcggagtgctgggaaatgggtagcagccaatcagtcaataaagatgtaagcatgtaataggtactggaaagatagtgtgtataaaacagatgcaatgcctctcgtggtggagataatttattgaggaagacagacactattcaaataagcagtaggttatatgtataagaataattattacctgcgatgtatgttatggaaatatataggttatcatgagaatcaataacaaagacgattggacctgcaggagataggaaaggattcttggaggaagatattgtaaaatgaggttgattttaacaaaaatataataaaataaataatactgaattctacctgtaagtcaattgaatttagcccttcctccctcccagagaggtaggtcccccttattgtttccatattacagacaagaaaaaagatgatacacagaaagtatatccaaatttgttcagctgttaagtggaaaagccaaatttctaacaggtagtttgacctcagatcttttcttcgactccactttacactatattattttcagtaggctaaaacagaaaggaaagcatttagaaagaaaagtgtgtgtaaagtccttcaggtaagaaggagctagatgtggaaataagctccttgaaagcagcaggtacttggtggtggtggtggtggtggttgttatgtgtgttttaatatatgtggctcatatgctaaaaatgaaaagaaaaagagaaagagaaagaaagaaagagagagagagaaagaaagaaagagaaagggagagagagagaagggagagagaagaaggaaggaaggaaggaaggaaggaaggaaggaaggaagtctaatgaaaacatcaaaattatgaaaaatagcaaacatttttagcaggcacctagcctcttcaagagacattcatctggaaaggtggcattcatctggatgcattggttatgccataaaccctaagtataaccagcataaaaggatgcaccctgtcccagtttgctattcttatatttatgcatttgtccaaccaccatttgttgaggcagtctacaggacagtatagacggttacgaggaaagagctggaggccagacactcctggctgccatacaccaactccatcagttctctttagatgaaattgggaaatttatttaaccactccaagattctgtttcctcatgtgtgtatgaagatctaagctacctcacagggtttgaggattgattgcaatgttataagcaatgcactttgtacattgtttagtacattacatagtgatctttttttaagttttaatttaattttgtattttattctactgtgtaacaagcactgtggatgcagatatgactaagacttttttttttaactgtcctcaaggagatcacggattagtagggaaatacacacagaaggaggcaattccactgcagagtgacaaataatatgtaacctcaaaaagcacaaggatctgtgtgggcacagagaagatactatgcaattaggaaagagggcaggatggtcaagaatcttatattggagctgtgttttgaaggaaaaagagaaattctcaaggcaaatgacaggaatagggatacgctaggcagagaagacattatttcaaatgtgaaggattaagtgagaatattgtgagatttggggaattgtatgcaccccgatatggacagcaccctagatatgctgagactgagagaaaagaagaggaaggtcagatgagtttggagaagtaaacaagaacttgtactttctgattcagaacttgaatcttatcctgaagactaagggagggagggggctgatagaggattttacttgggagtgtgacagaatgaaattgacatattgaaaactgcattctggctgctgtgtagacttgctgttggaatgaagtaagatgcaattgaaatgaagttttagaaacagaatgagtttgagaatttccctgtagtccagggagaaatgatgatacatgctaaaagggatgaattaaataatgcttcctccagggctggaattgggggaaatgcctagagtgcaacatttaaggaacaaaggactcactctcagggttttaagtgcttcctttaatgttgcatcctaggcacctctatggggctcactgctcagtacacagacactcaaggtgttattgccagttaaacagaaaagaagtttactgttttcttctttgctcacttgtccctgtgtgctgtttagctggagacaggggcaggaaacaagtcccagaggtcactccactgggactttcttaggagccataaatgctctcaggctcatcgtgtctgcagcgcagtgggagtctcccatctgtggttgaaggaatggatggaagtgtgtgagctagattgcacagatagcaagcagaacatttctggtgaacttggacacacagacacgtggaagttactgtaaccacctagattgcaagaaacctttcctttgtgggctagccaagtgggcaggagtaaagtaagtaattttatttcagagtgtaatttttggctacctttacccaggatttcaagtctctgaatctgaatttccccacaggtcccctgcaacatttctccaactttcagccttcttgtgccctttcccaggaataatgcccacctctgtaccttgctctctgaatcttccccagtgacattttgcagctataattatctaattcaccgaaccatgcatgatgaaaatgccagcatccaggggctcctgaatgacacaggcttttaatagggtctattcaagaggggctctagtcttctaactcgaggtaggactccagatcagagatgctcccaagtaagtggtctggggaatcagtgctcttgatagagaagacagggaccctatgggtacttctcaaatcttatcctctgtgggtagctagatgttgatctagacttcttggttgctttgtctatgaagtctgagctcacacacataacttcttccattttaaaagcttgagacatcacatcagagatattatttgccaagttgatcttcgtgaataggaaaaatgccttggctctttaagaaatattagggaaatgttttaatacggaataaaggacaatcacatattgctgtgcacacatttctattctttggtaaacgtaactccgtaattgctgctatgccaatttatggcaccaaccaatatttcaagtgatagtaatcaatagcagactgcccagcttatttttaaaaatcaaaggacaactccaggtgattcatgagcctggaactggtccaacagaaaaaaccagattcttagttattcattagaagatactgagtaaactcctctagaagttggggatattaattaaagtggttctaatgaaagtctaaaattttcatcactccctttaataacaaaatgaattccatcaaattactgtcatatatttggtaatagtaaaatagtaaaataataaatttctattagaaaaatagaaactatcagatagtaaaaaaaaagtaatatcacctgttagtttactacccagatataacaatagctaatatttccatgttttctctaccagacatcctatctatgcatgtatgtgtatatacattattgccattgttcaacacatacaggtgatactgtggaaaagtgtttagcttattttttaatttagcaataaatggtaaatattagatgatatttattttacataaaaataaactacctttgtatataagtcaatctctcctgatacaggataatctgttaatgagaaaattagttttctttttttctaacttctattttacgttcaaggatacaagtgcaggtttgttacagaggtaaacttgtgtcatgtgggtttgttgtacagattatttcctcaaccagatattaagcctagtaccgattagctattatttttccctctctccaccctctggtagacccagtgtgtgttgttcctctctatgttcttatcgtttacctcccaattataagtgagaatatgtaataacagtatttggagttttgttcctgtgttagtttgctaaggataatagcctccagttctatccatgtccctgcaaaacatgatctcattctttattatggctgcatagcattccatggtgtatattttctttatccagtctattattgaaggacatttaggttgatttcatggctttgctattgtgaatagtgatgcaataaacatacacatgcatgtgtccctataatagaacaatttttattcctttgatatatacccagtgatggcattgctgagtcaaatggtatttctgtctttttaggcctttgaggaatcgccactgactgaactaatttacactcccaccaacagggtgtaagtgttcctttttctccacaaccttgccagcatctgttatttcttgactttttaataaaagccattctgactggtgttagatggtgtcttactgtggttttgatttgcatttcgctaatgatcaataattttctttttaatgaacataattagctatttaaaataatggctgggttggggatttatttttcttctttagagagtatttcattatatggccccttttcagggataaaacccatttagcatgggtgtggttgcacaaaaattactgggagggaagatttgaagaaagtcaatcacactatgctccttaaagaaaaaaaaaaaaattgccaggcgcggtggctcacgcctgtaatcccagcactttgggaggccgaggcgggcagatcatgaggtcaggagatcgagaccatcctagctaacacggtgaaaccccgtctctactaactatacaaaaaattagccgggcatagtgtcaggcgcctgtagtcccagttactcaggaggctgaggcaggagaatggcgtgaacccgagcggcggagcttgcagcgagccacgagagcctgggcgacagagcgagactccgtctcaaaaaaaaaaaaaattggtttacacttttcattcaaattcagttctgcagatataaagaaaaccggaaacctaatttacttgttttggggaaggcaataaatattttaaccataattctgctagcctaaaaaaataaaccccaaaacaaaacaaaaaccacttgaagcctggatttaatgcaggggcctggatgtgattgttaagatcttctcctactacaggaacatgagtgtaataaaggtaaaacaaacaaatttggttctggcacacacacacacgaaacctttacataattaaaaactaacaaagaaattattaaatgtattttaagtaagaagagtttaaataagtggttgatatacatatccaattatactgacaacttatattttgataattgctcaagctacttacttctgacagtgtttctttaaagtcatgaagtttagatgtattaacaagtaaaactgaaatacaaataatagtttttaaaagtctgggtagactttggttcagaatctcatcctgcatttcaggaaagataatcatcttgtgccactgctgcagctccacccattctcaaatagcagcatccccaagtgtactcgtagttcttaataatgtaataaaatatttcaaaaaaattcatttttaattaatggatactcatttattatatagagaaacagacagacagctatattgtagaactatggttttcatacattataattctatgtgaaggatttctgttttgaaagcttttacattcatttttccctttcctgcccatgttgatttttctgtacatattatagatgatcaataaatgcttaatcaattaatagttggttaggtaaatgtgtgtgctagataacagaattgtttaattcaataagaaaaaaccttttggtttctattttttcctgatattctttataaaaattgataattttctctcttaaaatgtttagttgcagactacaattattattaaagattttacagttttggatggtcataattttaattttatgtcaattttatgagaaaatagtactggcttcaggattttcttttgaagcatctgtttaaaattatgtgatcttattttaaatttttagaatatttctcttcaaggctgaatactacacatatttaggtcagtagttaacaaaactgagtaggtaagacttgttaacctgagctcattgagggttaataaatatatgctaattgattatgaccaattgactctctactttctttcacattagacagaaaagtggtgaaagttccttaccataattctggcatgtcagctcccaaccactccactgccaatcatgatatgtttgtcctcattggcgttcctggcctgaaggagctgcacgtgtggatctccatccccttctgtctgatgtacctggtggctgtgtcaggaaatggtctccttgtctgtgtggtggcagtggagcacagtcttcatgaacctatgtaccttttcctctccatgctggcattttgggatctgattctatccacatctgcagtacccaaagccttgagcattttctggtttgatgatgtggacatctcctttggtggctgtgtcactcagctcttttttatgcattttgcctttgtagcggagtcaggcattctcttgaccatggctttcgaccgctatgtggccatctgctacccattgaggtatagcaccatccttagccacagtgttattggcaaaattgggggtgtcgtggtgttcaggagttttgcaactgtcttctccatcgtcttccttgtgaagcgtctgcccttctgccggacaaacatcattgcccacaccttctgtgaacacatggggctggcaaagctaggttgttctgaaatcaccatcaatatttggtatggaatctctgtaccactactcagtgttacgttagatatggtgacaatagtcatctcctaggggctcatagttcaagcagtcttcaggctgccctcccttggtgcttggatgaaagcactcagcacctgtggttcccatggcagtgtcatcctcatgttctgccttccaggaattttcactgtcattgttcagcgctttgcctgaaaatttcccaagtatgtccacatcctgctggccaatctctatgttcttgttccccccatgatgaacccaattatctatggagtaaagactaaacagattcagaaaggggttgcccttgtgttttctccaaaaggaaaatgttgctgagggtgactggatcttactgtggctttttaaagaagaggaggagcgtcctattagatgataagaaacgtttgccatgtattttttcatgaaatagggatgacgcaaattatataagtctcttatttcaaagggaagtaggttctcaaaggtttgttattcacagagataaacattattattttaaatatcgataggtttttttagtatttaatgacaacataatatttctacttctaccaaacaaatgtaaaatcaatatataacacttctctaatatttaaattttagatatctctgtgtcctcccgaacagctattataaatacaattagaaatagtgaacccccaaattggataaaaatagggaaaaggtagaggcttccccttctatctaactttatttgcaaacaaacgagaatatctgataatactagatagtgccattcacatatatgatataatattacagtgttataaatatgtgatttgggagaaaaaagatcacataattagatcaatcatttttgagatataaactgccctgagtgctgggtgttctaagagagtttcctaagcattaagcatcccctcttctttaactccttaacatctttctcacagggttgtttaaaaatccaatgagaaagtgaatattaaagtgctttagaagttataaaattgtatcacttttttataaatgtgctgtgtcattattattagtgtgattatgtttcctggtatgaggtttcattctcattatggtcaaaattaaattcaggccaggtgcagtggctcacgcctgtaatcccagcactttggaaggccgaggcgggtagatcacctgaggtcaggagttccagaccagcctggccaacatggtgaaacctcatctctactagaaatacaaaaattagctgggcatggtgacgtgcacctgtagtgccaactatttgggaggctgaggcaggagaaatgctcaaacccgggaggcagaggttgcagtgagcccagatcatgccactgcactccagcctaagccacagagcaagactcattctcaaaaataaaaaaataaaaataaaaagttaaatgtaaaacagcaaaaaccttatcctttgtctacagccaagtcctcctatcaccctccttctttcttttcccaccagggatcacttagctatggtgaagtgtcctcctgtagcttttccctatcagttgactctgaatggaggatgacaacacactattcggctgctctatctgcactgctactataccaagtggtgtgactggctgatgcctctttgcacttcccatcctccagaaacccctgtaaggattttcaaagaaattttaccttgctccagaactatgggacctccttcttctcagttgtctgttcagactcttggcatcttgtagggagtagaggaattacttttgtgtttgtcctgtgttggggatgtttggattaattttgccaaaaacttgggatgcttggctaacagcaagcctcggacattgaatttacaactacacagacattgagagaactccagagggatttacctaacttcagaagtgtggagacatttcggggttgtgaagcttgtgagaaaggtcttatttttttctggaaaatttataccctggtaatatctaaggaaacattctgggaaggagggaggtatgtgtatgggggtgggtctagggaatagtctctctggctttcgtgagcaaagaaaatatatatttcttcattctttgcttatgatgcgcatatagcatgccataggacatttgacctggccttcattgcattgtctcaggagcaagaatcagctgtgggggaccacacagttattattgtctttataattgaataataacagtgtatcttgtccagaataatttgtgtgttccttcaagatgaaattgataaaatgaatcttcaaaacacaatataattcagtgcaaacttctaatgtaaatgatcttcaactttcacataattcaaccctgtatattttgagtgaccattgtccctatgctaattcctgaatcttcttcccactctcctttcttcttcactccctatagtaatacaaagctatatacttaaaaagttatatctaaatcacaataaaataatgtgttatcaaactactctcaaaaatacgatcaagtttaggaatatgaaaggtcgttggggtaaaactaaccaaggggacataaaaatcagagttcaaaagaaaagagccagtgaagcggttgaagctcaagtgcagccttataaggcctgcagtcgtggcctgagccacactcaggcttgtgaattgggcttcaagaggactatggccagtggtaagctgatgaatgcttaacagccaattcttggggcttgattgtagagcagctgattgagaaaatgtagatatttccactatagctgacttcaagctaccaatttgatgttgacctgcttgcaaaagtcctgaaagttaacatgtggctctcatgagccagtgggagcagcctctagcacatgactcttgtgactctagttagacctgacacactgggattagaatgatgtaactcaaaaaggatgtgataatgaagtctctgggctacagaaatcctgactcattctgaggtagaatagtgagtaggtaagaacaaaaattttggaatgaaattgacttattttctatatatcatcatatatttcttgcatgataatgagcatattgtttaacttttattaaggtaagattcacatgacataaaattctccactttaaagtatgtaatttagtagcttttagtacatttctaatgttgtgtaaccatcaccaaagtctaatttcaggcctttttatcaccccaaaaagaaaacccatattcactaactagtcactctccacttccttttcctgcattaacgtacttcctgtctctacaaatgtatctcttctagacatttaatgtaaatgaaattatgcaacatgtcagccatttctgtctgattcctttcacttaacatattttcaagattcattcatatttcagcatgtattgaaactttattcctttttgtggctgaatatattttattgtataattataccacattcatcagttgatatatattttacttatttttacttctatttttgctactatgaataatggtcttataagcaaccatttacaagtttttatgtgaacacctgtttcagttctcttgggtatatacctaggagtagaattgctaggtcaaatggtatttctacatttaactttttgaggaacacccaaactgttttccatagaggctgcaccattttacattcccactaccaatgtatcagggttctaatttctcctcatcctcacttgttattttccttttcatatatatatgaaatatatatatatgaaacatatctatgaaatatatatatatatcactgtcctagtggatgtgaagtaggacaaagtattttatggaaaaagattacaaaatcatttcctcttctcctccttgttacccaagttcaagctaagcttcattttccagagggaatagcatgtataaaggtccaagtggaaagaaaacatactttgtttgaaaaactaaaagaaatatggtatgattgtaacataagggcatgtaagagtaagagaaaagaaggaggttggggctagtggacaccagacaatgactggttggcatcgaaatactataaaaggctttgaaaacatacacgttaggaaatttggattgtattcaaagcaaatagatctactgttgaatgatttaaagtagaagagtgagtcgatctaggtttgagtttagtaagaccatgatattttctgagtagcaagtggatgggagagaaaaaaagactggaggtagcaaattcctaaattagggtatggaaaacttgggagagagagacaatagtgatcatattttaatgtgaagtgtgtggataaattcaaagcatatttagaaaacataataaataataaacatatttttaaataattaaataattaaaataaataagaaaaatagactttgacatggaaaactagttaaattttatactgtttagtaagagagaattcaagatgatttgtggatcatgaagcaaataaggagagaaaatggtaatttttatttgaacatgttgattttgaagtttcagtgggaaatataagagtagacatcaaataggaagttggctatagggtcatataaggaatttgatgtacagctttagacttggtaattttcagcataaatatgcttactgaatttatgagcttgctacatcttaaacacactgagcctcacaagcctataaattaatttgtttctttatttgaaaaagagaaaattgaaacaggatgaaagaactaaaagaagggtaaaagtttctgcatttatttatgatttgaaataagcaacacctcattttaggccattgaatgagtgcttcccatatttatgtttttgatggtagaaaattagaatgcctccatttgatgcctattattttcttgcaactcgaataatctttatctctcttatctcctaattcctttaattgtactgagtttctccaatagcactgaaatcttaaaattcataaaaattggatctctcattggaagactttctgctagtgatttacataagaattcttttaaatttttcacagcccatttatccatattctcatcctcatatcactgcatccctttaagaaagaataattccaatctgctttgtttttactccataattatggaattgagtacaggagggattgccctatagaggcccacaaacataatgtaaaaagtgcaagagatactctggccaaagtgatgagtaagggcagaaagcatggctggtgtgtacaacatgagaatgacactgacatgagaaccaccggtgcttagggccttcagaagggcatcactggatggaaggtggaaaacagcatgaagggtgagggtgtaggaaatatcagtgaggatcagatctgagataatagtcattaccaatatagtaaagtcataccagatattgatggagatatcagcataggaaagcagggccacacctatgtgctcacagtatgtgttagaattaatgtgtgttctgcagaagggcaaatgcttccccaggaaatcaatgggcaaaatgttattaaaccttcaatcaatgctcaccacaatcttgccaagtgtcgaggtgtcaagccactggtgtatctcagaaggaaaccaatggtcatgtaatgatcaaatgccagacccaacaagatggccaagtccagaaaaaaagctaaagtgaagtagaccaaaaaaaaaaaacctggtgaagcatccaggaaatattattttctgagctttcagctagaatatcccaaatgttttggggaaatatgtaatgcataatatgaggtttgcagaggccggtatagagaggaaggaaaacatgggtttatggaggttgtgttccacagtgataaggtagagaaggatgacattccctacaagggagacaaggtaactggtaaaggagagaattcccatccagatgcagaaccactccagccctgggatccccaacagaatgaagagtcctggattgaagctacttaaattcaatgtggccatcgtggtgattgccattcactgaggacaaaatgtcacatttgattctgagactgactggccttgaatccatttaagtcttttttataacttggatccctttgcctttatcatgtaacaaacacgaagaaaaacacaatctatctattgtcataacctttacatcatttatcaaaggctgacaaaaggtattaattaaacccactatttcctgcctatagccattaccatgaccaccttgttagtatatctggaccatgtcccaccagacccataacctgagagaatactggccctttgttgtcaactaaaattccaagactgttttcctctcactaactaattcagtctgaaatttctcaaggatgtaatctgagggttgactatgactcttcctcctccttcaaacccagtattttcttttcctacttctgtgattttcttttggaacccctcttttatctgcctactccatttcttcaccactgcctcacttgaacccatcctgattattaattggaactgtagaatgagaatgctgattcttattctggttctgtcaatattttgcaaacctttacctaattgtgctaccttattggtccctgaaaacaggaaactatcaagtcactcacaatcttgtgtaaaagcacataactattccctttatgcctacagaatacattttatttccctgctcaacaggcaatctctttcccgtatatatgggttctacctatgtgaatgtgtctaaaactctcccctaaagcatatccatataggacttcatatattctccatcattcttacatctcactgcttatattttactccaaaagtgcaatcttgccttctctcaatgtctaaattctacctattatttatgattctcgaaagtgctaatgtcctctgaaaaccttctccaggattacttaaccatgttttgaaaaggactgacatatctgtgggaatccagaagttcaggtgcttgtgaagagctgcgaggaggccctattctttcacctgttgctctccttaatactctgcaaaagcaggaaatggaggcaaagaaagggttgtaaactgcactgctaagtgtttaatgtgtgcctcaaaatgccagtgaagcccttcagcaacctgggacattgattgttcacaaatatttaagaaaatctctgttcattagctgaccgctaagataactgagtagaaaattcagtggctgtacatgacaaacaagaaaacctttacagaaatagtccaaaaagtgacttaaaaaagaaaaacctataataattagcaacaacagcaaatcctgggaatggaggagaatctactttccagggttatcactttacattgtttaaattttccagttttaacaaaaaaaattatgagacattcaaagatataagacatgtgatctatacacgggaaaaagaaaagtcaataaaatctgtccctgaaaaaacccagatgttagacttattacacaaagactaaatgagctggcttaaatatattcaaaaagctaaaggaaatcatgtctatacaactaaaggaaaatatgagaaaaacatcacaccaaatattaaatatcaacaaacaatttataaaaagaagtcaaatagacattctggtgttaaaatttggaaaaactgaagggtggctggcacgatggccgaatagtaacagctccggtttgcagctcccagcgagatcagtgtagaaggtgggtgatttctgcatttccaactgaggtacccggcttatctcattggaactgactagacagtgggtgcatcccacagagggcaaaccaaagcagggtggggcatcacctcacccaggaagcgcaaggggttggtgaactccctcccctagccaagggaagccatgagggactgtgccatgaggaacagtgcatttcgacccagatactatgcttttcccacagtcttcacaacctgcagaccaggggattccctcgggtgcctacaccaccagggccctgggtttcaagcacaaaactgggtggccgtttgggcagacactgagctagttgcaggaagatatgaaatgatatgaacagacacttctcaaaagaagacatttatgcagccaacacacatatgaaaaaaagctcatcaaccctggtcattagagaaatgcaaatcaaaactacagtgagataccatctcatgccagttagaatggtgatcattaaaaagtcaggatgcagtgagccgagattgcgccattgcactccagcctgggtgacagagcgagactccgtctcaaaaaaaaaaaaaaaaaaaggtcaggaaacaacagatgctgaagaggatgtggagaaataggaacgcttttacactgttggtgggagtgtaaatttgttcaaccattgtggaagacagtgtggcgattcctcaaagatctagaaccagaaataccatttgacccagcaatcccattactgagtatacacccaaaggattataaatcattccactataaagacacatgcacacgtatgtttgttgcagcactgttcacaatagcaaagacttggaaccaacccaaatgcccatcaatagattatccaatatgaagaattgaaagaaaaagacaaaaaataaacagagactcagaaacatttgggacatacccaagtataccaccatattcatagtgagagtcctagaaagggaggcaagagagaaagatgcagaaagaatattgcaaaactaatggcaaaaaaaactccctaaatttgatttttttaatatgactctacacattcaagaagctcaaagaactccacgtaggataaactagatatccacatcataataatgaaaatgttgaaagccaatagcaaaaagaaaatcttgaaagcatcaagagagaagtgagtttgttccaaagcttctgagcacatttcctttagaatcatttttatatgaaaatgctttcaaatagttcctattcctcctaaattatttgtcttaattgccttagtgccagagctggcacatagtaagcactctggcatggcagtattcactttccatctcaaagaagtaaagcatttaaataaaatgtgtcacctctttggtaaaaaataaaaagtatagacttaaaaaaaatcgataggctcataattctttgacctttgctagcttggtgggtatattctatttctagtgaggttgaaaatttttccacacatttcttagccattttattatcatttttattatattttataatttctagttatttccagtctttttttaagatatttattcagcgtcacaatcagactattacatttagaattcaacagcataggtgcaaaaaaagttaaaaatctacactataaccctttgttggaatgctttacactttccgcagaacagaaactaaaataacctgttatacaattagtcacaaatacagtcctcgagttttttgcccataaacatgagtatttgtctaaaacatgtcttctttgtagcagctaggccctgccaccactgtgcttggctgagttcacaaatctattgtaacctgtagcttccctgtcacttctcttgctctcttctcctgataagctttgtttcctaattaaaatcttctgccactgccatagctactgctactactagaaccaccatagccactttagtttcgaggtttggcaaaatattggcctccaccaccataggggccagggcttctgcctccaaagtttcctcccttcatgggtctgaaatttgaagactgattgttgtaattgccaaaatcactgtagcttccaccacctccaaaattgctttcattattaccaaatccgttatagccatccccactgccaccatatccaccagcaccatggttgccaccaaagccaccacaaccactgaagtttcctccatgaccaaagttgtcattcccaccgaaaccacctccataccaccatcaaagtttccagaaccactttgacctctttggctggctgaagcactagccatctcttgctttcacagggctttcctaacttcacagttgtggccattcacagtgtggtatttctgaatgacaatcttatccacagagtcatggttgtcaaaggttacaaaggcaaagccccttttcttgccaatgcctcagtcaatcacttcaatttttccatactggtcaaaataatctcttaggtgatgttcttcagtgtcttctttaatgccaccaacaaataactttttcacagttaagtgggtctttgagaatcttctcttgagacagctctctttggttccacgactcttccatccaccgtgtgtggccttgcattcatggctgcatccacctcctccacagtggcatatgtgacaaacccaaagcccctggagcacttggtgtttgggtctctcattaccacacaatccatgagtgttcccattgctcaaaatggctccttcctcagcctctcatcggttgtttcaaagctcaaccctccaatgaacagtttcctcagctgttcaggctctttaggagactctgacttagacatgagggaagggagaagagagactttgatgatgcttcttcggcggcatccacaagcagaaaggcattttccgttattattattttttaaattttttggtttttttagacagactttcactcttgttgctcaggctacagtgcaatggcatgatctcggctcacctcaacctccgcctcctgggttcaagcgattctcctgcctcagcctcccaagtagctgggattacaggcatggaccaccacgcccagctaattttgtatttttagtagagagggggtttccccatgttggtcaggctggtctcgaactcccaacctcaggtgatccgcccgcctcggcctcccaaagtgctaggattacaggaggcatttccattattcatatacctcttagtaaaacagcagcaccttattttaaaaagagagaggaaagagagaagtgactcattatgtgcaagggatcctgaataagattaatgctgatagcacatgagaaaccctgaaggtgagcaggcagtgggatgacatatttaaaatgctgaaagaaaataaattgccagctaagaactccgtatctggcaaaattatccttcaaatagaagataatcttcaaaagaagacactcaacaaattagtatagaataaaactctcataacctggtaaaggtcatctatgaaaaattcacagctcaaataaaagaaaataaaagacaccaagaattgaaaatagtaaataagattatctctactcacagatggcctgatcttatatatagaaagtgctggccaggtgcggtggctcacgcctgtaatcccagcactttgggaggccgagttgggtggatcacgatgtcaggagattgagaccagcctgaccaacatggagaaaccccatctctactaaaaatacaaaattagccaggcgtggtggcgggcgcctgtagtcccagctactagggaggctgaggcaggagaatggagtgaacccaggaggcggagcttgcagtgagccgagatcgcgccactgcactccagcctgggcgacagagcgagactccatctcaaaaaaaaaaaaaaaaagaaagtgctaaatgatacacttaaaaaatactattagaactaataaatgagtccaacaatgttgcagatcaatatataacactcagtcaatacacaaaacaaagagcaaaaattataaaactcttacaagaaaacataatgggagaccatcatgaccttggatttggcaaagtattcttagaaatgacaccaaaagcatgagcaacaaaagaaaatataaattgtacttcatcaaaattaaaaaataaattgttcttcaagggacaccactaagaaagtgaaaaaaaaatgacagaatgaaaaaaaaattgcaaatcatatatttgataaggatcttatatctagaattaataagcaatctttgccatctttaaaattcaataataaaaaggcaaatatccaaaataagcaaaaaatttgcatagatatttctcaaagcaggtatggaaatgacaagtgaacccataaacagatgatcaaagaaatgcaaatcaaaaccacaatgagatatcacctcacacttactaaaagatctagatttaaagtgtcaggtaacagcacgtgttggtgaggatgtggagaaattataatcctcatacactgttggtgggaaggtaaaatggtatagccacttttaaaaacagtctagcattcctcaaacaattaaactcaatttgagttaacatataattcagcaattccacttctagatctatacccaggagacataaaaacatatccacacagaaactggcacacaaatgttttacggcatcacaatttataatagtaacccccaaatgaaaataaaccaaatgttcatcaatccaagggtggatcaataaaatgcattctatccatgcaatcagatatttggccatacaaaggaatgaagtactggcacatgctacgaaataggtgaacattgaaaacaggttgcttagttaaagaaaccacattgaaagatcacaattgtgtgatttgatttagatgaaatgtccagaataggaaaatctatagagacagatcatggattagtggtttccagaggccaatggggagggaagtatgtggtgtgacggctaataagcagggagattctctttggggtataaaaaatgatctggaattagtagtcatagttgaaaaacctagtgaataaaccagaagccactgaattttacactttaaaaaagtaaattttatggtgagtgaattatctataaaaaaaagaaagaaaaactaagttaagcctggcccagaaaaatgagtcatcttaattttgaaagattctgagacagattgatacaatttattgtaccctgaatactagtctttactatttctgccctggttctaatgttattattttcttcttaccccttaatctatattcttgaaagcattgccattgtcatttatttcatctttaaagtcctttcgtattcattgtttcaattaagcactcacaataaccttacatactctctctctctctagtactaactacaatttgatactcttcgaagcctcccctagctataccagatgaattatttatctggattctggactcacagcaagttgcactcactgctgtattgtgattaatggtaactgttcatggtaaggagacatgatttcttcaactattgacctcaaatgctgacccaatgaagggatcaatcaagaattgtcaaatgtttcagtgagcaagacaggggtaataatccctgtacctccctccctttagaataatatatgaatgtaatagatgtttaggggcagtggaggggtaaattaaaagctctaaggtaaaaaagaaacatgggttttcagacagacacaaagaaggtgataaatttaaaaaccccaagagaaaaagactttacgaaggacactaggaagagagaaacaaaggtggaattgaagacatggaaaagaactagtgttggaacaggaaatgcaaaaacaaatttaatgaacactgtcaggccaagagcctctgagttgttgctgagcccttcccttcttcatatattaagagtgtctatcaataatctcttctatctggctctatgccaaagcatataccatgtgccttaggtccttgcgttgaatgggagggggaaatcagccctgatggcgggggagggaattggagctgagaaagggaaagatacacagagggaggagaatccctgctcccagaagagaggagggaataaacactgtatgaggcaagacctgagattcgattctatatattaaggaagactggctgtgtatgaattgtggaattgagaagccgtgaatctgagcaggtgacatcagggaggtaagtctgggtcagatatttttaggatgaagaggaagtattaatatggaggaataggatgagaaatgggcaatgttcaaagaggggcagagagaataatgggtagctggaatgaattgtgttttcctgaggggtggagtggaagaagggcagtttggagggacactttctaggtaaggttggagagactggatgagtaaataatcctttgctctcaaggaggatgcaagaatcataaattacagatagattatgtcctgagacactgaggaacagtggaaagaaaactacagcatatgggagatcatgcataagggataaatgggtcaagttcctggacagaggagtcaggtaaaggattcaaaaacaggtggtagaaatttactaaaatagcagaagcgataatttctcccattaaaaaaaaatgaaagagaattagaggatgaaggaggattgccagagtacagagaaaagaagataaaggaatgtttgcttgatggtctagatttctccgtcattgcagagattagcccatctgctgtattgggtcttagaggagaggaaggaagagaaggtttggaactaacattcatattttgggaacccaataagggataagtcaacagatgacaaaaaaagttctaatagaaactgcctagatttgtaatagatcgtatatatgaatttatcaaacaaagtatactgcctaagaatgaaaactaggaatacaagccaggataaggaattgttagtgactgagggaattaaatgtggtcagtattactcaagtttccaaccaaggaactcaggcttgcagagttgaagcctaaagccaagtgaaagtaaataaaatctgcttccattcttgtagttaatgtatttaattttgtatttaactttgaatagtctatctctgacctgattctactctaaaacatgtaaatttccatggtggccaagagatgtttaattggaaaagatatattagaaaagataggaggttccaaagatatctgaaggaggaactcgtggacaagggggttaagtatatatggagtggaaggttttttttacaaagagctgccagatggacacttaaagtggcgttactcagttttgaggtgtgaagactttaacggatgcctgaattggagtgaaaacagaaattactgggatggagaacagggagacaccagatggacacaggctaccttggaggttcattatttaggaggagaactgaagtcaagttggagaagaaagatgtttgcaagcgctgatgtcacccacaaaggtgggaacatgtagcagaggatgaacgtgatgagtgatgggtgctgtgggaagaatgagcacaatggtggcaccaactacagacacgaagagaacatgagaacagaagatctatgataagaaacctgtgatttttgtggtactggtgtgtgttgttgtcagtgtaaacttacatacatggctgagtaagtgggaatgtacctcctccacctacttttgaacattcattaagtgtaaattctaacccagtcaatagcaaatgaggcacagtcctggctcacagagagctcacaatatattgggactgaaaatattttagtgcagtaagtacagatagggagaaagagagatggctgcaggggaatgcaatagtacagagaaagttgctgatccagccatttggagggatgagaaaaatctttctggatgagaaatatagactggctatgttaaagaggaggatggaagtagaagaagcagaatgtataaaagaccacaggaaaaaaagagtagcttcaggggcatacatgctttccagtatgagcaaagaaaagagaaagcagggagggggagagagagagagagacagagagagagagagagagtgtgtgtgtgtgtgtgtgtgtgttagttgcatgaatctttcaggcaacgggcagttattatccttaatcaagatagtgcatatgcaaaattatcttttgggaacattgtttaattatgaggaatggtttagagactagaagaactgcagactaggagaccagttgggagggctttggataagtggatctagagcctggaaagcaacataaatggcaatgtagatttgggagatattagcacatgaaggctaaatggagccaaggtagtagacaagattggtcagagagaggaaagagtgagaagaggattgctacagaccattaggaaacacaaacagtaaaccattctgcagggagagagatgactttaatgagagcaggatcagaccagggtacaagagaagaactggtggaaggtagagaaatcaaagtcaaaagtggtctttcatggaagaatgatttttaaaggaaagaagagagacaaaacagtaatttaaaagagagtttagtagaataaaatgtttttattatagctgttgttaattttttgcttgtcttcaagttaaaaatatttgaatattctttaataaagatccaggaaatcaggagaagctgaagataaagacagagaataattgatgaaacaaagtccctgaattggtaggaaagaaaggtaattcagagaatagatggggaaattattcttgacgatacagctacatacattcatacacataaacacatgtatatacatgcatatgtatatatgtacacatatgaatgcatgcatgtaagtatgcatatgtatgtttgtgtgtgtataaggttgttttaaaaacaatctaatatgttaaatattcatacacgaggccctaggttcatttcccagcacctcaaaaaataactcaagaaacttgtcttatatttaggtaaagtaaaatatgttccagctatgacaaaagaaacattggaaaataggaaagatactggcacctctttctctgggactggaggaaatgaggggaggatggatgcagagataaataaatgtacaggaaaggaataatatgagggatatgttcctgatagtcctgaaatgtgagttacaaaagagaaacattcagtggagagagaaaaacagaatttgggcagtgataaaagtcgtatatgccaggtgtggtggctcacatatgggagccaccagcactttgggaggccaatgccagcattttgggaggccaaggcagctggatcacttgaggtcaggagttcaagaccagcctggccaacatgatgaaaccccatctctactaaaaatacaaaaaaaaaattagctgggcatggtggtgggcgcctgtaatcccagttatttgggaggctgagacaggagaatcacttgaacccaggaggcagaggttgcagtgagcggagatcacgtcattgcactctaggcagggagacagagtgagactccatctcaaaaaaaaaaaaaaagtcgtatattcattgtgagaatagttcaataggactaaggaggaatcatgtgtcctaatatgtactaaagactacttatgtgattgtgtcattttttcacatcctgactatgtaagctgaggataacactagttagatttagttgaagtctgagaatttacagatgcaggggaaaccaatggatactaaaaggtaatgatcctggtggaactgatagacatctagagtagatagggaagaaagttcaaaaagttcttacatcagtggctcacaaacttcagcatgaatcagaatcacctagagagcttgctaaaacacagaatgttatcccaactctaggttttctcatccgtaggtttgtggtagggccgaagaatttacaagttccctgatggtgctgtggagaccaagcttcagaagcattgttctacaccttcctttctgctctggatgacagtgccacatttcacagccacagaggtgactcaggaagtcacacgcaatttaataagctttccacagagaaaatttagcttaatataccaacaaaacaacaattatgctcattttaaaaattagaaaattgctcacacctgtaatcccagcactttgggaggcccaggtgggtggatcacgaggtcaggagatcgagaccatcctggctaacacggtgaaaccccgtctctaccaaaaatacaaaaaaattagccgggcgtggtggagggcgcctgtagtcccagctccttgggaggctgaggcaggagaatggcgtgagcctgggaggcggagcttgcagtgagccgagatcgcgccactgcactccagcctgggcgacagagcgagactccgtctcaaaaaaaaaaaaaaaagaaagaaagaaagaaaattgttactcagagaagacagtgacttgtccaagatcaagcagccaatagttaacagggcagacctctgacccaggttttttcacaccctctgcggtgttctttctaaatgccgtagctaccttaattgccttcatacttagcgcatctgtgcctagggaaaaatgggtgtagggttggcagtgcccaccacccccaaccctactctttcacataatctgctaatcaaattgttgtttagtcctcttgttgtaggactgcagtcctctctgtagggcctggggcttttgcagagctcattacagttcacatgcccaaagagattgtacagattggttttgatgttctacctatccctgttcttttctggacctatggcactgtgctgagtctggcaatgtttttgagccctttagtttcctgaaaaaaaatttttttttttttgagacggagtctcactctgtcgcccaggctggagtgcagtggcgcgatctcggctcactgcaacctccgccctccaagttcaagtgattctcctgcctcggcctcccgagtagctgggattacaggcgcctgctaccacacccagctgattttttgtattttcagtagagacagggtttcaccatcttgaccaggctggtcttgaactcctgacctcgtgatccaccagcctcagcctcccaaagtgctgcgattacaggcgtgagccactgcgcccggcctagtttcctgaaattcttaaagctgtgtggagagcttctgagtaagaacactgagcctgtctgtgggcaggtcctgtaactgtgcagagcctatgtgtaattatttacggagaatatggctgtgtgcagagcctgtgtgtgattatctgtagagatatgcctgtgtgcagaagccataactgtcatcgggcctgtaagtatatgcaggccttgtgcatatggacactctactaatgtattcaaaaatctgaagctcttttttccctatggcacaggtgagggcgctgcataaaatcatggcccttttttctgctaacagcataggtgctatgaacaactctgacactcgcatagcaggctgcttcctcactggcatccctgggctggagcaactacatatctggctgtccatccccttctgcatcatgtacatcactgccctggaaggcaatggcatcctaatttgtgtcatcctctcccaggcaatcctgcatgagcccatgtacatattcttatctatgctggccagtgctgatgtcttgctctctaccaccaccatgcctaaggccctggccaatttgtggctaggttatagcctcatttcctttgatggctgcctcactcagatgttcttcattcacttcctcttcattcactctgctgtcctgctggccatggcctttgaccgctatgtggccatctgctcccccctgcgatatgtcacaatcctcacaagcaaggtcattgggaagatcgtcactgccgccctgagccacagcttcatcattatgtttccatccatctttctccttgagcacctgcactattgccagatcaatatcattgcacacacattttgtgagcacatgggcattgcccatctgtcctgttctgatatctccatcaatgtctggtatgggttggcagctgctcttctctccacaggcctagacatcatgcttattactgtttcctacatccacatcctccaagcagtcttccgcctcctttctcaagatgcccgctccaaggccctgagtacctgtggatcccatatctgtgtcatcctactcttctatgtccctgcgcttttttctgtctttgcctacaggtttggtgggagaagcgtcccatgctatgtccatattctcctggccagcctctacgttgtcattcctcctatgctcaatcccgttatttatggagtgaggactaagccaatactggaaggggctaagcagatgttttcaaatcttgccaaaggatctaaataaatgctttcaacttagtctcaacccttttctatacctatcaattgtcccgtatttagcccattctcacctctacatcttccaattatccctgtgttattctcatcgatctcccaatttttttaaatatgtcacctattcaaacccacctctgatttcttttattggaaatctttagtaaaatctgtctcattctcttactcttcctattgaaatgcaatctgatttcccatcacctcaagaaaaactagctagttaggggaaatgtaagaaccaagtttacattctaagtgaaacctttttctaactgcttacattggcttcctaatgtgttcttaatcacttgtatataattttgacatttgccagttcaacatctttctcatgacgggaacccctgagaactgtcatatctaagaatttatagtctcatggaatgatatttttcttaccagttgcacaaattcacaatcacatacatgtatatacccatgttcagagatactaacgcagcagcagcataaataggtggacatatccatttatcaacttctatcaaataactctgaactaaccattacctgttctggacaaagttttccctgacatgtagacaattgtataggactcttttccatccaaatatgctttgtatttaaaagttatattcatcattaaaattagaaacaaaaatacctactcatatctgatacctatggatggatatattatttaataaatagtgaaagaaatataaacatctatatgttatttactaacttgctcaattataactactaacatcaggaattagcctaggctgatgttctctaagattgagaagagcaactcaacctgaatttcagcccaagaccaaactattcttgaaaacagttcacatctcaatcctgcccactcctatactcagcccacagtgaaagagccatcatttgagattctgccccacttttcatctaaatcactattttgttggatcattagtatattgcttctcgttttattagaaatctcatctttgtgtcttaactccctgtctagagtgtacaattcttgagaaagaaaagattattttgaaggctttttatcatattgccccaaagcatgagaaccctctcatagcgaatatgtaatatgagtatatgtgtataaaattcttctttaaaaaaatttaacatcacttttctgctctagactcattcttctttgcaggagttcttcctcctgggagacactgggacttaatgtcacgtagaggagagaattgtgctaggtgccaggagacatggatttaaaagttagatgtactacttggtcaataagcttgagagtctgcataatatccatgaacttaattttctgctcatctttgaagaagatgagaataatataacattaagtatctattgcaaataagcattcaatgaatgttcagttcatttccacctttttctttccacgtagctctctgtatcctctagacaatgataataaaaattagagagaggagtcattagcatccttattatgtggaaaagaaaactgtaagatgtggtgatcaagttttgagttctagatcttttagaaattgactctgttggaaatgactgttccatttactcactgtgtgagtctgggcaagtgactttacttctctgtatctcaactttctttttctttttcatttttttttttttttgagacagagcattgctttgttgcccaggctggagtatagtgacctgctgtcagctcactgcaacctccacctcaaaggttccagcgattcttgtgcttcagcctccccagcagttggtactacatgtatgcaccaccacacctggctaatttacatattttagtagaagtggggttttgccatgttgcccaggctggtctcgaactcctgaaatcaggtgatccgcctgcttcagcctcctgaagtgctgggattacagacctgagctctcgcacccagcaactttctcatctttaaaagggaaataataatagtaactttctcttaatgatttaatgagaaataaatatatatccatcttataacagcactttgcatataaataagtgctctataaaggatagctttatttgtattattgtttcaattattattaatgaatggctcatccgacatcataatggttgttctgagacctaaccagattgtgtatcatactcaaactttgtttctaccaggaggactaggaaaaagaaaacaagaataaaacaaaaatattttaatctaatatttacagtaactaaattcaatcaaatataattctaacatgtcaaaattaaatgtattctttaaagaattgtagagatttctttaaatctattttttaaaattatttatttattttttattatcatactttaagttctagggtacatgtgcacaacatgcaggtttgttacatatgtatacatgagccatgttggtgtgctgcacccattaactcgtcatttacattagttgtatctcctaatgctatccctccccactccccccaccacactacaggcctcggtgtgtgatgttccccttcctgtatacaagcgttctcatcgttcaattcccacctatgagtgagaacatgcgatgtttggttttttgtccctgcaatagtttgctgagaatgatggtttccagcttcatccatgtccctacaaaggacatgaactcatccttttttatggctgcatagtattccatggtgtatatgtgccacattttcttaatccagtgtatcattgatggacatttgggttggttccaagtctttcctattgtgaatagtgccgcaatgaacatacgtgtgcatgtgtctttatagcagcatgtaaatctactatttaaatcaactatgccactgaagacatataaacttgactgctgttttacagatacaccaagctcatttccttcttcaggcttttgtgcttgttattcctgtttcctgaaacttccttttcctgtatctttacatgactcattcccacctttcctgcatttccctgtttatatgtctcttccacaggaatttctctatgattttctaataagacatatacctccatttctttcatggggaaaaaaaaaaccatcataagcaaagagacaaaagtcaatgacaaactgaaatcttttcaagttatattgtagataagacgcttgcttttcctaatacttataagttcctcaaaatgtagaggaaaaaaatgatcaaaagcctgataaacataaagaacagatacatcattagaatatgctttgcatactattaataagagaaaatacaataaaaactacaccaagataccatttcttacctgtcagattagtaaaagttgaaaggattaacctcgtgctggccataatgttagaaaacagagcctctcatactttgcttatggatataccatacaatagaatttttaaacaccaaacaaaatgtgtatgaatttattatttgatccagaaatcacgtttataggagttacatttcatatatgcctccttatgtacaaaatgatgtgtacaaggttaaagattatgacaaaatttttgtaacacataaatatttgaaacaacctaaatacagtctgaattcctaggtttcaaatccaccccctcatgcttactaaagtataaaaacttgttaacatttaccaagttacaaaaaggcattataatcacacagacgggttagattgcagtcaccatattcagtacatactacctaactgtttgtcaccaggcaatttggtaattatcctctttaagcctcagttaccttctctgtaaaaaaagagtaataatacctgcttcaggggttgttttgtttattaatgagattagctagatataagaaataaataactggcatattaatagatactttattgctatcaaaattttaactaatataaaatagctagaatatgctttattgcaggtatatttgtgtgcacctctggtagaactgtatttccactagctgaatgcctaaaagtggaacatctagatcatagatcatgcatatttaaaattttgatagatgctgccaaattgtctgtaaatattagctagtaaattcatagcaattgaacagtatcacttgtgatattatcacattgttcttttacttggaatttaaaaaaagactatcttttaataattcgtatctacatgttatcttctttgaattatctttgttcatttttctctagttttcttgatctaactgattttaatatttgatatataaattatattaatcctttacaaaataaaaaatatagcagaatatatgcaaaatatagaagcatataccaaaaatatattttccaatttgcttttcaatagaaaagtcaacaagcaatttcaagagaaatttttaatttttgtgtttgccagtctccatacttataaaattagtttcattatgtttctctttatttcaagatcaagattttcttctatagcttcttttgttattatagtttgattacaaaattaacacattctgttagtataaaataaaaattgaaaaatataatttcctgatgctatctccacaaaggtaatgtgtacttgtttagaatcaaaggaagaatctgtcattttttatgtaagaagcagtttcatgtaagagataccgcaaaagggcctcctcttatagattgaaggctgagaccctgagtgagagattaaataagggagatttatcttagagggtgtaactaaatttataggaaaaaatatcaaggaatttgagacatttcttttcactgagttcctaacactctcccaagtctccgtctgaatcttcccctaacattacctagagagttattctcagttatccctgagaatgctcaaatgaatgaaggcatagtggaaaaaaaaccttttttctaccctcctagattctccagctagggccctgaaaattagactgacaaaagacagattaataagagaaaaacaaacacatttattaatatgtgcattaacatgggagaaacctattgataactaactcaaaagggtggttagaacattggcttacataacatcttaacaaaagaacaatagatttttaaaaagtgacaaaaaagagtttcaggcttctaagggtagcaaactgtaggaaagtaaaaatgtggtggaaactaatggaggataagggctaattagtaaggtttgtgtaggctctttctcaatgccatattgtctgtggtgataggttgttattccctttctggtaatacggagaagtatgagtcaaggggagggggtcaccatcacaagaggaatttgtgtttagcttttgggcagctaggaggagggcagagagctcatcctgtgtctgctttttctcaattaccttcagcttaaaaggattcttatgccacagtggtacattttggagtagcatattctaaacctatctcagtccatttgggctgttataacaaaatatcagaaactagataacttataaacaacagaaatttactgctcaaatatctggacgctggggagtacaaaacaaggtgccagcagattcggcatctggtaaaggcccactttctgattcatagatggtgccttctagctgtgtcttcacatggagaaagggatgagaaggtctctcttgggtctattttataagggcactaatccgttcatgagggctctagcctcatgacctagccacttcccaaaggctccacctcataatactattgcaatggtgatgaggtttaaatgtataaattttgtggggaaagggtgcagcacaaacttttagaccatagtagaatcccttcaacagctttaccatttcaactggacagatgtttaaaaattttttttttctttttgtttaggtggagttttgctcttacttcccaggctggagtgcaatggcaccatctttgctcactgcaaccgccacctccagggttcaagcaattctcctgcctcagcctcccaagtagctgggattacaggtgccggccaccactcctggctaattttttgtatttttagtagagatgaggtttcaccatgttggccaggctggtcttgaactcctgacttcaggtgatccacccacctcggcctcccaaagtgctgaaattacaggcatgagcctccgcgactgacctaaaataattttaattgaaggagcaataagaagaaaaaggtggaacagtttcttccccatctcacttgcagttttccttttcttcttcttttttttttttttttttttttgagacagagtctcactctgtcacccaggctggagtgcaatggcgtgatctcagctcactgcaacctccacctcccaggttcaagcgattctcctgcctcaacctcccaagtagctgggactacaggcacacaacaccaccctctgctaattttttgtatgtttagtagagatggggtttcaccatgttagccaggatggtcttgatctcctgacttcgtgatctgcctgcctcagcctcccaagtgctgggattacatgcgtgagccactacgcctggccacttgaagtttttcaaaacttatggtcctcaatccccttattattttaatctttaaccccaaacaagaccatatgaagacctttttggttttttttttttttttttgagtttcaggtgtcacaacctagatggtgaccttctttctttctttatactaattttattaatgagaagctttttaaaaagcacttgtttacatgtctatgttgacatcaattgtgattagaattaaacaatcctagggtgtatgttccattttagcttttggtaactccttctacctgcccacagattttttttttttcttttttgagatggagtgtcgctttgttgcccaggctggagtgcagtggtgctatctcatcccactgcgacctccacctcctgggttcaagtgattctcctgcctcagcctcctatgtagctgggattacaggcacatgtcaccacacctggctaatttttttatatttttagtagaggcagggtttcaccatgttggccaggctggtcttgaactcctgacctcagatgatccgcccgcctcggcctcccaaagtgctggatttacagacgtgagccagggccccctgccacacatttttatcatacctatctcagacaattgaagtttttcttttcctcaaaaatccaagctgagaggttataataaatacagtggagcatatttatttgtattctaaactggtcaaatagtcactgtagatggaatcttagaggaaaaattatgaaagattttaaaataaaaaaatgcttactcatctagtgtcctcttctgagttttcttagctttgtatcgtctttgaggttaatataatttattatggaaattatattgagctgaaaatcatgcaagtgattttgcccatagaaatgcaaattaattgtctcaaatagacatgtatttgatgattctgttgtggatgttgacttgttttcatctctttgtaaattcattgcaagtttttctgatcacttgtatttatgtgtgtttttaaattctcctttgggttggttacaccatcttgctgattctctccttaattaactaaataaatcttcggcatgtgttcattttatatgtccataaactctcattttttttaaaaaaagaaaacatcttttaacagaaatcaggctaaaacaaaaaagacaaattagtggactataggaatggtctacttgtgagaggtgacagcgtgctggcagtcctcacagccctccctcgctctcggtgcctcctctgcctaggctcccactttggcggcacttgaggagcccttcagcccaccgctgcactgtgggagcccctttctgggctggccaaggccagagccggctccctcagcttgcagggaggtgtggagggagaggcgcgagtgggaaccgggtctgcgcgcggcgcttgcgggccagctggagttccgggtgggcgtgggcttggcgggccccgcactgggagcaggcggcctgccctgccggcccgggcaacgaggggcttagcacccgggctagcggctgcggagggtgtactgggtcccccagcagtgccagcccaccggcactgcgctcgatttcttgccgggccttagctgccttcctgcggggcaggcctcgggacctgcagcccgccatgcgtgagccttcccccgcctccatgggctcctgtgcggctggagcctccccaacgagtgccaccccctgctccagggcgcccagtcccatcgaccacccaagggctgaggagtgcgggtgcatggcgcaggactggcaggcaactccacctgcagcccctgtgtgggatccactaggtgaagccagctgggctcctaagtctggtggggacttggagaacctttatgtctagctcagggattgtaaatacaccaatcggcactctgtatctagctcaaggtaaacacaccaatcagcaccctgtgtctagctcagggtttgtgagtgcaccaatagatattctgtatctagctgctctggtggggccttggagaacctttgtatggacacactgtatctaactaatctgatggggacgtggagaagctttgtatctagctcagggattgtaaatgcaccaatcagcgccctgtcaaaacagaccactgggctctaccaatcagcaggatgtgggtggggccagataagagaataaaagcaggctgcctgagccagcagtggcaacccactggggtcaccttccacactgtggaagctttgttcttttgctctttgcaataaattttgttactgctcactctttgggtccacactgcttttatgagctgtaacactcaccgcgaaggtatgcagcttcactcctgagctagcgagaccacgaacccaccagaaggaaaaaactccaaacacatctgaacatcagaaggaacaaactctggacacgcagtcttcaagaactgtaatactcaccgtgagggtccgcggcttcattcttgaagtcagaccaagaacccaccaattccggacacacttgcatctaagatagtaacagtaaagatggagagaaataaatcaaatggataaaacttcttcaaaaggagaaattaaaaggacaaaaattgaatgttgggatgaggaagaggaaagaatttaggagttcattgtttctgaggaaactaaaaaggctagttgtaccattcatcaagataagtaataaaggagaataaacaagttggtgggcaaataaacactaatattatatactgttactgagcaatcaatgggcttgcctcttgacatacaagccaataccatggcaccttttgagaaaagcaaagctttattgcaagtagactggcaaggagacagaagaaatggttagccgggcgtggtggctcacacctgtaatcctagcactttgggaggccgaggcgggcagatcacctgaggtcaagagttggagaccagcctgaccaacatggagaaaccctgtctctactaaaaatacaaaattagctgggcgtgttggcacatgcctgtaatcccagctactggggaggctgaggcaggagaatcgcttgaacctgggaggcggaggttgcactgagccatgatcgtgccattgcactccagcctgggcaaaaagggcaaaaactccgcctcaaaaaaaaaaaaaattaatgaggtatgatctgattggatcttgcaatgaggtgatgctgggagacatgatctgattggatcctgccatggggtgatgcaagggctcatctgattagatcctgaattctgccatgtgaggttctttcttaattcagtccctactcctcagtctgagcatttgggttccacctgtggttgcatgcttggtttatctaggcatgttcaggctatgtgacctttagccccggggggctgtggcaattgaaaaacagctcacaactatgacacttaaaagttaaaccagatgagtccgctgaggttataacatcttgtttttgttctacctgtgagttagttactcacatggactctggagcccaaaagaggtctgatctatagttaatgttaggactttgtcagctaggaaactggatgggattatctaggaaggggatttagagaaaatgagataataggaaagaaacaaacaaaaagctatatttaagtgactagcttgattttcttcaaattgactagaatgtgaatatatgcacagcaaaattcatgttttattcatcggtattactccagagccctgccaaatgcttggtacttcattatagttaataatgctacctatcactcactgacgagctattgtgtttcagggactgtcctaagtactccacatatacttgcatatttagtcttcacaataactctatgcagtaggtattttacagatagggaaactgaggcccaagagaggttaagtaacttgccccaaatcatacagatggtaagtaaatgagctaggatctgaatcttggcaaaactggttccagagtccatcatcttaaataccatcttaaataccgtgctatatgacatatatagtttaatatgtgtctgctgaaaagaaagaacaaaacaaatttttaaaaagaaggaaggaagaaaatataaaatatcaaaggaaagatggggccaggcgtggtggctcacacctgtaatcccagcactttgggagactgaagtgggtggatcgcttgagtccaggagtttgagatcagcctgggcaacataatgaaatcctgtctctacaaaatacacaaaaatttacccggcacggtggtgtatgcccttagtctcagctacttgagaggctgaagtgggaagatcacttgagcccgagagtttgtggctgaagtgagctgagattgtgctactacatgccagcctgggcaacagagtgagattgtctcaaaaaaaaaaaaaaaagaaaaaagaaaaagaaaaaagaagaaaaaatgagaggaaagtagggaaaacaagaaggatggaaaaaagagagggaggaaaggaccaaaaaaatgcattaattaggtccatgtttgatgatcagaagcatctgaaaacaaaattggtggcttgtttctcctacatccctaagcctctggaacaagaggtgtttctccctgaaatttgttttcatttggttttactgaagttcttcctgtaatcagatgttaacaattatctttcagaaaatccagttaggcctatcctgaattctcaagcataaactaccctgattcttaatcttagccttgcaatatctacttttttcttttcttttgttcccatcagctcccagctggtagtaatgagttaagaagggttttccatgagaggggcagaaacatttctgacaacaggaatcatctaacactgctttcaaacaagttgtactgaaaaaatatactagagatttttttcacaggaagtctctctcctgtgaatatattagagatttcctcaaagaaaatatattcgagcatattagagatttgctcacagaaaatctatctcctgagtttgtattttttttatcactatttggctatgagaatattctgtgacccttgtcatggtcctgtttgcttttcctgaaacctctttcctatcaaatgttaatatccacttattgctattaagaaatcttgacacctcaacctgtgcactaaacaatattcctggtatatactgagtatttaatattgagtattgtaataataacaggctggctctgttgataccaccctgagtctagaactgcagcagtgggtcctgagtctagaactgcaagtactctgagtattcaggaacttggggctgtcagcaaatctgtgccctctttaccttcaaacctgtcctactggatgcatcatattaccccaccaaacctctggatcccacatacttggttcccttttaacactaacagtattccactgtattgggtataccacttgtttttcaatacatttaatacttgatgaacagttgggttgattccattttttaatatgagtaaaactgctatggacatttgtgtacaaatctttgcacggatatgttttcatttcttttgagtagattcctacgagtggatttgatggattatgtggtaaatttatatctaacttttcgagaccccttgaattattgccaagtaccttcatttcttctcaaccgtcagaatgcccaatctccctgttcaagatgagaaattatagagaaaataaaaactgccttggttagcaaacaaaaaggaaaaattctgcacactgagaaacagtctttcattctgttttttgttttcttttttgttttgagactgattatcactgtgttgcccaggctagagagcagtagcaggatcatggctcactgcagcctcaaccttccgggctcaagtgatcctcccacctctcagcctcccaagtaattgggactacaggcacgtaccgctatgcctggcaatttacttattttttttagacagggtcttactatgttgcccaggttggcctcaaaattgtggattcaagctatccttccacctcggcctcccaaaatgctgggattacaagcgagccaacatgcccagccaacatcctttttttttaactgagcctactagccccagaaatgaagccctatgctgacaagactatggagcctgtaagttacttccatttatatcagctcttagaaaatggcctgagaagggactctgggttgggcttctccatcccttttccaatatttctaaccctctgggtgtcaatcataccattttgtattccaagggacttaaatgttggctgggccagtggcagggtggtgtccatactgggcagtttgggtggggtcaggagaatttcagagcataagcaggctttgacctgaagcgtcatccaggggcaatatggaggcagccatacctaaaaccgttgtgaagaaagctacacaaagggtgatctgaaataacctttgcgtggcttcttaagcctgcagacatgaggtagtcactgaaatagtgacacatgtctgcacttacgagattccaatgacctttcatttgcctggggactgtccagagaaatctcttgatacttaacccagctctctccctactgcccaatcctccgtccagacttttgtatggacaccccagtcccttctctctctatacctccctccccaagccaccttctaaggcaaggtgatactcacctaatcagtctccttagggaggaactttgacattctttttcttctcagagtttctgtgctattgaaaccctgtagttagagttctgaggctcaataagctttacatgtattcatcagacctaaataaaaacaaagattgtcttctagttatataggtcaaaattacagatacacacacacagctttatacatacatacgtgtaattttaaactgatgaattttaatgatcgtttggcaaaacatgccattatgcaaaggggcttttactcgtataactttatatgtttatttagacattttaattaatacgtctatatggagtacaggtgtattatcagtgtaattaaactctgatatgatattagaaagctacagtacactgcagacaatttacaagggtcatctctggcctggtgttctcaaaggcctccggatttgccgttcatcaggtaagatgaacagctttgcgttgctaccttcaaaaattctttttttttttttttgagagagagtctcgctctgtctccaggctggagtgcaacctccacctcccgggttcaagcgattctcctgcctcagcctcccgagtagctaggaccacaggcgcgcccagctaatttctgtatttttagtagagacagggtttcatcatgttggccgggatggtctcaatctcctgacctcgttatccgcccgcctcggcctcccaaagtgctgggattacaggggtgaaccaccgcgcctggcctcagaaaccatctccatctcccttaccacctgaggggtcactggtgaccacacccatggaatcggctggatctcctgcggggctggacaatttgaccctcctcctccccaggccccgccccttcccccctgagtctttcggcctgggtggaggacgcggctgcttcaagtccttggctctgatccaggccacagattccaggttagtgagcaagtttattttctggccagctaccgctgtccccacttgtctggagagtttgacccgctctgcaggtcgggttgggggtggttcacgggtgaaagaagaatgagggagacttctgcattttcaagtgaactcaagtttgggaagggagcacagaagaggcacctttgcagctgggaataggccgtgtaaagagagttaaacctctattctacaagctgaagtatgtagaggaggcagctctggaaactgctttagggaatcactgcaaaccattttgtcaggcgtggattcagagtcagcatcccttccccccttcccccgttctccccttccccccttcccccttcccccttcccccttcccccttcccctcccccatctccagcctggccgctccaggaagtgagcaccgtttatcccccaccccaggcggcccgactcctcccagaaggagttgggagatgagccttccgcaaactcctgacctgtgggtccgtccgttcaacggccaaaggctggcggaggagggatcccctgcctttctcggaacggaacggagcagagtcgtgcgtggttgagtttagataaaagccgagtgagcgcgctctgttccttaagattagtttaaggtgccttggattgctctgaagagctttgaccacctgatattgcttacatctggaacttcttggcttctcattccccagatgtgcgggtcagagaggtatgtctaccgttctgttgactggctcttattgtcacttctggcagaggtgacagggcagtgaaagagataaggtcctttccctttcggaactcattatatctttatttctttttctttctcactgcaaatgaccccactgaggttagagacattttaatcagtcagtcaatagagacagaaatgtgtggttaggagcatagatgccgcagccagactgcatgtgttcaaatcctgactctgacagacactggctgtgtgcccgaagactgttaacttgacttctttgagctttagtttcttccatctataagatggacggagtaatatgtatatcttagagttttggtgaggattgagtgagacagatttaaacacgtaggaggctgcctgacacaaattatggtcattattactggcaaactccatgcctagctttaaaaaaatgcacaatcaaaacaatttttaaattataggtttctgaaatgcagggggtagaaattcttttgaagtggaaattaaattttttgttttgaaactgattatgttccaattcaaatatttattgagtcctgttagataatcaattgcagataataggttaaatataaccctacacaaagataaaaaaaaatgttattcctaaagtgcaagaactcatgcccaactcacttataaatgcaactgccacctattttattccactttcactagggctcccagctggtggacgggcccgctctgtcattcctaactctgaacccccagcctacaccagccccagtatcccctgctgagtcactgatttttattctgaaagccattttgatatcgatgcaagcttccattctaaaagatgcttcgtatctaaatagcaggccattctctgtccccctccctcttctagctgttttgcaccctaaattgtatccacctgggaaagaaggtcctttatctaaggcagtgcttctgaagccttaatgtgcgtaagaatcacctagagaactttaatattaaagtgcagattctgaatcattccaggaaagactgagattctgcataaagaactccaagtgcttgcagtgttgctagttagcagacctttttcaggcgtctggttctgatttaattggtcccacctggttgtgaatttgggctctttcttctgctaatttgatgcactgggctctgggactgcaggctcttctcgtctgcactcctcacagtcagaatgccttctctcagcccgtccacactgctctggagacttggcctcagttggaaactggcagcctcccatatctcccttgggctgcacttagctgcagtgggcagtcagggcttgctggtgtgtgggcaagggtcacctatgctaactgtatgctcccctccttcacaatttctttcccaagcctcagctttgacaagagacctcaactcttacaaatcttttttctgctcaagaatttttctctgtctaaagagagtattagatgaatatctacagcgcatattagataggaaaaagacatataatgaactagaaatagaatgaagccacatatgtaatgttacatactcaagtagcctcattaaaaataagcgggtgaaattaattttaatacatttcatttaacccaatacatgcaaaatacaattaggacatgtgatcaacataaaaaaattaataagatcctttaacttttttaaactaaatcttcaaaatccaatgtgtattttgtacctaaagcaacccatttctgagtagccacacttcaaatgctcaagagccatatctggctacatgtttgacaacacagttccattatgcttagaagatcagaaaccaagcttttaatttttcttgtatttttttgtttctgtcagtttattgagttctatctagtaagttacaaattgtaagcatacagttctgtgaattttcacagttgcagtcagctgtgtaaccaccaccatgatcatgatacataaagggcatttccctttatgtattcacccttcaaatttccttatgccctttgcagttcaaacttttctcccactcctgggccctggcttccactgatgtactttcaaataccatagctttctcttttctaggatttcacataaatagcatcatacaataacttaaatttgatgtttgggttctttcactttgcatgcttttgagatttatcttgttgtatatattaacagtttaattgtttggtaatatgccactgtatggatacaccacagtttgttcatttaccagttagtgatgtcatggattcttttcagtttgggactattactacattgcatttatgaggcagtagttctccttcaagagaattgggtacgctaaatacagttttgcctgaaatgaaagtgtgcatgtgtttgttggggaggatgaattggaattggactttcaattaaaatataataccaatacaattattatatttatttatttatttatttatttatttatttattttgagacggagtctcgctctgtcgcccaggctggagtgcagtggcacgatctcgactcactgcaagctccaccttccgggttcacgccattctcctgcctcagcctcccgagtagctgggactacaggcatccgccactacacccagctaaatttttgtatttttagtagagacagggtttcaccgtgttagccaggatggtctcgatctcctgaccttgtgatccgcctgcctcagcctcccaaagtgctgggattacaggcttgggccaccgcgcccggccaacacaattattttttaacagtaacactttgataagatagcacatttatttctatactctagtgccaacatcaaggccaactataagctcagcagtaagctataattttcaatccattataaagttaattgatcatttcctgtgttagctgcagtgctaaggtctggggcacctggaagataaatagagcctctattgcctctagagcctctattgcctctattatcaaaggcaatagagccttatagtgcagtgtgctaagtgagatgatgtgggtatggtaggagatattaacaaaggaaataatagtgcagttcccacaggtgtgattaatttggttaaacagactctcagatgataggtaaatacgtctgtaacaccaattagtactaccagttagatgcacagagttcattaatttgttaattatattttgcaccctttatggagatgaggaatataagggagtaataagagctccagctctgcagcctgcgtatctgcattcaacaccggccccgccacttgaaagatctactaaataccagtttatacaactatgagatgagatttaagggacattcataatgttgttatgtggaattattgagttattatgtacaaaataattaaattcttgctgaatacctaatgggctttctgtagatatttgctgtgagcatcgctgctgctaagcatggcaaagctgaagagccaggctagtacttgcagaagcaccacagaacactagatggcagcgccaagaacctgttttcggctcgctagatcccccagcagggccgctaggaggcttatgcttacatcccatgactttttcttacccttatctgagacactttctcaggccctttcttctaaggggagtgttgttattgggaggcagtttgatatactttttaaatccaccaggtcctcaagatgggggtaaattggtacaatttacagggccttgtgttgaggcccacacggactgttttttacatcagtgtacatttacttttgctgggaaaccagccaaagacaagttagagaattctgcctgctccctacgcactgtggcctgttcagaacagcgaggtcacgcctggaaccagggccagagcttcacataggcagtgttagctggctcttctttggtggcccaaacacaactccaggtagacaagcagaacaaatggctcccagtgaaaataactcagtgctggaaacagttttaaaaattttctaaagagtattctcagtgtgattttaaacaatggtaacgtaatttatcaacaactcttccaagaaaaatagacaataaaggtcatatttctcaatgaagatataaggtctcaactgccttaccggccacctctccttacatatggacccccttaggatcctgctgaagtttaagacaggccctggcaaaatcccatcatcaaataggatctctctcatttccatacttcgaaagcacttggtccatgcctgactttcacagcctttaccactgactgtctttggtcaaagttatgagtttgaggacgaagctttgaactagcaccctggaaaggttaggttatgccaattctacaacttacaaggtgcatgattgtgtaaagtcacttaatgtctcttcttattaaagaatggagaatactcttatttatgcagagttgtccatgagggataaagaaagcaagagaatgtgatttctaaatcacaactggttacagaatcatgagttgtaaaaatattacctccccaggctgggcgcagtggctcacgcttgtaatcccagcactttgggaggccaaggcaggcagatcacttgaggtcaggagttcgagatcagcctggccaacatggtaaaaccctgtctctactaaaaatacaaaaattagctgggcatggtggcgctcacctgtaatcccagctactcaggaggctgaggcacgagaatcgcttgaacccgggaggcagaggttgcagtgagccgagatagtgccactgccctccagcctgggcgatagagcaagactcagtttcaacaacaacaaaaaaattaccaccccttattgtggccattgctgtttctttggtttttttctgagaaggcgagcatgtggtgagagggctctatgtggagcagggccgttaagaagtggaagtgttttcacagtcttagagatcagataccagagagtgatgcaaaggtgatggcagagaggtgaaagagctcatggaaaggtcacagatgatcactgtagaggatgagggggttctgaccccctcattcatccaaagttgaggacctatatgtcaggctctatgctagctgccgaagatacaaccatgaacaaaaagtctcagatctcatggagcttacatttcactgcgaggattcaaacaagtaaagatctgtattaagtggtgtaagaagtaaaatagaccgggtgcagtggctcatgcctgtagtcccaaccctttgggaggccaaggcgggcggatcatgaggtcaggagatcgagaccatcctggctaacacagtgaaacctcatctctactaaaaaatacaaaaaaaattagccggacatagtggcaggcacctgtaatcccagctactcgggaggctgaggcaggagaatggcttgaacccaggaggcggagcttgcagtgagtcgagatcacgccactgcactccagcctgggcgacagagcaagaccccctaatgaggtgaatatgtggagagtgattgtatggtggctgtgctctaaatagactagtcagagcagacccttctgataagggaataggtaggaagctagtaagtcatgcagatagcagagtaaagggtcatctttacatcacgaacgacaaatgcaaaaatcctgaggcagcagtgtgttttaggtgcttttaacattgaggatatgttttgggtgagaaaaggtcacacagtctccaggtgcggtggctcatgcctgtaattccagcactgtgagaggccaaggcaggagcatcacttaaggtcaggagttcaagaccaccctggctaacatggtgaaactccatctctactaaaaatacaaaaactagccaggtgttgtggcacgtgcctgtaatcccagctactcaggaggctgaggcaggagaattgcttgaacctgggaggcggagattgcagtgagctgagattgtaccactgcattccagcctgggtgacagagtgagtctccatctcaaaaaagaaaaaaaagaaaagatcacacagacagtgactcacacaggcccctcctttccagggcctcagtttgtctctattcaataggagcaagaggaaattatcactgctttaatatggggagaaattggtgccttgtatgagccgggataaagaacgtattggatatgagaatgagaagcccttgttaccccaggtgtctgacctctttatccaggactgggcagtcagtattcccttattctccctcctttcttaccctgatcctttttttgtttgttcatctacctaggattctacaggcaggaaacatcttagaaatcagggttgggcaggcaggagccaggagagtagctacaatgacttcaccagtactggtggacatacgagaagaggtgacctgccctatctgcctggagctcctaacagaacccctgagcatagactgtggccacagcttctgccaagcctgcatcacaccaaatggcagggaatcagtgattggtcaagaaggggaaagaagctgccctgtgtgccagaccagctaccagccagggaacctgcggcctaatcggcatctggccaacatagtgaggcggctcagagaggtagtgttgggccctgggaagcagctgaaagcagttctttgtgcagaccatggagaaaaactgcagctcttctgtcaggaggatgggaaggtcatttgctggctttgtgagcggtctcaggagcaccgtggtcaccacacgttcctcgtggaggaggttgcccaggagtaccaggtgagaccccaggatggaatgggagacagagaaacagggtctttggcaggttttaacgttttatcatgctctgatctaatctctttgtagtctttatttacctagagaatgaacctggaaactgcctccctgattaagaatagattctttatcatttacttgctattccagattgagtagatagagctgcttggggtaaaaggggtacttggttgattgagtgtggagatatgttggcagggtaggtaaaggaatttatttactcatgtatttattttgagaaggcgtctcgctctgtcgcccaggttggagtgcagtggtgcgatcccggctcactgcaacctccgcctcccgggttcaagcagttctcgtgcctggcctcccaagtagctaggactgtaggtgtgcaccaccatgcccagctaattgtgtgtgtgtgtgcgtgtgtgtgtgtgtttagtagagatggggttttgccatgttgcccaggctgatctcaaactcctgagctcaggcaatccacccgcctcagcctcccaaagtgctgggattacaggcgtgagccacaggtgctttgtggtcaggcaccttcccaagggggatggagaatcagcctatccctgttggttttcatcccatgtatatatataaaagatttgttggccctctcaagttttcatcctaggttaggacaggcttcttttgaggttagcagaatctctgtcccattcattctatgtctgggtactgagtcaactgaaggcttgatcctgcttgacctgatttgttttcttcaaggagaagtttcaggagtctctaaagaagctgaagaacgaggagcaggaagctgagaagctaacagcttttatcagagagaagaaaacatcctggaaggcaagggagactttttctgaagatgtcctggggcaggaatcatggcaggtcataggagctgagggcaaaggagtccttgtcctgtctgtcctctgatgccatgactagaagagcttccctttgcctggtcctccactatattccttccaaacagggggaggagaggaggtaaatagcaaatatatcaaaactgaacctaggagacaatcacatagcagaggaaccatggctaggggtcgccccaattcataattctgggtcttgctctacagtttcagtctctttggcttttcccttgcattcagagtacaaatgcaagggaaaatgcaggtaaggcttgtgaagaagcccagatctgagacaggttagtcacaggccagtgatttccacctcagtactcgaaattggaagaggaggctgatgcagaggtgagggaggcttcctggaatctaaacgtcacccaggaatcacagttgatgtctagatggcctagataaagcagcccggggccaatggtctgggcagagctgaagggagaaaagaaggaaagaacaggctacaaaggctttctcctgcagcatttaccctccctctccctgggaggcttggcccaggaaagcagtcctgagcccaacttccccgcttttaatagaggagaccctcagtgtgaccgactagcagcctctttttcttccctgttcctgaagaatcagatggagcctgagagatgcaggatccagacagagtttaatcagctgcgaaatatcctagacagagtggagcaacgggagctgaaaaagctggaacaggaagagaagaaggggctacgaattatagaagaggctgagaatgatctggtccaccagacccagtcgctgcgagagctcatctcggatctggagcgtcgatgtcaggggtcaacaatggagctgctgcaggtaaggcttgtgaaggagcccagatctgagagtcaaggaaaagagaaactaactttccttcctttctgggacatcagactaccatcgttgcagggacaagagaaaacattcctttggcgctatagtgcctatcccctattaaactgtttagaggtatggagtaaagcgtaagataattcagagtacaaatgcaagggaaagtcccatttttatttataaagggttgtctaaaagtttatttgatgctgtggagaagttctgttgtatccagtgatgttgttctttctttctcagtcttggcactatttacatttctggctggataattctttgctgcgtggggttctcctgtacattgtaggatgcttagcagcgtctctggcctctgctcactagatgtcagcagcaccaccccagatgtgacaaccccaaatttcttcagacattgccacgatagccccagggtgaacacagtgctctcccagttgagaaccactgttcattaggcacctctcgtctctgatgctgtgttgggaatttgccaagtgcttcttacccagcttagtcacaggcacacttacgccaagctaaattcttagagatgatgtattaccagcccttctttgttttcactctcttctctagagcagaatcatttaacatactgtagcaattgatatttgaactggttttgggggtctgggctctggtctgtatgtgtgtaggtcgcagattacaaggtatcaagcctagagagatttgatggagggacttgaactgaggttgaaattctagcagctattttctgcatagaatgaatagtgtggttgtgaatttgaggcatgatgtagcttgtgatattctgtaaccttcagagtgtaagatattctttatattttgtttgtcttcgtgctttcctcttgctccttctttcttggtggaataattgtttatttacatattcttgggtcttagtattagagccatgggtagctactttctgcctgttacagctttttctcattcactgcttcctgctttgcatcttcattttattcttcttgcctttttgtcctcatcattgatattattaccctgatactttctccttcaccttttgttctggctcctcaacagtcctcaaactgtaaatattttttaaatgcaaatgaatcgtcaattcatattgctagtttagacacttccacattcattagtatgactgccccacggacatttaaacttgagtagtcttttctaaaaataaactttctggaattttcccatcacagacattgttctttctcttttccatatctgtgtgaattgttgcccattaagattttatagccaaggccgagcgcggtggctcacgcctgtaatcccagcactttgggaggccgaggcaggcggatcatgaggtcaggagattgagaccatcctggctaacacggtgaaaccccgtctctactaaaaacacaaaaaaattagccgggcgtggtggcgggcgcctgtagtcccagctactcgggaggctgaggcaggagaatggcgcgaacccaggaggcggagcgtgcagtgagccgagatcgcaccactgcactccagcctgggcgacagagcaagactccatctcaaaaaaaaaaaatattttatagccaagataaaagcttcaaaatatggacataaagccaacataagagaagtagccacatgaaatagcacatcgatttgatcatttcagttcctcagtacagccacaatgtaagattgatacaatcctggatatttactgcaaattgacacacacagcacctctaccacattctatgttcaagccagtttgagttgtgcctctatgaaatgccaccataaacagccctaatacagagaaaatagttaatcctgtattatgtggaccaaacttaagcttttcttcggggtcattgagatgtatggagcacaagataaaaagaccaaatagaaaggaataggccaattccacagaaatgagactagcagtggcagtgataaaggtgaacaactggtgaccaaatgaaattgaggatgtgaagtggactgacttgggcaaagataggatgccagggtgaatatatggtagttatttcctattttgtttaaatttggtgacttaagtggttgctagtgtgattcagtaggatggaagggagacaagagttgccgaactaagttcttttaaacatcttgcatttgaggtacctgtgacatatttgctggtgtatatattaatcaaaatcataaggaaagggggctgagcagaagtacagatttgagaatcatcaacatgtgtacattaaaatgaaggaaatggatgaagtcagcaaaggtagggtagaaggttagagaaggtgaagtttgagaaacagccatatataaagtccatgagcctgtatcttcagcaaccagaacaggatgtaagctactcaaggatagaaattatgacttcatcatctgaggttctctaggccaggcacaatgcctgacaaataatacatgctatacatacataacattacacacacatatgcacacacacaatgttgtgaaaatcaagacactgatgagtcaattgagttattttttgatgtcttcacatgggttcttagggacagtctgccctgagttttttctctactttgtggcctccacattaggattatctttatttgtatcatatcatggggtaggggacatggaaggagaaatgtggataagggcatgacctgttactccttgacttaacctgtctttttccttcctaggatgtgagtgatgtcacagaaaggtatgtgtaaggagaacatgaggtagttcccctggactgacaaatgattcctttacccatgatcagtgggaaagggaagaagaatcagagtggggaagattcaagagagtagtcttgaatcgcgcatcacatggagttttggcatccccaaataaaggggatgaactggcctctctggtaggaaaatgtgggtgatgggaggtcagtaggtggggacagtactgttatttagaataaagagttgcagtattgcgccactgcactccagcctgggagacaaagggagactctgcctcaaacaaacaaaaaaaaatgaataaagagttgcagtatcagtgactccccaagtaccctgttagtgtacttttccataaacctctgtgcctgctttcatccctgattcttaagtttatagttacctcaaaatacacaggaattttctttgcccataaatttttttttttttttttttttgagacagagtttcactctgtcgcccaggctggagtgcagtggtgtgatctcggctcactgcaccttcctgcccgtgaattttatcagagtgacattcccatctgcattatttctcaaggtctaagaatttggtcttggcacatctgccttaagtttttctttctcccaggccttgctccctagtagattttcttttgtctcaattccagtaaaaacgtaaacccgagctctggaggataataatttagcccgggaatcaaacatgttctctatcacatactccagagtctcatccaacaaggtgacatgtcaagctgcttgcacacttggttcctccatgctcctcacagacacacgaaatgggaaccctatcgtcccttctgaaatctgtactctccgtttggaggtgaggacatcttttctccagctagtggcataacattcccagagacggcaaatcctaaaatgctgttttgaaggttttctgagaaatcccagggcctaagcccacagactcttctgaagaaaccccttcatttgatactttcaaagccccagcaataggcccctggtgttctgcctgtcaacccagacatcttcaacccctctgattttaaatattttatatctttttttagaggtagcaaaagatttccaagccattattttactgaactgcataacatctctaggacacagaaaaaggaaaattatagtattttctaaaaacaacaacagaaaaacaaaatgagactttaagaagttaaatcttggacaggcgcagtgactcacacctgtaatcccagcactttgggaggctgaggagggcagatcacgaggtcaggagatcaaaaccatcctggctaacatgatgaaaccctatctctactaaatatacaagaaaattagccaggcgtggtggcacgcgcctgtagtcccagctactcagaaggctgaggcaggagaatcgcttgaacctgggaggtggaggttgcagtgagccgagatcgtgccactgcactccagcctgggtgacagagcgagactccttctcaaaaaaaaaagttaaatcttacacaagtttatgtagatggtgagatgatagtttctagtctagctcttctggctccagtgccagggctgtttgcagaatgatgctaagtgtattcagaaaggaggattggaattcatcagtaggcttgggaggtaagggagatgggtggtggaggaacccacagtcagcagtgtgggaactcagaagtcctgtcctttctaggagtgagttctggaccctgaggaagccagaagctctccctacaaagctgagaagtatgttccgagccccagatctgaaaaggatgctgcgagtgtgtagaggtaaggagattcaggggaaagagtttggatgtgaaattactgtcgtgggaagaaataaacgggatagaggctatagtcggtatttgagcatagtggcaaagagggaggtcccagagggagggacatagtgtgctgaagaagatgcggtttgtatttaaggggagatgaaatggccaggtgacatcctcacaggattcctcaccattcccctcaatgtagtaaggagagagataccagacatgagacagttggtcctattcaacattattgactcttttcatcattacagagctgacagatgtccaaagctactggggtaagtagaagccatggcctctttgggctggcacattctgatctcctttcacatgccctccccagacatagccacacagatcctaggtgttgatgcctcccccatccccgccatatagttccagttcctccaaccacttcctgtgtttcctcttctcagcataacgagacccatgtccccgttctcatctgctgatgttgtaccttttcctacagttgacgtgaccctgaatccacacacagctaatttaaatcttgtcctggctaaaaaccggagacaagtgaggtttgtgggagctaaagtatctggaccttcctgtctggaaaagcattatgactgtagtgtcctgggctcccagcacttctcctctggtaagcattactgggaggtagatgtggccaagaagactgcctggatcctgggggtatgcagcaattcactgggacctacattctctttcaaccattttgctcaaaatcacagtgcttactccaggtatcagcctcagagtggatactgggtgattgggttacagcataaccatgaatatagggcctatgaggattcttccccttccctgcttctctccatgacagtgccccctcgccgtgttggggttttcttagattatgaggctggtactgtctccttttataatgtcacaaaccatggcttccccatctacactttctctaaatattactttcccactactctttgtccatattttaatccttgcaactgtgtaattcctatgaccctgcgtcgtccaagctcttgaatattcttctgttcccacccacttctgataagtaccctgaggcttatcagcatgtgattctcccttctgatcttctgtttttctgtgttctcaattcttttgttgttttttggtttttgaatcttttttgagatggaatctcgctctgtcgcccaggctggagtgcactggcgcaatctcggctcactgcaacctctgcctcctgggttcaagcgaacctcctgcctcagcatcccaagtagctgggattacaggcacccaccaccatgcccaactaatttttgtatttttatagagatagggtttcaccgtgttggccaggctgatctcgaactcctgaccgcaagtgatccacccgcctcggtctcccaaagtgctgggattacagatgtgagccgccgcgcccagacagttctttcgttttaaacagttactcagtactaggatgcacccagtggtgagagtaagcatctttgactgatgacaggtcttgaggtggatagggggcgctttcagtattttgccattaagcatagtatttgatgcaggttttttttgattgatgcaggggatcaaatttaggaagttctgatctgttaatttactacaagtttttgtataaaatgaaaactcgtattctacctatgtcttttctgtaaattattgagacaattgtgtatcatttttgttctgttaatgtggcttagtacattgatttacttcaatttgttaccacaacttgctgaaatacaccattattatttgttgtatgcaatactggatttattttgataacgtattgtttagattttgttctcatctatgttaatgaaagaaattggcctgtatttttacattcttgtaatatctttgccaggttctataaaatgcaataataagcaaataaattactttgtttttgtataagtatgtataggattgagctctaaaaccaaaccattataatgataatttgggtagcttcaaactcaaattgaagagagtcttcactacaatcttcactacaacctttggccttcctctctacatttaagagtagcaatagaacaataaaaaaaaatacgtctttcaaattaattgcagtaaaaacaaaagagtagtggggagagaaaaacaatccaatacatatttttctctcagaatagaaagaaaacacaaagagaaaatatgaacaatataaagcacttaaaggaagaggatgatttcttccagcttttccacactctctttatgcgcaggaacaaacagctgttgagtgagctgctatgactttggtagagaggtgcaatatgttttttgaaccagctataaaagaaattaagaggtacatgtgagggtagaaacaaatatcaaggatgagaatggcactggctgtcccatatggtatccaggagccaccaatgtctgttgagtacttcatacatgcctagtctgaattgagatgtgctcaatgtataaaatatataccagatttcaaatacctacttcaaaaaataatgtaaaatatctcactaataacttttcctttgtgtattgcaatgataatatgttggctctattggattaaataaagtatgttattcattttacctgtttcattttacttttttaatgtggatactagaaaccttaaaattacatatgtggcttacattgtatttctattggacaactctggagtagatcctataatgaaatttctgtccctaagtgagccctagtgtaaaagcctatggactcaggatacagaggaggtttcaaggcacatatgtttatctctacagaacctgcaccttcccagctgccctgaggcatttttatggaaggtaatgacagagaaaagaagatctcaacatatctagaagtgtagaaatttggaagatcatagaaagggctcatgaccagagaatgattctgcagactctggcccctgccgttagtcctcagtctgttgggcacttgaagctccttcatggtttgatgaaacactgatttgttatcaaggctcagcttgggtgtctatggtgagataaagtagtgcagattatagtaaaagctcactactggtttgttctaaggcaccgttttataatatttgggagatcatatctgtggaagcccagaggctggatgcaaactccttatcctggtctgcgtttcaattggaagagatataaaaggagatagggccagctgactgggacctatggggctggtggaagttcaggaaagagaaagatctgctggagtagttatccccttcccacttattttcccatataataagtaagttctaggcaaaagagttagcccagctctcttctgtaaactcattttacaagtaaatttactttccaagtgaatttactttataagtaatttttcttttttgtcaccagagttctagggatgtggtatagttatcctaatatttcccaaaatgtgagtgcttgctagagccgatatttaagtttgatgctaacttaaaaagaagattttggaagggagagggactttcttaacagctttattgtgatatttacttctttataagtaaattcacttggagaacccaaagtattgtccagtgaatgactttagataatagtgaaagccaaactaagtacttgctggaattctataggtaagacctggggaaggttgctcaatctgagacttggggacaattattagggtaagttcacagctctgaccttttcttgaggggttatgggggcttgacagaggccttctgttcttgacatgtgatagagtaggctcaactactatgaaaaagaactctaaaaatacataatggatcaaatactaaagaaatgtacttcttgttaatgtaaaacaatcggtcatgagtgtatgtaactggtggtgagtggcactgttccatgtgggattcatgcaccaagcttgctttcatcttgtggcacttgctgtaccccagaatggtaacagcatgaagctggcagaaaggtgaagaaaacttaggggagaaaacgtgctttttaaatccttagttcatagatgggattcgtaatatctgctcattttctattaatgagaatagccatagggctaaacctaactgtaaagattttttaaatgtctagctgtatgcaatcatgtacaatcaaatttcaaggaaaagaaaactcagattttggtggaaactgcctggaaccctaagtaatcctttttcccattatagaggactcaggatctcagcttttttctggaactatgttaattccattctatagcctaaagtttgtaaaagagaactgtattgtcactaaagttctagacatgtggtatagttatcctaatatttcccaacaagcgagtgcttgttagagctggcatgtaagtttgattctaacttaaaaataatctttttaggggaagaggactgtcttaacattattattgtaatataactgacatataatacatttcataaagtatataacttgatacattttgacttgtgaaactcatcaccatcaaggcaataaatcagatggggttcttttttgtatatatagcacttagagctatacatttccttctgtggctttaaatgcatctcacaaattttgatatattctccattctattcaagattctattttcccttttgatttcttctttgaccattgaattatttaaaattatattttttcccaaatctatgaggatgttcatatatctttttgttattggtttataatttaattttaaatggtccagatacagactttatatgacttgaatcctttttaattgtattgagacttgttttacggtaaaggatatgatctatattggtaaatgtttcatttgcacttgaaagaaatgtgtattctgtggtcctggggtacagtgttcaattaacatcatgttagttgatattattcaaatcttctgtatctttactgcttttctatgagagaggggtgttgaaatatacaactatatttgtggatttgcctatttctcctgcaattctatgagattttgctttctgatttttgaagctcttttgtaaggagcatacacatttaggaatgttacatcctgttgatgaactgacacccctttctcattatggaatgaccctctatctctactaatatctttttctccaaattctactttgttaggtattaatttagccactccagctttcttgttttttgttttttttttgttgttgttgttgtttgtttgtttgagatggagtctcgttctgtcatccaggctggagtgcagtggcgtgatcttggctaactgcaacctctgcctcctgggtttaagtgattctcctgcctcagcctcccgagtagctgggattacaggcacctgccaccacgtccggctaatattgtatttttagtagagacggggtttcaccatgttggtcatattggtctcgaactcctgacctcaggtgatccacccgcctcggcctcccaaagtgctggaattaccggcgtgagccaccgtgcccagcccagctttcttttgattattgttttcataacatatcttttcatttttttttttttttttgagacggagtctcgctctgtctcccaggctggagtgacatggcgcagttgagtgacgtggcgcgatctcggctcactgcaagctccgcctcccgggttcacgccattctcctgcctcagcctcccgagtagctgggactacaggcgcccaccaccacgcccggctaatttttttgtatttttagtagaggcggggtttcaccgtgttggccaggatggtctcgatctcctgacttcgtgatccacccgcctcggcctcccaaagtgctgggattacaggcgtgagccaccgcgcccggcctcatctttttacttttaaactatttgtgtcttcgtactccagcctgggcaacaagagcgaaacactgtctcaaaaaaaagaaaagtatttaagtggcatgtagttgctctaggtaaataatatagttatcttcatttttcccaacaagttactgcttgagttggcattttaacttagttttaattaaaatttaaatattttgctactttatattttgtcagaaatgatcttgattccatgggactctcagttttttaaacatttgctgtataactgctttgtgcatacagtctagcccttgccttcacagagactcagtcagttaggggataaaacaaaggcatattctgtgcaaggtttatttcaaccatcttttagaagataaatttggggttttagggttccaagatttgaaacattacatttgattggtgaagggctagttctcaggttctcatggggttgatgtttgaggccgagaataacctttttttttttttttccttgagatggagtctccctcctgttgcccatgctggagtgcagtggcacgatctcggctcactgcaacctctgcctcctgggttcaagcgattctcctgcctcagcctcccaagtacctgggatgaaaggtgcctgccaccttcggctaatttttgtatttttagtagagacagtgtttcaccatgttggccaggctgatctcaaactctcagcctcaggtgatccacctgcctcggcctctcaaagtgctgggattacaggcataagccaccacgcccagctttttttttttttttttaaataaatgcaagcttaggtacaggctcttgtcaaataaggaatcaacaaagaaataaaatattgattcatttttatccatcttgaaaacatactagtatttgaagggcaaataattaaaatatgaaaaacaattagggaaatggagtctattttggaatctttgaaaaagcagaggagaaatgttaggagagaaatcaagatagaactgcaagtttaaggcattattgcctatctcagctaagcattggcctttatttcaagagatcgaaggaaaccctcacatttttgaactgaaagtcaacacatacatttgaatcacacacatttccacctgaccactgagggtacttgtatgaagacagcaactgagttttctatatcgcttcctctgtgtcaatcacgtttctatacattatatatatggactcaatctttttttttttttttttttcaggcagagttttgctcttgttgcccaggctggagtgcaatggcacgatctcggctcactgcaaccttcgcctcccaggttcaagcgattcaccagcctcggcctcccgagtagctgggattacaggcatcaaccaccacgcctgtctaatttttgtgttttttagtagagacggggtttcgccatgttagccaggctggtctcaaactcctgacctcaggtgatccacctgcctcagcctcccaaagtgctggaattacaggcttgggccaccgcgcatggcctgggctcaatctttatagtggtcctatgaaaataggtactgtcattatcctttttttaaaaaaaatgagaaaatggaggtacagtgagatgaaagaatttgctcaaagttggacacatatgaagtggcagaattgacctacaaaacagggcagcaaaattcagaggcaacatttttattcatttctgtctgttagaaatctgaaaaggtcagtgtgtgagtcaaatcctactttgatacctatttttgtaaatgtactttattggaatatcaccatgcttatttatgtatcatctgtgactgctttcaagttacaacagcagtgttgactggttgcaacagagactgcttgacctgcaaatcctaaaatatttactgtttgaccagcctgaccaacatggtgaaaccccatctctactaaaaatacaaaaattagccgggcatggtggcccgcgcctgtaattccagctacttgggaggctgaggcaggggaatcgcttgaacccaggaggcaaaggttgcagtgagccgagatcacaccactgcactccagcctgggcaacagagtgagactccatctcaaaaacaaacaaacaaacaaacaaatagtcaaagtaatgtataatgctcaaaatgtaatcttaggcctaatgaaggaatagactcctatattactcataaatgatataagtaatattaaacttggggtctagcttacgtgaccaagataatgatgaaaactttaagttgaaagcttatgttgaaaaacaaaataaaatcatttcatatgcaaattttaacaccacagtcaggaatgtcaatggatatacagggtaaaagaagagagaaaattaacctagatgataaactgtatacattgcatattgattaatctactataaaacaatggcacaagtacatgattgttttgattcttgaaccttgattgattatagatagcatcaaatgtagtatactctgggggagaaaagattggactatgagaggaaattctattttaagctttgtacaattataagacataaggaggacacaaatctcattaagggcagatttgggagagaaacagtgacaaagctaaaaccgtgacttatttgggaaacatcagtgtagcatgataaggacaagccattttatatcactcacatgagcaggcttcatgtcattgggtaaaaattcacagtaatcctggagaaaatgaagaatgtgtgaatcaatgtattgtgtgcaaacggtgatatgagggtagcctgagtcatatgaactccctgggaaaaacgaccagctttgtgtatgtagcaagtggacttggtactcctattacctaaaaagagcctctgcaagtacttattgacaaaagttgacatctactctgcatatggaatagctgtccctgcctctcaggcattttgtaccataaaggccaacagattgccattatcaatattttgatgtcctcaaaacagtttcagtggtaaccacatgatcgtacaagaatacgcctccttcattctgttgccagagaagtacaggaatcttcagttctttgtcttatttggagaaagcattctgctttccagtcttttccagtggagagtaggcctttgttatgggggatgctctgaacatatttcagaatggttcttttactctctctctgccagaaaagaaaggatctttttcttggctttccactatgggaactcactttggtttttggaggtaaattccaagcaagtggggcgggggcggggccctaagtctaggtgctaggagtttctctctctcaagctagtccataatcagcctccggcaatttgtcagaactactatttaagtgttcctaccagtatatgactcaggcaactcctgttttaaattttttttttttttttttttttttttttttttttgagactgagcctcactctgttgcccaggctagagtagtggtgtgatctcggctcactgcaacctctgtctcctgggttcaagcgatcctcctgtctcagcctcccgagtaactgggattacaggcgcccaccaccatgcccggctaatttttgtatttttgtagacagggtttcgacatgttggccaggctggtctcaaactcctgacctcaagtgatccacccgcctcagcctcccaaagtgctgggattacaggtgtgagccactgcgcccgtcctgactcatgcaacttctgcttcaggtaagcagatttaggctgtttattctgtgtttacctgtctctacattttggggtggcagtttttttcctgtgactttatctgatgagacttaggaaagtcattgatttttagttggtttagcttttttttccttttctttcttctttttttttttttttttttttttttgttgagactgagtctcactctgtcgcccaggctggagtgcggcggcgggatctcggctcactgcaacctccgcctcctgggttctatggattctcctgcctcaacctcccaagtaactgggactacaggcgcgcgccactgcacccagctaagcttttgtatttttagtagagacggggtttcaccatgttggccagattggtctcgaattccttggccagactggactctaactcctgaactcgtgatccgcccgcctcagcctcctatagtgctgggattacaggagtgagccactgcgtccagccaagctttttttctcttgtgagggttgcagtaatgagtctcaagctctttacatgttggaactaaaactggaagttcctggtattcttttctacttctgtagtaattctctttctttggaaatcactttctctgtctgcccagctaagtctccatttttcaggttatgggtgcacattatgccttacggtgggaggggcagaagtactgtcatgggctccctctgcaatggtgtttgtcagtgttctcttcctccagattagcttcttctttccattaagtgagaggctctggtagacctcaggaatgaagcaaagcctgttctgctcctacagtgagatagcaaggcaaaagctgctgtgcagtgttcacatagtatatatggtagagtccctgtgtcttttggcatttttgttgccaactatcctttctctgcttctaaactagtaaagcagttactgttctggtcccagctttactagaatatttttagtccccatatcttggtgacctttggtgggggaagcgattccaagttagatacaggcagtttctctatgtgtagacacacattcctatctccagcactcatccatagcaactggaggaaattcacttctatccattttcctttaacccctgcatcccagtcacccctttattgcaatgcccgaggctctggatcactccaggctgctgcactctcttaaattccaggtaactcttttgggatatttatgactttcattttcagggctttgggacctgggagaatggtgtgagtaaagccagagggatctgagaagacagatactttactcctgcactggtgtctctagataatttcccagctggctctctctgcctgtgtaaacaagccttgaggatatgacccttgccaactcttgttagccactcctgtttacatagagctctaagtacatgcccatggaaatagctgcatattcttgaatgactaaacttgctcatttttctgtccaggtcatttctgctatccagaagcacagctcagctgagagtgaggcaccagaagaatgcctaagagtttccaaaagtgatgatttttctaccattaatatattatatgttggtagtatgaaaggaaaataaatcttggagcttcaaaatcactaggccaaatagaaaagtcaagctgggaactgcttagggcaaacctgcctcccattctattcaaagtcatccctctgctcactgacataaatgcctatctgattgactcctttgaaaaggctaatcagaaactcaaaagaatgcaacaggttgtccttcaccaacctgtgacctggaagccccctccctgcttgagttgtcctgccttttcagatggaaccaatgtacatctcacatttattgattgatgtctcatgtctctctaaaatgtatacaaccaagttgtgctctgatcaccttgggcacatgttgtcaggacctcctgaggctgtcagggacacatgtcttcagccttggtaaaataaactttctatattatctgagatctgtctcagattttcggggttcagactagacagttgttaagaaaataacaaaaagacattaaagacatagcatagttgcatgtccattgaactcagagaaatgagttttttaaaaaggaaaaaactcagctgggcgcggtggctcacacctgtaatcccaggacttcgggaggccgaggcaagcagatcatgaggtcaagagtttgagaccatcctggccaacatggtgaaaccctgcctctattaaaaatacaaaaaattagccgggcgttgtggcaggtgcctgtagtcccggctacttgggaggctgaggaaggagaatggcgtgaacccggcaggcggagcttgtagtgagccgagatcacgccactgcactccagcctgggcgacagagcgagactacctctcaaaaaaaaaaaaaagaaaaaaagaaaaattagctggacgtggtggcgcatgcctgtaatcccagctactcaggaggctgaggtaggagaatcgaacctgggaggcggaggttgcggtgagccaagatcatgccattgcactccagtctgggcgacaagaacgaaactccatctcaaaaaaacaaacaaacaaataaaaaaaaccggaaaaaactcaagtgaacaaaatgaatgatgaaaaattgaatgtcatccacacagaactgatgggctaaggtaatatacacatctcaacacatgctttaacaaatctgtctgatgctttactattgtaaatgaaagagtatctgagaaaactctcaatcaatttaggaagtttattttgccaaggttaaggatgcacccatgacagcctcaggaggtcctgacaacatgtacccaaggtggtcagggcacagcttggttttatacatttgagggagatgtgagacatcaatcaatatatgtccgcaaaggcgggacagctgagtccggaagggggtttccaggtcataggtagataaaagacaaacaggttgcattaagcaatagggcaaaggaagtaaccagatattcatttatctcacctgagcaaaggggtgactttgagttctgtctggagctttttttttttttttttttttatcttagtagctgtctttttttggaatagaatgggagccaggtttgccctaaccagttctcaacctgacttttccctttggcttagtgatttttgggtcccgagattttcttcccttttacactatctaaatgtattagttaccaatattgaaataaggaaaagaaatctgaaagtattaggttggtacaaaagtaattgcggttcttgctattataatacttttatttattttgtttatttttatttttttattttttgagacagagtcttgctctgacacccaggctggagtgcagtggtgcgatctcggctcactgcaacctccgcctcccgggttcaagcaattctcctgcctcagcctcctgagtagctgggattacaggcgcatgccaccatgcccggctaattttttttttttttttttgtaattttagtagagacgggggtttcaccatgttagccagggtggtctcgaactcctgaccttgtgatccgcccgcctcaacctcccaaagttctgggattacaggtgtgagccaccacagttggctttataatacttttaatttcaaaagccgcaattacttttgcactaacctgatagtaattgactcccttaaaagtagtcaaagcatattcccaaggtattggatgtggatacatttttgtgggaaagttgttaaacttccaacaagtttataattgtccttgatcaccatgcatgagtcagatggagagggcaaaaatgaaaattgtaccttgtcaggtggtttccaaaggtggcaccttttattatgtaatgtgctctacaggaggtagactaggattgttttgatgcatacagcacagaaaatgaatctatcaacttatattcctcatgaaaatggagcatgctgtttgtggaggcacaatgtggggtcatcctgtgaccaaacgagtggcaactcttgttcaagtttcctcctcgttcggtttgatttcaaggttacctcagtttcaaagcagccctttctgtccagggcacaaaactcctgatttactacttacaactagtggttctcagcctcagattcgcgtaaaaattacctggaagacttttcatttttaaataatgttactgatatatatgttatatgcaataatatgcacccatttactgtgcacagtttgatgagttttgaaaaagttttaccccttttaaagatttagagcatttccaacactcccaaaagttccccaggtcctttgtagccaacttttctcagcaccatccacctctccgccacccatcctccatctcctagcgggtgacatggtactttggtaggtagcacacaagtggatcgttggagctgaaggataattcaaattggtaaactgattcgagggaccatgtgcaaccatgaaagtggtaggagaaggggagttgggtgtttagctggcctgggaggcagggaaggttaaaacagggcttttcaaacacagcactattgatgttttggaatggatcattctttgctgtgggaactgtcccatacattgtagaatgcttagcggcatctgtgacctgtacccactaagatgccagtagcattcccctagttaacaaccaaatatctcttcagacattgccaaatgtgccatctagtgcaaatcctccattctgccctcgagaatcactggattaagagcattaccttctgtccagaggctctaaaggactacacagctcatttcacctagacgctccttccccttttctcttcctgacagccccaaaaatttcactttcatttctcaggcagttcctcctcaggagggagggacttcttcacacagaggaacctcatttgttgaatgaatcctgaccacacccaccctggcttttcttcacctcttcaaccaggagccgagatttctgttgctctgaaggtgtgtggggaggtttgtggggggtagagggtatgagactccaggagaaaagttctcagtgaagttaggggaatttgatttatggccccaagtctcccctgctctgtcgggagcaaaggctagcttgcaggcttcctgctttgagtgcacactgatagcagcctagagtctggggagggacagccttgaaagcagtgttaaagaggcagaaggccgcctttgttttctggggtgtctttttttcctccaggctgaatctatttccattcccttcctattgtataattttgattttctaccttgcaaaggaaacaattctctctctctctttctctctctcaaagagatgaacagaagatctcttattttccacctcctactccctcctcaaaagagaagttggtgaaaggaggtctctgttttccaagtgtgtgcagggcttagctcctagtatgtggcgtcagatagaatggagccatgggagcacggccaggggttgaagtgggttcttttgctgccctcctggcaaccactaaggggctttctgtggccatcctcacgtattcttagtccttggcctccctgacaatagcaggttgagtgatgtgactgccgcacaccgctctgttccctctgttcctatgtctttctgcaggtctcagggctctccttgcacatccctgaacatacctgtttacttttacttcagtaacccatgtgctaccagcgtcttcacctgtctcagaacttgctcctcatcattcttcctcttagacacaccttggcattgatttgtaacctcaatttgttattgcttttctttgctcacaattacttaacagaagttgttcattgtgggctcagaaggagcccacggatttaatcttcttgttaagaatttgatatagagtatgtcctatcttaagctcacttgtgagcaatttgcaccttgattgatatgttacagatattctgacacatgccattctggcctctgctctcacccttcagagttcactgtaactgccatcctgtgtctctgccttactcctgggtagaatccatgtctgcctacatactgactgtctcccagaggcgtctagtcaggcacaagacccaacatatgggataaaattgattataaagcaggctgctaatgtaaaaacgtgcaattagcatccatttaacattcaataaatatgaaatatacgtggaagcctacatccaaatagaaagtgatcatagaccatatcgatgaatgttagagtacacaagaagatgactaatactatggagtaacatcttcaagaagttacattagggtaatgactctgtaaagacctcatgaaggccttgcaactttaaatagtttttatgaaagttttaaatagttttcattgtaagaacacatttgagtagaatcttaagaatgcgaggaaattaaaggctttaatggtttttcccacgggcttaaaaggagaacagtgtggaagattaagatgggagtgtgcctggagaggcataaaaggtgagttcttaccaggcgcggtggttcacgcttgtaatcccagcacttagggaggacaaggcaggaagatcaccagagatcaggagttcaagaccagcctggccaatgtggtgaaactgtgtctctactaaaaaaatgcaaaaattagccgggtgtggtggcggatgcctgtagtcccagctactcgggaggctgaggcaggagaatcagttgaacccaggaggtggaggttgcagtgagccaagatctcgccattgtactccagcctgggggaaaagagcaagactctgtctcaaaaaaaaaaaaaaatatggtgagctctgaggattgaggcagtgggaaggcatgtgtgatgtggacctaactggaccattatgaagtctggcctcgctctgggtggcatgggtttgaacaggagagtgacatgattgacatctgctttaaggtgatcactctgtctactgatgtaagaacagagatgagagcagagtgaagaaggacagtgatgggtgggcacagtagctcacacctgtaatcccagcactgtgggaggccaaggcgggtggatcacctgaggtggatcatgagtttgagaccagcctggccaacatggtgaaactctctctactaaaaatacaaaaattagctgggcgttgtggcaggcacctgtaatcccagctactcgggaggctgaggcaagagaagcgcttgaacccagcaagcagaggttgcagtgagccgagatcatgccaccacactccaacctgggtaacaagagcaaaactccgtctcaaaaaaaaaggaagggcaatgatagtatcagcaagactagtggaagaacaatttcctgaattcaggtggtttctaccagagtggtggcagttgaggtggttggaaactaatttgaaaaaaaactctttcagcatattctcacgaagtaacagacagaaaaagacattagggattgcttaatgaaaatgattctatgttaaaaaatagctttttggagatatattgaccagaacactacagctcttggggagagagtcattaatgtggtatagattgggccctggactctaaggagtagctgaagcaagaactcagtgcacagaggaatggggaggagatgctacaatgtttctgagctctcagggtctctggatgtcaaaacaggctctactttccttattggcagtttctgaccaagaatccagaagaagtgtctaggatattgtctagaaacttcaaaagacatcctcccctaaaagtcactcgtagagacactctaattttactatctacctgcagagagacttaaagtttgcattatcatatccagatgttaggagtccagatgttaggagaagactcaaatgaagggtataatcacctggcagctatggtaaccaggtaacctgggagttctgtcaggccaatggcactcatgttcccttctctacctccctgactgctgctgggcttgagccacactgggaagtggtggggtcatttctcacacgtgggaccgtggttactctgcacttttctcattcttttgccattatggtggcagcagctttggcatcaacatgcatcctcactgtgaacatgaagtcacagcccgtggcagaatgcatgttctactacttcctctcctggagccccccggtatttctaactattggttggatactgattggaataaaagataacaaagaaccccacatctgtggttggctcatggctttagccataaacaggggtgaatattatcatatcatataaactccttgtcttactagtcatcagatcctggtctgaccaatggtcattgtagccaggggctaccagtatatctcttttgtatgatttttagtatctgtaccattggctggatgacactcgccagtcaactttcagctttttttcctccttaaggtcttttgatggatggttagaggagtagacaggtctcgaggcctaggtttatctccatacagcttttattgtaccccatccttttgccaagcgtgggaaagattcctaagttgtcacacatcacagatctttctttcactatcaaacctgttcaattatattagtttcctagcactgttgtaaccaattatcacaaactagatgacttaaaacaacaggaatttgtatcacagctcaggagcccagaagtccaaaaccaagatggcggcaaagttgatttttttttttcagaaggctctatgtgaaaatcggttctattcctctctcctagcttctggtggtttctagcaaacctcggcattctttggcttatatctgtgctattcccatctctgcctctactgtcacatggctttctttcccgtgtgtctgtatgtcttctcctcttataaaaacacaggtcaaggccgggtgcagtggctcacacctgtaatcccagcactttgggaggccgagacaggtggatcacctgaggtcaggagttcaagaccagcatggccaacatggtgaaaccccgtctctactaaaaatctaaaaattagttgggcgtggtggcatacacctgtaatcccagctactcaggagactgaggcaggagaatcgcttgaacctgggaggcgggggttgcagtgagctgagattgtaccattgcattccagcctgggcgacagagcgaaactccatctcaaaaaaaaacaaaaactacaggtcattgaatttagggcctgtctttatccagtatgacctcatcttaacttgattacacctgcaaagatgtgattttcaaataagttcacattcacataagtgaacaatttttgtggagggtataaatctatctactagaacaagtatcaaaatgttactgcctactgagagccaccctttttccctttgcctcacagtttcttgtctaaactgacctcaggttctgagaattggcattgtatcatcatgccactactctgtggtacaccctctggctgaccacaagcaataattgcaggtttgttttgccatttgcactcatgcagcttaactccacagggggaatacaggacaggagatatagcatgcagacagggccgcttcaggtgagctctccgtgaggattcttttgttttgttttgttttttgagacggagtctcgctctgtcgcccgggctggagtgcagtggtgcgatctcggctcactggaagctctgcctcccgggttcacgccattctcctgccttagcctcccgagtagctgggactacaggcgcccgccgccacccctggctaatttttgtatttttagtagagatggggtttcaccttgttagccaggatggtcttgatctccttacctcgtgatccgcctgcctcggcctcccaaagtgctgagattacaggggtgagccaccgcgcccggcctcagtgaggattcttacggtggtacaagaccatgtgaccatgtggatgcgtgtgaaactaacgtagcttaggtaaatcttacatcaacggattgattcccttgtaaagaccatgaacatagcttccagggccctacagagaatattttgttacaagagtctcaatcctcttacggaaaatgaggtctgtgcttaccaaaaagaataaaaataaaataatataccaggggatggtgatggcgatgtgttttttataggaagaaaggacttaagcctaatgataacctttttttcccccacatgtctagtctgacttccaatcttatttcctttaccttaccctacttcccaccctcatctgcttctctctgttaacttgtcctgcatcctcccatccctgcccccacctcctattcattggaaagagactgtcacttttacttcatttaggaagtgtcacatatccaggttcctctaggctcatgtgaggccaaggcctagggctttttgcatatcagccacacatttaaaaactttcgaacatgttatgatgctatgtcctccatgaacggggcattcacttccatgattccttctgcctaaaatatttgttttctttctcattctgtattcctttctcattattcagctttcattaaactcttacttatccaagcaagatatcttggatagttctctatttagcacattatttggtcttctaaaaacctatacctctctatgatggtgttttttacacctaccattttacattttatgaatgattatataattagcttctatcttcttaggtgactgtttactttattctggctaataccatctgttcattactcaactttggattttaatccatttcctgaattttaatcacggaagataatatgtcttcagtgagaatttccaaaataaacacatgaataattggcattcaattagtggatgtggatttaacacagacagaacttcatcgctcctaaatgtggtctccctttatgtattgggacatctctctcatggccaacagccatctccttgctatttctattcctcgatgatctgacattggtatgaatctgtgatctatgtgtaattcagctggttacacccctcccccaacgaatacacacctttgggttcctatcaacctctgtaacatccttcaggccaagaagaaatcctaccatctacaaacacaagacccccccagaaattcccaacttatgtggtttcctccatttctacactctcataaccctggatcccaatctacttctttcaggctttacctcggcttttctttgtttaaataagtggagtagcatggagacctctgaaagagaactctgagggtattatgttcactccaattctaccatcgaattgggtgatctttgtaaatcatttaattttatttattcatctgaagaaagggagtactcttatttctcaagaattttggaaggaggaacaaacaggccaaagtgatttttaaattgtaactggtaatgaaatctccatattgtggtcattgctgtttctgtcggtatctctggaaagtctgtgagggcatgggaggattttgtgtgggtagatgtgttaggaggcgagcacttcttcactggaaaccacatctggggttctaaagttcagctattgaagaatttccaaataatggaaggaagataatgaaacaatgataaagttttagtcatctgtggagagacagggaagttttttttatatgtttatcaaacattgtgcttctctgtgttctaaacactgaggctatagcagtaaaaagacaaaagtgcctaatctacatgtagattatgttttagaaagaagaggtggacatttaaaaatagataatgataataaaagaaagatggcaaatgtacactgaatgatgagtttgtggttgtgctgtacttaagtttgtcttagcagcccttctgatgaagggacatgtaaggagaaagttgaaaaaagtataaacgaaagtcatgcaaatagcaacaggatggtaattctaggctgagtaatgaacaagtgcaaaagccttgaggcattaacagctcgcccagaccactttcagccatttttggtttctcttcctcatcttctttgttctttgatattgcagtctcggccagtctttattgtctgtgcaattagaatgctttttatttgtaccattcttataccatcccctttcaatcttctcagccatccaggggtctttaaccagaagagagaggagagcctcaggagttaggaccagaagaagccagggaagcagtgcaatggcttcaaaaatcttgcttaacgtacaagaggaggtgacctgtcccatctgcctggagctgttgacagaacccttgagtctagactgtggccacagcctctgccgagcctgcatcactgtgagcaacaaggaggcagtgaccagcatgggaggaaaaagcagctgtcctgtgtgtggtatcagttactcatttgaacatctacaggctaatcagcatctggccaacatagtggagagactcaaggaggtcaagttgagcccagacaatgggaagaagagagatctctgtgatcatcatggagagaaactcctactcttctgtaaggaggataggaaagtcatttgctggctttgtgagcggtctcaggagcaccgtggtcaccacacagtcctcacggaggaagtattcaaggaatgtcaggtagggccctagatggagggagatggggcagaagatggtagttggtggaaaatctcaccttttcatccttttttttttttttttttttttgagacagagtctcactctgtcgcccaggctggagtgcagtggcgtgctctcggctcactgcaacctctgccctctgagttcaagtaattttcctgcctcagcctcccaagtagctcggattacaggcgcctgccaccgcgcctggctaattttttttttttttttttggatttttagtagagacgggatttcaccatcttggccaggctggtcttgaactcctaatcttgtgatccacccacctcggcctcccaaagtgctgggattacaggtgtgagccaccatgcccggccttttctttctttttttttttttttttttgtgagcaataaagctttttaatcacctgggtgcaggcggactgagtctgaaaaaggagtcagcccttttcatccttctttaccccctgtggaaccataattctgagtcccgtgatcttctccatgtacatctttcacactgtgctcagcttccaatgcctggggtacactcttgtgtattcctttcatttacataacagatgatcctagagtacagtctcttagccaagaatgagaaatttttgtcttgttttttcctttttcattgtataagtgataaattccttcccaaagttagctctcttgcttctctaagcaggataattgctaaggaacattgtggattgaatgaggaaagagcattgataagaggaaaggactttctgcagggtaaatacttactctaaggaaagacagaatcaggctactccttttgaggggtattgattttcatcacaatgaatgaacaatacattcatctcctcaaaattttccccatgtcatagattctaatcaccagcttcacagtttctgtaaattgcttttttctgggatcaacttgattttttccctgtttgtcctctatccagatactaagaaagcttatagcttgactgtagtgtgattcccttctcataggagaaactccaggcagtcctcaagaggctgaagaaggaagaggaggaagctgagaagctggaagctgacatcagagaagagaaaacttcctggaaggcaagaggagattctgaaggttttctgagacaggaatcttgacaggaccttaatccaaggaggcctcgtcctttttattccttgacattgcatgagtcctgaagccatttgattagttctcttctctgtcctgtccctgttgggggtggaggctagaaagtggacatgttacaattacacatacatacctggaactgagcacaaagatagactctatgatgaggaaggctagcaaatactgtgttccattgctcttttccaacggggctctactacttctggtggaagacactacataaaggactatggttttcctcaagattcaaattaggagtgtggtaaggcaggcagtcatgaatatccaggaaagctatctagaagctaagccttatgttttatattttgtctcagggttggcctagataagacagtttgaggtcattgttttggtaggtactgaaaggaaaatagtaggaaaaaatagcttccctccaagtacctctattgcttctactcccttgctgatttgaactccctgaaaaaaaaaatcgatatatagataatacaaatatatatatacagataatataaatacacacacacacacacacacacacacacacacacacacatatatatatatatatatttccctactggctcctaatcccttgcacaataggccttagcctgacaaacttactacaactctctcttgtccatccttgcagtatcaggtacaaactgagagacaaaggatacaaacagaatttgatcagcttagaagcatcctaaataatgaggagcagagagagctgcaaagattggaagaagaagaaaagaagacgctggataagtttgcagaggctgaggatgagctagttcagcagaagcagttggtgagagagctcatctcagatgtggagtgtcggagtcagtggtcaacaatggagctgctgcaggtaagaaggttcgctcaatctgagattctgggaacacagttccctcctgtgtccttgcgttctcatcctggtggtgacactaaggggtttctttggccttgcagtgccgccttgtcgtccattctagatgtcatggacatgaatgacatttttattaatttatgaagtaagggaatacattttaccttgcagaaaagatccattatatctagttatagtctctaggcccctattatatgtgatctagtgtcaagcattcatcagacttctctttactctggttagtcacaggtaaacacatgcattttcaggtttaagagcatacacatttaagaaatgtgttctatttaagtttaaaatatgcttatttgttatgcaaatgttccctgttaatttttttttttttttttttgagacggagtctcgctctgtctcccaggctggagtgcagtggtgcgatctcggctcactgcaagctccgcctcccaggttcacgccattctcctgcccagcatcccgagtagctgggactacaggcacccaccaccacgtctggctaattttttttgtatttttagtaaacatggggtttcaccgtgctagccagtatggtattaatctcctgacctcgtggtccgcctgcctcggccttccaaaatgctgggattacaggcctgacccaccgcacccagccccctgttacttttttttaaacataaagtgatagaatattgagccttttggggagaaagatggacaaatatatagacagacagtgctctcctttctttgctgaatttccaaatatttcctttttaagatttggaacgaagcaggagagtaactgattttcatttgttgaattgtttgctttgtctctggtgcttatatcccagctttttttaaattcctttttccttttgtcttctttttttgtttaaatttaagattactctggaacagaggttcctaaacgtattttacactcattagtatggctataataaaaaaagatggacaataccaagtgtttgggaagatgtgaagaaattgaaaccttcttgaattgctagtagagatgtaaaatagtaaagctacttaggaaaaactgcttggcagttgctcagaaatgtaaagagagttctcatgtggcctagccattccattcctacctatatacctagaagaactgaatacatatatttgtgcataaacttatatatgaaagttcacagcagtattgttcataaataaaacaactcgtatctccttaaactgatgattggataagcaaaatgtgttatatccaaacaatgtaatattgtttagctgtgaaaaataatgaattaataatacatgctatgacatggatgcaccttgaaaacattataattgaaagaaggcaaacacaagttcttttttgtatgattccatttatatgaaagtctgtaagtagcaaatccgtaatatagaaactagattagtggttgccagagctctggggaagaataggaagtaattgctaattagtgtacaatttctatttgtagtgatgaaaatgatctggatttactgtgcaatgacggttgcactacatcgtgaatattttaaagcctgttaaattgtgcactgtaaagggcaaatcttatggtatttgaactacatctcagtaaaaacaaaaacaaaaaggttccgtaggcccttttttatggttcttccttaagctcttcacaaccctttgaatcgccaccttcacaaaagaacactgtgtttatgtcatttgtccaggcatttgtcctatttcagtcagtcttagttgctatttggtcacttggaatttaaaaaaatattggtagatcaaaaattataaatgctgtgggattaacatttcacttctagatgttagcttcaaagaatggcaaatggaaaacttaggaacttattcttttatctgagtagggactttggctattcctctccaatatgttaagatataatctgttggcggggcgcggtggctcacgcctgtaatcccagcactttgggaggccgaggtgggtggatcacgaggtcaggagatcgagatcatcctggctaacacagtgaaaccccgtctctactaaaaatacaaaaaattagccgggcattttataatatacaaaaaattagctggtgatggcggctgcctgtagtcccagctactcaggaggctgaggcaggagaatggtgtgaacccaggaggcggagcttgcagtgagccaagatggcgccactgcactccagcctgggcgacagagcgagactcagtctaaaaaaaaaagatatgtgctgttgtatttgtggtatgtctcctccacaatcccatctcctgagagtccctgtaacagctttctttctatatggattctcatgatggcgatcgggatggatggtgttatcatatatccattgtttgtttgctagagggactgatactcatttcgtaagagctgcattcaacacttactgccaaagaacgatctagacagaaagacgctcaacttgaaaactgatgcaaaaattagatgagattttaggttgtttcccttataaaggagatactttgatttttaatgctttctgtaatagttttattatatttggccatttttatttttgaaaggatggaatggtaggtagctaaatgagggaaagaagatggcagttactattatttaaaattttttttccaggtttcttaaaattttagattcagggggcacattcaattccatggcatttagtacattcagattgctgtgcaaccattaagtgggatccctctctggactttttcaccatcccaaactgaaactgtacccattaaaaaacagctccccattccctttggtcaccactgctctactttgataaccactattctactttctgtctctatgactttgcctattctaagtacctcatgtaagtggaatcatagaatatttgtcctacaggtttcttataagggtctgttgcataatgctagggtttgggctacatggtactcattatttttgtttcgtcaatatccattccccatttttctggtaataacacctggaattactcttgcaagaaagactagcatgtctatttccatccttgtacttgtttagacctgagaaaatcagcactatcaagaatgaatgagttaattatatgtaaatcagcgtatccaatccttacatccctaccagccacacagtgattattttaagttggacatctgacccaatcctgaatgcttgtgggtgacaaaattgtactgtcattgcagtgaagggaagttctcctttttagcagaaaataatatcagtgaagataattcaaataaagagattcaagttgctatcaactaaaatctgagaatacagtcaaaatatagggaagaaatgagaattaataggcacagagaggccagaattgtgacagaggtttgagcttccagagccatctgtgactaaagtaatacctctctggccacaacccttactttcttcccagttaaggcaattttagttgttgaacaacaaaactatgctaatacagagagcaaaaccatttatttggttgtacaccagctggtgtcatgaaagagttaaagccaaatatattggtacatcttgctcaaaacaaattaacccacagtggtgatgatgggggaatgcagatgactaacagaagttaaggatggactggcttgataaaatgttttagtgtctgggacagggactgagtgaatattgataccagtttgacaatacggcataagaaaggaaacaatatggctggagaacagcttatgttttagatattcttagttactggtgccgttttttcttctttgtggaatgtagtattgtacctgtacagaatgaagtctagctgctttttttcacagtccaatgagatgcagacagacttggaaaagaagggagtttatttttgcaactggttacagggagaaggtcagagtaactatcagaccaactcagagttacaaagttttttttttctggtgcttatatacattttaagctctatgccttcacgtgggagtgcacctacatgcaggagtgtttcaatctatatctatctttaactagggtctggggtctagaaagctttctctagagtcttggaaagtttcttaatcttaaatgggccctggtacaagttgtatgtctaagaatgcttttattattcgatcagactttaaggtatgagaaaacccaggcagggtctttaaagggtttgttttcacatttcagccctggtactcactcaggcaccagcttttccagttctttaatgtttaacttacgcattcatcaaaattatagtaaagggttaagggaaactgattgttctggttgctaatggaaacctgacctgccacagtattatagaaacatgattacagacaaaagacaatgattagatataaaggttgacaaaaaacagcacctatgtgtgagctaaaattaagattggaggccaggcgcggtggctcacacctgtaatcccagcactttgggagaccgaagagggcggatcatgaggtcaggagatcaagaccatcttggctaacacagtgaaaccccgtctctactaaaaatattaaaaattagccgggcatggtggcacgtacctgtagtcccaggtacttgggaggctgaggcagaagaatcgcttgaaccggggaggtggaggttgcagcgagccaagttcgcaccactgcactccagcctgggtgacagagtgagactctatttcaaaaaaaaaaaaaaaaaaaaaaaaaaaagattggaagaggttgcctataggcggtggatagaacaggacttttctgactgtacataagactatgtcatctgtaaaaagagagagatttactattttctttccaatatagaagcttttttaaaaattagtttttattggtacttaataagtatacatatttatagggtacatagattttggcacaggtatacaatgcataataattacatcagtacatcagagtaaatgatgtatccatcacctcaagcatttatcatttgtttgtgttgccaacattcagattatactattttaattattttaaatgcataataaattattgttgactatagtcacactgttgtggtatcaaatactaaatcttattcattctatctaactgccaacatagagccttttatttgttttctgtgactaactgccctgactagaacctccaataccatgttaaatagaagtagtgagagcaaacatccttgtcttttctgatcttcgggaaaaagcattcagtttttcaccacaaagtatgatgttagctgtaggtttttcatagatgtgttttatcaggctgagggacctctcttctattccaagtttgttaccattcctgttttgttttgttttttttatgaaagtgtgctgaattttgctgaatgctttttttcatgtctattgagatcatcatgtggttttcatcctttattttattaatatggtatattacatcaattgatttttttttatgttgaaccaaccttgcatttctgggataaattctacttggccatcaggtataatctttttgctggattgccagatttgattttcttgtatttttgttgaagaattttgtatttatatttataagagatattggtctatggttttcttttcttgtgatgtctttggttcttttatcagggtcctttatcagggtaggatgagcctcatgtaatcaattaggaagtgttccctgctcttctttatttttgaaataacttatgaagttttgatattatttctttttaaacctttagcagaattagccagtgaagccatctgggtgaggccttttctctgtaggaagtctttgaattccaacttaatctcttaacatgttttaggcctattcatattttctatgcgttctttaatgtgtattgatagtttctgtatttctaggaatttgtctgtttcattaagattatctaatttgttggcatacagttgctcattttataatccttttaatttccttaaggtcagtagtaatatcccatctttcattcctgattttttttcttggtgtgtctagctaaatgtttgccaattttgttgacattttcatataactcacttctgatttttccattttttttcctactgttcttctttctttcattagtcttacaccagtctttatacactttgactcatgttttctcttttctttctaggacatgagtggaatcatgaaatggtgcgtatgggtggccaggagtggtgcttgtgagttataaagaagtgtttgtagctattagagttatttggtggtcaattggaataaaaaatctcccagagtagtaaaatttggatgtatcgttatcttaaattgctggtccccgatgagtatttgagtgttccgtaactattaatggactcgatcctatgttagtaaattcagtggttgaagttcagagctacagccaaaaaggatattaaggatgagagcttttactgtcagacttcggtgacttcactcatttaattcatcctctgtccctgcatccagccctggatcttttattttatatgtgtttgtcatacacatggagggccttgtcaaatcctaaaatagggcatggagacagcttctttatatgtactttgcttacttagaaatagaaggtaccggatcattatgcaaggttctctttagatttccaaaagtagactcgagcctcaggacggtagctgtgactctggtgatgataattaatctctgccagttcacacactttagaagctcctatggaaaagtgtagtccttgttccttgtgtctaccattgccaacccacttggaaacatcaagtttcttacaaagacataaaattctaaccatttttagttaggttgtcataacttctcctttgccgagtgttcgtgtttcccaggaatctgaaatctcaaatatgcgccattccactggagttcaggctttgaactcgggcacaggctgacaggatttccctacagagccccgtatcacagtcaggatctacagctcagaataccacatctctggcccctcccagaaggcccactgagatgcagtgagttttccacatatcacataccatttctacaggtagcaaagtcttttcctatcgttttatccaattttttattatttccattagatatcaaaggagggtttaattatttcatttttaaggaagaaactgtgctttcaagaaatgaagaccttctcaaggtcacccagaggataagagggaaagtagacacagtcacatttcttctggatccagggtccggctctcccttctccccctcctcaggctcagggagaagggttcaagtgcatcagtgatgtgaaggagatgaaaccagtgatgtgggagggatggacacaggatgagagatgtgggggtcaaaaaatttttttcatccctaggagtgagatctggaggctgaaaaagccaaaaatggtttccaagaaactgaagactgtattccatgctccagatctgagtaggatgctgcaaatgtttagaggtgaggagaagcagacaaagactgtggatgtgggattgttgtggtgtcaggtaataaactgtctaggtgggataacttaaaattgaggacagaagagaggagggaggtcagagaataaggaatattctgtggtgaagaggatgcatttatatgtaaggaaaaatggctaggtctctggtttatctttttaattcactagctcacagcttcatggtattcccttcccctgtccctactctaaagaatatataggtatcagtgcttactcctttgtttctaatcagcatcactgaatcttttattatttcagaactgacagctgtccggtgctactggggtaagaaaaagttagtctttaaataactgttttccaattacctttcagaagtttatggtttcaatgatatcttctgatcttagcctcatgcattctcagcacctcccaaaacatttgctaaatacatttctccagtgttttacccctccaattcatcagtgcaagtttttcagtcacttcccaagttcgttcatcaccatgtcactagataaacctactccatatctgtcacctaatcatatatatcacacagatgattatattcatatacatatatatatatttttttttttcttgcagtggatgtcacactgaattcagtcaacctaaatttgaatcttgtcctttcagaagatcagagacaagtgatatctgtgccaatttggccttttcagtgttataattatggtgtcttgggatcccaatatttctcctctgggaaacattactgggaagtggacgtgtccaagaaaactgcctggatcctgggggtatactgtagaacatattcccgccatatgaagtatgttgttagaagatgtgcaaatcgtcaaaatctttacaccaaatacagacctctatttggctactgggttatagggttacagaataaatgtaagtatggtgtctttgaagagtctttgtcctctgatcccgaggttttgactctctccatggctgtgcctccctgccgtgttggggttttcctcgactatgaagcaggcattgtctcatttttcaatgtcacaagccatggctccctcatttacaagttctctaaatgttgcttttctcagcctgtttatccatatttcaatccttggaactgtccagctcccatgactctatgcccaccaagctcttgaattttctcatttcttcacctacaaccctttgtcttgacttatctcctgcaactgactcatctgcaacattcacaccattgcttccttgtggtttcccttctttagaacttttactcatccttgagatgtatggtgtatttggcttgagttatgagagatgcttatttattcatttactctttttcatattttcagagaaagttacctaatccctcctaaagacacagcagtatgggtataacatccttgccttcccatttatccatgtttcactttatcactgatatgaagaggcccaaagcctgttagccaccatccatgctacctaggtagtccataggaaccacccccatgaccaccaccaacatcaactaaaggttcttggagggtatgtcagtgtgttgctcaggataccccaggtacatcaaggaatcaaggagaggaaaatatgagcaatatgtgtattcagagtgaagattttatgtccagagtatttgagctcaaaccttgcctgttgttttctaatcatgatgaatactttctcagtttctttttcctgaaatataaattgggatttaagactgtacctaactattaagatcactgtgtaaaactaagtgtctctaaatgtaatgcatcgatttagtgtctggaacataataaatatttgctctcatgattgctaaaaagtgtgagctgtagtaatgtcctgtgcaatagttttgtggccttcagaggaatagtagttgattttactgaagtctcatttttcaagttcccagactccactgttaagaccactccaattttagttttgttttatagaactttttatactgagagtgggactgttttttttcttttttattgtacatatttaagatatatatactatgatgttttgatacacacttacatggtaaagtgattactacagccaagtaaattatacatccactgtatcatatagttaccgtgtgtcgggggggtggtggttagtgcatttaaaatctttcttagcaaattcccagtagacaatacaatattaactagaatccttgaaatagttgggatttttgtcctgcccaaatctcatgttgaaatgtaatccccagtgttggaggtggggcctggtgggaggtgattggatcatgggggcctcatggagggcctcgcaccatccccatggtaatgaatacattcttgctgtgagttcttgggagatctggttatttaagagtgtggcacttcctcctgtctctgtattgttcccactcttgccagagatgttcctgttcctgctaatgttaggataaaaaagtgattatatttgacaaaaaaaatttaagttagtacaacaataaaaaagtacgataggctgggtgccttggctcatgccggtaatcccagccagcactttgggatcccagccagcactttgggaggccgagaagagaggatcacgtgaggtcaggagttcaagactggcctggccaaaattgcaaaaccctgtctctactaaaaatacaaaaattagctggatgtggtggcgagcccctgtaatcccacctacttgggaggctgaggcatgagaatcgcttgaacctgggaggcggaggttgcagtgagctgagattgcaccactgcactccagcctgggcaacaagagcaaaactctgtctcaaaaaaaaaaaaaaaaaactgtgaaaaaagtggtttgttatatagatcaccaaaaaattatgaaacattgtcatacaattcaatgctaggttttaaatctctgtaaaatgaataggttaaaattaacaatcttacaatcaggaagaagcagaaaattccgtagaaccacaataataaaatgatgtaaacattataaaattatatgtgttcaagtgcatagaatgagagtacttttgaaggtctaatgttttgggtcagttctacaatcaggaagaaaaaaagacaggcctacctttccttcttcagaagagagtggggacagaggagatttgatgagggtcaagtctaggaaaagcttcacttttgctcattgtatgttgattctctggatacattcccacctgttctttgccctgatgatgagacttttacccagatgtgacaactgctctcttcatctcatctagtcttctggaaaaaaaaaaaaaatatatatatatatatctatatatagatatatatagatatatatatagatatataaaacatgtatattaaatgtatattaatatgtgtatgtatttataacatatgtgtaatttataattatatataatacatatatacatatgtatagtacacataaatatattagattatatatgtataatacatataaatgtatacattttaatatacatgtatattatataaatatacatatacacacgtacacacacacatatccccaaatacaccaaccaccctcatgtttcttcccagaattccaaccaccagaggcacagcttttttggaaatatcattttaccacagtagcactggatgtctgtccactctgaaatgataaaaattcataatattgactatatgcaaaggaggcagcactgacgtcaattttttctccagaacagagaaagaggaggggactatgttagggcaatgaatttgcgaataatagcatgaaacagtctcttggttattctccatcaaatatgaccacatcatcagcacacaatgtccatcctcccttatctcttccatctacgcctagaaactgctctcttccctgtctagcacctgccaccactagactactgcagatctagttgttctagctcttctcatctttacacgcttgaagcattcctcttagatgagaagctcaacacacttccctttattctttgggaaacgtttttagcttaagtcaaattctcacccctaggaatgaaaaaaaattgactcccaaacctctgactttgtaacccttggacaccactgatttcctatcatttcaccccactgatgtacttgaactctgttccctgagaagggagagggcagacccttgaccctagaaccagacaaaatgtactcgtgtccactttctcccttactctctgtatgaccatgggatggtcttaacctctcagaagcacagtttcttccttccaaaatgaaataattaatctctccctctctaccttcttgagctcataggacatgaagaaataatggattttaaaaaaaacaaacaaaaaaactttggtgccttaacaaaacgatttaatgtgtggaaacatcattgctatggatgtgggttaccagaaagatggttagacagtgaggttgcaggacctggctcctgggtgtttgagacgtatcaggagaggaatcctgtctggagaggcctaagaccttcaaagcctatttccactagagaagtgctcagataatatctgaggttccatgttttttggggaaaattaccaatacttggcaaaggggattttatgaataccaaactaatagtggtctgaattttgtgtgtttagaaaagctctatattgtcaagtaggtgtacagtt

SEQ ID NO: 249 - DNA, 356482 bp, Homo sapiens
  source 1..356482: mol_type = genomic DNA
gttcacagccccagtaatgaaacaaatgggcggagaacaaatgggcggagaagacaacccaggaatccttcattccatctgcttattggggagcaatgatgtcttcatctcttgggctagaggagtagaccagcttccaactttctactctagcacatgagatggacaaacccagggaggcgctgcaggatctgagcctgagggtccttgggccttgagcagaggaagcctctcccgtgagtgtgggctggcctcctgcactggcttctatgcccatggagatgaggctataaaaagactggctgtgtctcctggtgcattctccacttgctcctagatcacgtgctgtgggagacgctgacggcaaggcctcgaggcggccctgtggagaggcccatcaggcgagggaaggtggccacctacagccacaggcatgtgcctggaggccaacccccagcctggtcccccagcagctgggcccccagaggaaccctggctgagcatttgactggacccccagggaagacgagacagggaccctgctgagatgcacccagactccggaccttcagaaactccaaggtaataaatgtctgctatttgaagctgctaagttttgagggaatctgttgcaagcaatagataactaatatactataaccagtaaacatgccaactgaatcagtaacaataacaaaaccactccagcctcagtggcttcaggctccaagtacctcttcttatactggggccgactgagccccccttgccacagggctatgccttggggccagcagggccctctgctccagaggcctctttcgggggctcaagggcaacctgggtgccgtgggctgggtttctgggatgcagactgggtgggcttcagtgtgcaaggtggttgaggtgtccttgggttggcagctgtgacaggggaggagggaaggcagtcagcctagggaggggctcaggcactttccgggaagccagcaggccttgagttgtcctaagttgggccaaggtggcctggtgcttacgctgcccggcacccaactgattagtcactggatgcgggagcctgggaaggggcgctgctgagggtcaggagctgtggctggtgtttggactccagtctcagaggtgtgtttgcccggctgtgggcaggtggctaagcctgggccctgggcctctctctttggccttgttctctccaagattatttccagctctctatggcttggtaagtgttttgggggagaagataatgtaaagatttaaattactggacatttaaaatgaagacactcctatgggacctgattatgcaggcagagggggacgggcctgccgctggtctgggtctaggggccgtccccatggggtccagtgattcccatgcagccatccggatgggacccagggcactggccattcggcccacagggtcccagacatgcgagagccaatgaggaagagagcgcacgggcagaaaccagagctgggagggcaagtaacgcagtctttatttacaccacaagataacacgttgcgtgatgtggtacagaatactggactccagtgaagtggaaagaaggtgaccgtcagaagaggatatcattggtcggtgaaaatccacccacacaaaacaagacaagaatgagaaaaccaaacacaaaacctccaactccactgagcaaaagaaagaaccatcgggcacgtccagacaatccaagagaaacggattaaattacagaggtgaatggtggccacggccagtgcgcagctcacggcgggcgcgaacaggcatcaggtaggttacagtgtcgttacaacttggttttctaccacattccgtaagaagctcttgggtgagtaaggttcaagccccctgtatagatagatagatagatagatagatagatagattatatatgtttgtcattctcatcaattggaaaatagcgcctccactatggagcacacacggcaaaaaaaacaaacaaaaactgttcgctttctttttctttcaatagcagacttttaatcaatgccagagacaaagtgaggccgagctaagaacacgctcagcttcgttacaatgaagaaatggtttcctttcgatgcaaagtataattgtaaaccacagtgctcgcacagttcacgactgcttaaagtgaaatcttagccatacatcacctaaaagtaattaaaaagtcaacacagctgtgcggaaaaggggactctttcgagtccgcccagttctcaatcagaataaaccgtcacaaggccagtgagggcgggcggcgctcgcctggcccgtggaaggagataaaaggaaacaaacaaaacaaaacaaaacaaaattcctccaaatcaactcgagagagacaggcagttcactgtgaattctgagtagtttccctaaaacactgtttccacataaatacaataaactctattattggtatgtcacaagtgctagataaactttttttcttaatatgacaaatgtttaagtagtcctttttatttttcttacaataaaaagtacaatttcttaagaataagttcaataagacgcaaacttccccgccctcctctccttcaaggttttgttttacagaaaaatttccatcttttgtatctgcaaatgtcatgagaggggaacagaaaggcatttttcttcttccccaaagctgccgagtttggcgtgcaaaatctgtatacaatataaagtcatgccggtcgtacagtccatgcaacctccaggtgtaggaaacttaaaaaaatatattcatatatatttatatctatatatttatatatgtatcaatgcccataaaacacgtgggcccaaagtctacaaaaagaagaatggaatgagcacgtggctgtgaccagtaaagaaggaatgttctgatcaaaaagaaaaacaacaaagtccattgctagtgctgcaaaaatcaaacttgcttttgtgtcagaccattacgaaatggtccttccccttgcaaacagattttcaaaagaagtaaagaaaaactgaaacaccttgacaaagtggccctccagaaccagagccctgggacgctggggaggggcggccagtcccagcgggccacggcctccgggacagccgcctgctggtggggcgtgggcacgtgggcacgctgcggcacggcgggaagccgcgagggcagggcagacgccaagaggcccagtggcgtcatcagggtttccctcaaagggatataaagtgctcgcttgctgactcccagccagtgcccccaaggcctttgcaaaggaagaaaaaggctaaaggtccaaggacccacagggagaacacatgaaggaaccctccctgacgtggtcccgcctgcagacgccgaggcagatcctctgccatctgccctggacgcttgctgtggagaagagccgagtgtgtcttcaaagaaaaggctacacagtaatgctctcagcacatttgtgaagctggagtgagctgacagatgaaacgtgcctccccctgccaggcctttgcagagggcgtctccatttgaatgagattagaattaagtccccccactgataacctggccactgagcagtccatgttatcccatcatctgcttaaaaaaaaaaagtgagatgatgcattcctccccataagccacggcggggtaagagggcaggtggcaggatccccagagggctatgcagagaatgaggccaaggaggccagaagagcctgctagctgggccctgccactgctctgtgccatgaatggggaatggaccagctcctcttgccaatctgggcttcagagcaaagagtggccaccagggaggggaaagtcaaacaagtcccaagaccgttctgcctgctctcaaaccactgtctcagagctgaccatcagcagcccagtgaccaagtgaatccaagaatctgcactcatttggtcaaaagtttgagttaatttcagaagctaccctgtaaactttaccaaactccgaaactcggctctgggtccctcctgagcacggtgtgtctgaacttctgcccccaagtctgaacccaatatacactttggaatgaaactggtggcttcatgtgctggaaaataagttaccagtaaaacgtgactgtcagttactgttgaagagaaaaagagtaaagactggctgtcctggtcaggcaatcataccctccctgcaggttcaccaggcaacaagggtccctgggttccttgcagccacaggctccaaaatccagggctggccacgtggctgcagtggaaaaacccaagtgggtaaagagccccacgtgtgccccatgcattgctgacatgctcaaaaggtctttggaaaactcaagttagaattctatcctgacgatgtggtcagagaagtttaaacatgagtttcattaatgctgactgcccccggcatctggcaagcctcccagggtggccgggcatcctaagcaaccctccctgcccttgccacggaggggaaaaacacaccacccctcgtaatactactagtgttgaaagttaaaaagagcccctgggcttctttatacagctcctaggacagaccaggaaagacacaatcgttggtgtcactccgaaaagacctacggtccctcctctcactttctgaaaatagaatctgacagcaacaattctgtacgctgcagaaaactcatcgtacaaaaataaaaacaaaaataattaaaaacctttgaaaggtaaaaaaaaatgtacaagcaagaattcagaaaggaaaaagatttagacattattaccattcagaaaattgctaaatggtgaggaaaaatgtaaaattcataaaacaatgcttattcaggatctttttgtgaaaaaattcatacaaaaatcaacagcaaatttatattctttgctataaaaactcattaggtacatatgtgcatgaaggcttggagacgggagcggttctgttagaaaataattaaaatgaaagtacaaacttgtagggtagttgcccagtggcgaatgtgttggcgatctgaaatctagccaatctggagcttgagaaaacatgaatttcaatcaatcaggatccctttccataagcaccttgagagcaaattcacaagccatccatttgcagggaccttcgcaatctgcattcattttatatatatatatatactttttctataaatgcattataaatattttatcaagatttcataagaatcaagtaagtttcttagcttggaatacattggaatatatattatacatatatatatttatttatacctaaaatttaagcaatacttcatgctacttgcttttaataaaaagcattccgatcgtaacactgcaagtgtgcctaccacatgcttcacgaccagatggagatgctcaatcgtatgtgacgtgtgagaacactttggattcgtttaaaatttgttggacttcaaaacctccaacgggatttgccacttttttggaactacctccatttttcttaaacagcaataaagcaaaacagggaccgccgggctgcagcccctggccccggagatgacggctggtgcccgtgcttgaggcgtcaggccagctcgcggtgccagcactgccaggctcggctggccacaggaaactgtcccaccgattcctgctgtttgttttttcttaaggcattgttcctcagacttcagaaaacccagccacaaaaatccaccagagcaataaaaaaaaaggcacaaactcgcatcttccgatggcttttgagaaactcaagccagctcccccagctcacattcctgtttctgtccagttttgttttctttaaaggtccctctgtcccccacccgggtgcagaccccccgccgcacaccgctatggttcacagaggcgggccacagccgtagaaaacgtcctctttaaaaaaaaataagctacaagatgagtcgagtggtttacacagagactgtggagttgtgggtaataaactttaagcaccagttttaatcaagtttgttttgtattattagatctttgatatttgttttctgtgcctcgtgtcaactgaattcggcagctcggccgcctgttgccacaggctcctttcttccacggcgtcccttgcgggacccgccagagtgtgcttggcttccgcgtgtccgtgtgtctgcgcgtcgccggcgtctgtcccgtgttccctgtgaggctgccacgcccaggcgtgcatgtgcgtctcgagacctgtgggcctgggcggcagaaaggcttcccgtggctgttgcacgctgggtgtccctgggtgctccaagagagccccacggtgggacgcaggcgtgacacgggaaagtttcttggctgagcttcaagacagagacagacagacaagagaacagcagcttcgagggagtgctacaggggcggctcctcttccatgggctcctcatctggtctgtggatcccgcaagagaaggagatgggggcgtggggcaggtgcaccacagagaggagagaacagaacgtgggttaaaggctgtgtgctgccccacccgccagcctagccctggcctggcagccccgggtccatctgttcaggatctaatgctcctcatgcgtctctaaggggctttggcactggaaggagggggccacactggcctgtctctagtctgttgggcagggcatgtgccataaaggttctgaccctgaatagtgtgtcagtgggcacagtggggctgggtgagcctgcaggcgggcggcagggcaggtgctcacctcttttcggcgggcttcacgcccacggacagcgaggccatggcggtgaccgtctcggcttcttcgttctcgcaagtctgagcctcgatcagagaacgccccgctgtggaggttgtgcgctgcaggcagcgccagtacttgcctggggtggtggggtgaggaaagtcgctcagtgactacaacttagcaggatgcactgaggcccgggaaggtcctgcgggaccctgagcctcaaaccagattgatcccttatgattttaaaagcacccgtctttgaagagacacgaagcagaagactgcatggctacaaactcacaaagacccaaaaaatctctggaaatgtttccccattgtgagtggctcgagtccctccaggagcaggcccacctaggactgcagagggaggctcctgtaggcctggctttccacgctcacgggcccctttctgccctgggtggccagggcagggggctgccagcctgctgggttgagccttcctatctctgggagcaggtgagctgggggattgtcgctggggctgaggggtcttctgcctgggccctcacagaggctgggggtggaggggtactgcgtcaggcgcaagggggtgtatgtggagggctgggcctggcccagggtcagcttcagggctctgaagccaggactccctcacacagggaaacggggagctgagctctggactacccctgcttctgtggacagtctcaaccatctgggtcatctcaaaggcaagacaagctgggcttgcgacaatgacagggtgtgggaggcgcctctgagataggctgcgtgccacgcccttgcacccaggacctgctgcttgagggtcggtgccagaactcagagggcctacaccctgcctctctgcagggccaagggttctttgaggtcaggacgtgggcttctctggtccagggaagaggccggagtccccagggtacaggctcacagccatggcccccgctgctagctggggacctagagcaagtgactccacactgagactgtctgggccttgattctctagacttacaaattgggctgatggaaccatcccagcaggccgggggaaatccagtcggggttaaatgtgagtctctaccagctcaagaaatgcagctgaaagcaaggccttctgctgcaggcctggggaagcagccggcagtgggatggagaagagctgggggtatagggggacagggatggggtgtggtgcagtcccacccccaggggcgtgtcccctgtgagcacccagccaggcaacttactgtggatctccatgactttctccatggaacggacagcgtttgcattgggtctttgctgtaaaaccttttctgggagaggatcaagctggaagaaaatgcataagaatataaagactgccaatataatccacacgtgcgttagacgggtgttccgagactgcaactgtttcctgagcacagagacccttgtggggtgcatttgcccacagagtagaaaaaaataactttaaaaagccaaatgtgccgtggtatttataatttttttgtaaaagtggatttttttttaggacgctataagatatttgtgggttcctacaagtagcaggaagaaagacagtccccaggagtggggctggcacctgcacgtgaacttggtatctgccatcgacgccacagggttccatgagggggagtgacgcttacttcatcacttttctttcctttgtcttttattaataagtaagaatgtctgaatatcccctgatcttggttttcttccagggcagcggaaggtggggtcgggggagatgaaatggaagaagtagtcagatctctcagagggaatccttcacaccgagtttttccctaagtactggcagcagataaaagcagggaagaagtttacaagtcaatgacagggcaacagggcaaagcatttgcaacacaacaattaaaaatggttgactggccgggcgtggtggctcacgcctgtaatcccagtactttgggaggccgaggcgggtggatcacttgaggtcaggcgttccagaccagcctgggcaacgtggtgaaactctgtctctactaaaaatacaaaacttagccaggtatggcggtgggcacctgtagtcccagctactcgggaggctgaggcatgagaatcacttgaatccaggaggcggaggctgtagtgagccaagattgtgccaccgcactccagcctgggcaacagagtgagaccctgtctcaaaaaaaaaaaaaaaaaggttgaaatggattataaaaatatagaaatacaacagttcaagaacctttaaataactggaagagcccacaaaaccaggggaaacctgctgggtctggaacaaagctggacctgagtcagaaggccaaagcacccatgtccccaggtgtcctggagccagccttgctggggctggaaagaccactgtcaggacaggacgggtgagcgaggacagacgcacgacgacgtgtcaaacagaggccatgggaaggagcgtttgggttttaactctggcttctgggtagaggtgaaaagacaaagtgaccctgagaatttgcctgcttctagacactgggagtggacagctactatcgacagtggcagctccgccaggccagggcgccaggcagaaaccacagcagggcctctttggaggcacacatacccacagcaggcttcaaatgagcacagccggttaacttccaggaagcatgagttcccaaacacaaaaaccccaaacaacacggaagtgagtcagcacgagcctgggtcaggagggatgatgagcgaggttcccaatcccattctccaatgaagggaagcaggctccttggagaacagctcggtccaaggctggggcggggaaaatacaagacacgagagcctggagcacctcgtggtgctgggaaatcaggacgtgcctgaaggtcaagggacggggccatcacaggacatgcagggccagtctgaaaggtgccccagggccagagcaggaaccagctgggcagcaaaatcaacaccgtggtattgaagcatgacccaaagtgtaagaaagacagatacacaggagttcaccgggatatgaataaataacgaaatacacacacaggggagcagagacaactccttgagcatttcaaataatgcacgtatctactcccctctccaggaggtggggcttaaggcctctccaactctgtccccctgagtgtgcactgcactgtgactttcttccaaataatacatttggaaaggcggtaaaagcgtaacccgatggtggaaggacccggcaaacatcactctcagcaaatgatcaaggtcagtgagccgtgctggcagcacatctgacaagcgaatggcatttcgatcctatgatcttcctccccaaagcacagaaccaggagaagaaactcaaacatgaactgaagggcagtctgcaaaatctctggccagtgctccttgaaaaaccatgaaagactgagaaaaaagacacgaaatgactaaatgtgacgtgtgatcctggacgggaccctaaaatggagaaagggcagttgtggtaaagctggtgacatccaaatacattctggagttaatagtcatggaccagcattggtttctaagttgtgacaaacgactcatatcgaagtaagatgttcacagtagaagacgttttctgaggggggatatgaggaacttgtacacgatctctacaatgtttctgtaaatctcagactatccaaaaataaaaagtttattaacttttaataagttttaattgattagatccttaaagatcgcagttactgaaatgatcagttataaattataaaaagtaaatatagtgagtatgtattaaaaataaatgacatttctgtatgatgaaacaaccagagatttatgaacgtgacatggaagatgtgagacccaagccaggggcaaaaaaacccaggaatgcacacctaggtacatcagagtaaaactgcagaacatcaaaaacaaaaagaaaattctaaaagctgctagagaaaacagaatcttcaaagaggtagccattagccacacaccaactccttaacagcaatggaggcaagcagacagtggcttaaaatcttaagccaatcaatgtgtcaagagcaaatccttgtcaacccagaattgtttatccagtgaaactatcatccaagaacaagggtgagataaagacctgcctcctcacaaacgcgagctggggaagttgaccacatgagtgttttcccaagggacactctagtggatgtattatacttaaggcagtatgaaaataatcctagaagacagtgtgagaaatgagaaggaatgatgagccaagaaaatgacataagtacaggaaagcctggatgaacagggatgacatagagcaataataatggtgtcttatcagtgaaatcaaacaaaagaaagaaggaaatgaaacaccagtcagtgatataacctgggatggggcactgaggctagggctgccagatttagtaaaacaaaaacaaacaaaaccattcacggccctggttaaatttcagtgtctgataaacaagtagttttgcagtggaaggatacccacctgggtgctctgtgtctactctggcaccctaattggggctggcccagtccgggctttggtttgcatggaggtgggagtgaggatgctgactgtgttgacaatacatgctccaattgttaaagatgacgaatgaaaaacaagaaaataggttgcatatctttggactcagtagagggaacaaatggaatgcaggaaaccctcaattaccccaagagaaggcgagaaaagagaaaaaggaaagagccacagaaactggggacaaacaatgaataagatgctaagaaggcatctgaaaaaagggatcaaactaacagcaaatgacccacgtttccacttaaagcacagaccacaggataggacgtgaaaataatatattgcccaggcttttgctgtttataggagacacatctgaaacttcaggggaaggctaaaagtcccaaaggaaaactgacgctaggcaggcaaacctggccaaagggcagctggggtcacagctccaatatctggcacaaaagatgtaagggaaaggccattactggatatacaggttattgtgataagacttcaattcatcacgaaagggcataatgatgtcaaatgtctatatttagtaaagcagctttaaaatgtctaagtaaaaatgggtgcaatggaaagaagacaagaatatgtgtgtcccaccatcgtgggagactttgccatgtctttctcagatccagcagacaatcgtcggtcaggaaaaccaaagcgtgaacaatacaattagcaagttctgtttaatgaacacaaacagaactctgggaaacagacggagaggacacattatcccaaacacatgtggaatgtctctgcaggctgaccacgcactggcccgtaaagcaagtcgccacaaaaaaataaatgccaaccacacttccttttcttaccacagtgcaatttgttagaaattgatagcaaaaagagaaccatgagtccttatgtttggaaattagaaaacacaccaactcatggctcaaagaagaaatcataacagacatcaggaaatgctgagaattaaaaagtaatgaaaagtgctacctatcacgatgtgagatgcggctggatgccatgttggagccatttacagccctaactgcacacatcaggaaagactaaaaataaatatccaatgtaagaagttagccagagaacacagtggtcctaaagcaagaaggaaagaagatagatgggaaagcagacaaattctgaaaagaaaaaaggatgctgcagttgaaaactgattctcggaagtgcttgagtaaactgacaggctccggcaggactgacggaggaaacccaagttcgggggggtacacagggacaaccccagggatgaaagggggccccggctacaggcagagcagagacgtgaaaggcaggaaactggggacacttaactcttgccaagaaatctgaagaaattctggttgaaatggagacatttctggtaaaatgtaacttctcaaaattaagaaggaataggaaacttcaatagacctataaccattaaagtcactgaatctgtaatttaaaattttcacccaaagtaaacctgcggcctaggagagttctcccagtcaaggaacagattatcctgatcctacctccactcctccagaggacagggagaacactcctagggagccagctaccacccaccagcctggagcacagctctcctgggggccttggacccatccaccagcctgcaggacagtcctctggggggccttggacccacctaccagcctgcaggacagtcctctgggggaccttggacccacccaccagcctgcaggagagctctccgggggcccttggatccacccacgtccgtcacactcgtagttctcgagagtgaccgtggactgtgctgggcaacacagcctgagatgtgaaggacacgggctggccagcctggctctgtcccagtcctccgccggtggaaacagggcacccttcagtgcttcagctcagtgtgtcacatggcactcggggtacaaaattcaggacaggctgtttcctagaggagcgcactgatgggactccatccactggggcatttctgagccttgggggactggctcatggtgccctgggcttctgccgtcccctgctgcctgtctgtaagtagtaaatctgctgcacagaatgtgtgtgtgggtgttgtctccctggactcacacaggctggtcaccaatgtgtggagaacctgcttcacaccaccgctctctccttctctccctctgtccatctgtctaattcaccccactaagaacaaatagggaaaagacaatccaatagaaaaacgggttgacatgaacttcacaaggagggaaagcccaggtggccaataggcagatgcggggctgctctgccgtggcggtcatgaggaagggaccctggagccctgcagaggggccagttttacccccgtccagctggcaaaggtcaagggcaacaatgccaagtgctgctgaggtctggtcacgccactgctgaagacagttttaacccttaaaaagccgcttgatgttatctcctaaaggtgaacaaacacatcctgggccatctcccctcctggacgtttaccggagacacggccacctaggtgtattggggacttgcccggaagttcagcgtaactctgtctgtcacaagcaaacccggagcagcccgcacctgccccggcccgggcccgtgtgggatgcacgcaggctcctttacagagggggccccagggaagggggagcgctgagatgtcccttacatcccaacacccaggtaacagggcccagagggacggccccgctgtgtgtggccacagctccttcaactctgaaggccacgaggctgggctctgtcttgctgaaagtcggccaggaaggctttggcagcccggatggaaagaggagcaagcgggacacacgacgtggaccctgtgcgcgccacaatcggctgcatgcagataaaacattcaccgttggcacggggggagtgtgactgagtgtgagtgtgtggtgtgtgtaagcattcatgtgtatgaatgtgcgtgacagcatgtgcttgtggggtatgtgtgcgtgtgtggtgtgtgtgtgcacgtgagactgtgtggtgcattcatgagtatgcacgtgcagatgtgagactggtgcttctgtgggtgtgcagatgtgtggtgtgtgcatgcacaagagggcatacctgtgtggtgcatgtgatgtgtgagactgtggtacctgtgtgggtgtgcgtgtgtgtggtgtgtgcatgcacaagagggtgtgtggtgtgtgcacgtgtgactggtgcctgtgtgggtgtgcgtatgtgtggtgtgtgcgtgcatgagagggtgcacgtgtgtgcacgtgtgactggtgcttgcgtgggtgtgcatgtgtggtgtgcatgagcaaggatgcacgtgcatgtgagactgtggtgcctatgtgtggtgtgtgtgtacaagagggtggccatgtggggtgtcagtgtgagaggaagagtgactggaagcaggcagccagctctcaggttaatccaactcagtccctcacacacacttggttttcgttactttgttagagctgtttcacaaccacacctttcacaaagcatcaggacataactaataagctaaactcccgggggaaaaccttttccacacgacaccaccctcctgctccacgaatgtcttccacgaatcctggagtgggttaaatgagatggtggcattttaaccctgaaatgccccatgactaaagtagaaaattggcccaagcaaaaacctgctttgggcatggtctcagacaggagagacggtcctttcctaacctcccgggggcacgggcctgggccacagatccccgtggccgtctggtgcagggtctttgatggaagttggctggaggcccgactcggtgctgcgcccacacgactccacggcccatctacactgcaacatgcaacactcgtagggaacttttcactgcccatagtcactggcagttgcagataactgaacatggaaactattaaataaaatggttgctgggaacagcacaggcctccagacctacgcgctgaagacagaggggtcgctctgatagcggggacgccaaggcccctctgcgcttcctgtcccgcacaccctataactcagccacttctgcagcaacagggtccccgcaggccactgccgtcacagctggcggccccgcctgtgtgtgccagatcgcctggcacactgtatatcaaccttcatcaaaggctgccgggcagaggggcggggcccaggccaactcttgtgcattaaagagacttttaaagagaccttgataaaactagtgcttcctcctttttgacgtgtttaagtaaaagaacattttcttgttagaagcgcaaacacgcatcaggaagcaagaacaggccacggctgaaagcgaagttccctattgttatttaaaataactagccagaagaaccataaggcttcgggatggtagaatatatacgtcagttgccttttaactggagcaaaaagggggaaaagactgtttgatgtgaagaaaggacctgtaaagtgctttggacattttaaacagcagcccggtcttttatccagcctgtcgctggccagctcacccgctgcagggatgccacctggatctttgatctacttgtgatttatgttaacatgaacaccatccctgaccagcaaagatggccagaaggcagggcgtgtcctggtacctgcagccactgcccatgtcccctctcggcacccctctggctggcgcaggcccctgcgatggcccaggctgcaggtcccaaggggctccccttggcgatgcaaggtcctgaccccgccaaggccctgaccttggccattgcctgctgtcgctcctccggctaagtcttgtgcccttggggcttggcacacatggggtctcgcatactccaggtctgctgtcccggggtcacgcacccaggggtcttgctctgtagtgggtcatggaaccgttcccatcccccatcctcccaagccgggccgtggccctgcagtctttttttgtttttttttttaggcggagtctcgctctctcgcccaggctggagtgtggtggcgcgatctcggctcactgcaggctccgcctcccgggttcacgccattctcctgcctcagcctcccgagtagctgggactacaggcgcccgccactgcccccgactaattttttttttgtatttttagtagagacggggtttcaccatgttagccaggatggtctcgatctcctgacctcgtgatccgcccgcctcggcctcccaaagtgctgggattacaggcgtgagccactgcgcccggccagccctggtctttaaggcagcactgtcagctgtcggcggaggtgtgcaaggggacgtatgcgcccacccctcagaagatccaggggtttcagtggggcccaacagaccacctcaggcctggccatgcgtccctctctcccctttccccttctgcctcgtgctcttggcttggccagcccagcctcccccacacctgcgagagcccaactgtcctcccgtgaggtgcctgcacttctgggctctcactgacccccagggtcaccctgcccttggcgtcctctacttcttcaagccaccgaacctccctcctgtctgggagaccactggccagtgcccacttccctgaccgccagctccctggcttcccaagtctgggtcaaggccccatgggccccatggcagcctttgggtgagccgaggctcagcgctgccggtcctgggcctccctcagcggctgcgcatggtcaccggggcaaggcactgagccctgccgatcatctgcaggcctcacccacggcccttagatcaggagtcactgcagagagacggagcctcgtaggttctaaggaagctgcccctctccctctaatggcaagggctggaggaacacacagctgacgcgcaccgccctggcttccctggcctggaaaagctccccttgctgtgccgggcagtttgtgtcacctggagatattgctggtgtgcttggccttcaggcctgtgtctgaatgagacctttcctggaaaataaagcaggtttgtctcagagtgaatctttcaaaatttaggattacagtgctggcctttctgggaaagccatggcagcagccctgctgggggcgggggaggggcccggaggatgccctgtgctgctcccacttctggcgcagggggagacccctgactggagtgcccctggctggaggcgggacctgcagtcccaggtcccacctccgccgtctctgatgctgcccctcacatcggcctcaacagaaggggagggaggaaggttctggtgctgtggcggcctggggccctagaaaggtgggggtcttgactgctcacaataagaccctgctctcaagagcagacccaggtcaggaacgtacggcttcctcggctaaagcagcacccagttagcagcgagttaccaaccgtttggaaagcaacctgcttcccagggacagacggcagaggtggtggaggtgggaactggctgtgaccagtggggttcctctcataatggggtttgcactgggaagaagacacccttttgttctaacgctcacaatgagaattccagcacccacgcccatgtgcaggaggcgtcctctgcgaggtgccctgtgtgctggccacctcgaggcccactgcgcatgctgaggccactcacagacagtgggccagagagtggaccctccctctgcattttccagaacaatgcgaacgatgcctgcacaccagaccccgcgagcgccgtgcttaactacaggggtccgtggcctcctgtgcggcctgacgtttccccaccgctcgtgacctcgagtgcctctgggcgctgcccttagttgcacggcacccggaccgtcctggagtgagcagggccagctttccatcgggggaggcttgcacagagtgtcctgggatggctgcagtccctgccatccctctgcccgccccacaatgccaggccagagcgcctgtcagtaagagccatcagacaccagaacccaggggcgtgcaaggcacctgtaagtgtgtgaccgcctgtctggtgaacagagggcctgggaccagcaccttggtctggagcacccacaggcaggcaaaagccagcactgacccgagggcatctgagctgctgtcccactggttccccaaacataagggactggggagatttttttgtaaagacaggtgaggtcggatggtagagtgctgccttttccttgagctgaaaatgaggatgctgcttccagagaagtcccccagagtgggggctgagcatcaaatgggggtgaaaatgcaggtttcctgcaaaccgctgagcaccaggacacccccactaaagtgccctgtcaccccgactctactgagactgtcctcaggactgccgggctggggagggcagtcccagagggcacaggaggcagactcccaccctgccccctggcaaggcctctgcatctggtgtgctggagcctcaggcactgccctgccctccgcttcctgtggtcaagtgatctggacacatggcccttgagtcccccacgtgccagctggctgttctccggacctgcactggacacccagcgcaggcagccaggcagagctctgcgtggggaagccaccgactgagtcgtgtcttggggatctggactcacacccaaaaccctgtagacgggttcagaggctcaggaagagcaggtgtgggaaactcagaatgaaaggtacccctccactttgtgtcacacacttcagacactcttggaggtggatatgacattggtagctgtggcactgcctcctcctcccatctcactggcccacgcctggtggaggccctgctgggagcagggaggcccgggccccagcgtcatgctggaatggaacgctgcaggtggcgctctcaccccgagcccgtggaacattctttttctctgcccaggtctcagaggccagctgtacagaccacagcgtctctgactccctccggcggtgttggtagggacacagcagggagccctgtccctgggggctcagagcagcagacaggcctgctgggcagaagagccccagcctgccttggggccactgaccgaaacccacatgaggactccctagagaagctgactgtccacagaggaaacgaagagagaaagaaaaagaaaacctctggtcacagtgtgctccacgtaatggagagagggaccctgaactgaaagggtgcagtcgcaccgcagaggaccctgagccatcttctcacgacaagagggctccttccagtcctgccccctgcacctcttccagccatcgtcacggttctgccacatttagagctatgcgggggtggggggcaggtgcaaggcggagctgcaagcatccacgtggtcagagacccactggctttttcatgctctggggctctcgggcagccaggccacaaccccgagcctgtcagtgtggagcatcctgtggggtctctggggtcttcctacctcgtttcccagcaaggcagaaacacatgcttccgaggcgtcgcaaatggcggtcaggtcgtggcctccctcgagggccaggacaatccggccgccagccaggcccatcagctgcttcgtcaggtacccgaagcctgcaacgggaaacgggagactgcagtgtgaacgggggaggaccgcagccagcacagcccagaaacgcgtctcatggcatcgtaagaagactgggggctggggtgtcgagacacatggccaggccgggtttcgtttaataaattcgctgaagagtttcggctttggatttcctctttgatctgtttgagaggaggaattatggcttcaatgctttgatttttaatcagcaaatcatctgctttaggggacgagggcagccagccccacccagaggctgcaggccacctgcccttcggcccccgcagaggggctatggccatgctcttgtggccgtggcccagcgggctctggttatctgacatgctccaaacatgtatgtgtacacatgtgcacaggctgcatgtgctcctgaagcgttctcccacgtccaggtctgagcgtttggctttgatcaagagccacagtcccgccactgcacccacatcactcaccccaggagggaatgcctggtggatgagggtaatcaccaccctcagccaggccaggccggtgctgattagagagcccggaaccacgcgccgctaattagtggccccgatcatgggctggcgaggccgtaacttcccaaagcctcggttcatcccatctgatggaaacagtgacaggggcttcgaggcagctgtgcggactgaggaggaagctgaggatgtggtggccgcggtgctccgggccgggtgctgtggggcgttgggcacagtggaagctctttgccctctgtctggtcactttgctggccactaggctgcacggcctggtggactgtgggaggccccaggggagcacagccaccgagggctgcctcaggtctcctgggtgagccacaccctccccacgcaaggacctgagagacgggcccctccttggccgcctgtgccgacaggagtggggagggccatacactgtggacgctggggccttgagggcatcaccagggctaggaccaaggccacaggatgcttgggcctcgggaggctctccaggatcctcggggactccagggtgggggaggcggccaggcctttgtgtgcgccaggttttcatctccttgtgagttgctgaggcacagcaggagcactgctgggcagtccctcctcccatcctgacagcatggcccctaacgctgatcctgagaggacacacacatcctgggctccctcatccaactctgaactcaactgtgcccccagcaacttccctttacagttccaaggagcaccgcctgccagagaagcggcatggggcacatctcagctcttggtgggaccaggacctgcccctggaggtggcctgcaggtccctaggcacccgcatcccagagagggagcctcgtgtgccctaggcccttcctgggcaaagagtgcccgaggtgcctgggtctgagctcccgctgcctgctctgggctctctggggcctcccaaatggactggttcccagtacggtcagaaccttggtcattagtaaaaaggtgcccttccttatctcgttattaaaaaggggacctgacacgcggaacacagcggatcatggacatgagcagaaccggctcctcagtcatatgcagaaccacttacatctggcggagaggttgtagcccccaagaggggtggggtggccctccacggcatcgaagcctgatgacaccagcaccacatccggggcaaactcgctggcgatcggcatgaccaccgttctgcaaaggacaggagaaggcgttactgggtcagctgaaagagggacgggacggtcacaaaaccccaaggttccctctggcattgataatgcctgccccgcaccccctcggccactggcgggctgagggctccacacagcaggctggaatctggcgaccacgcttaattagaagggaatcaacccacgtgtgatccaggctcatttcacatcttcacagtgcaagccagcaagccccacgacacttgcttggtgagagggagtcacggtgcaagccagcaagccccactgcacttgcttggtgagagggagtcacggtgcaagccagcaagccccactgcacttgcttggtgagagggagtcacggtgcaagccagcaagccccactgcacttgcttggtgagagggagtcacggtgcaagccagcaagccccactgcacttgcttggtgagagggagtcacggtgcaagccagcaagccccactgcacttgcttggtgagagggagtcacggtgcaagccagcaagccccactgcacttgcttggtgagagggagtcacggtgcaagccagcaagccccactgcacttgcttggtgagagggagtcacggtgcaagccagcaagccccactgcacttgcttggtgagagggagtcacggtgcaagccagcaagccccactgcacttgcttggtgagagggagtcacggtgcaagccagcaagccccactgcacttgctgggtgagagggagtcacggtgcaagccagcaagccccacgacacttgcttagtgagagtgagtcacggtgcaagccagcaagccccacgacacttgcttagtgagagtgagtcacggtgcaagccagcaagccccacgacacttgcttggtgagagggagtcacggtgcaagccagcaagccccactgcacttgcttggtgagagtgagtcacagtgcaagccagcaagccccactgcacttgcttggtgagagtgagtcacagtgcaagccagcaagccccactgcacttgcttggtgagagtgagtcacggtgcaagccagcaagccccactgcacttgcttggtgagagtgagtcacggtgcaagccagcaagccccactgcacttgcttggtgagagggagtcacagtgcaagccagcaagccccactgcacttgcttggtgagagggagtcacggtgcaagccagcaagccccactgcacttgcttagtgagagtgagagcattgctgtttcttggtatgctgttttctgtataatttctgtaacccccatgggacaagctgcattaacctgggggagtgaagccagctccctgtcccactaacacccctccttggccccgtgcccacccaccctggccctgtcccgtcctctctgtcctggtcctccctgcccatcctctcttctgagactgggtcagctccactcgccccatcaggctgctcttgctgcgacaatgcactttccacagctcccactgaagacacgtgcagtcacccactgcccctagtgctgggactgagtgtggccgagagggcggagagcccttgccagccctgctgggggagcccacgtgttccttactcaccctggaacaccaacacacacaggtgtaagggaattacaacacaagacacttaagaatctttaaagggaaaactgatgacaaatgtaagagaattcactggaaaagacagaaccactgagaaattctttaaattatattagggaaataaggaaagtattctatttggaaaggggaaaaagcactccttaacacaaaagaacttatcagtctttagtctaatgatcttatcagtgtgtgctatgaatccatgcgtatgctatgaatccatatgtgtgctctccgtgagtagggaagttcagcagtttcatgtctcctttaggctgccgccttcgatcctgagttaatcaccaccactgactttcaaagtctccttcactccctctgtgggtgaggggagcagaatcagggcctccctttcctggcggacagcaaggacctcatgagacaggtggtctggtgtcttcctgcaatgacggcccaggtgcaaggggcctgtgcaggtgaggacggtggaacagaagtggagcctttaaaaaggggcttcaaaaagttcgtggaaaaattgaattaaaagataaaaaatataaactttatttctcaagctccatcaagtccaagacacttttgcaatggtgaccgcagccatttagtccctcccgaaaggactgagtgtcctgggaatctaaccatgtcaatgcagtctctgttgttttttttttttttttttacattaaatgaagaaaaataagtgccctttacaggtttttctaagattaggaaagaagaagcagccaactcaggactggaaggtggatgcctaatggtttctcttcaaagctcttgcaaaggttttctagtttaatggagtgagcagaagcattgttgtggaggactcttggtggcggcggagggaggggtgctgggcacggtggctcacgccagtaatcccagcactttgggaggctgaggtgggcagatcacctgaggtcaggagtttgagaccagcctggccaacatggtgaaaccccatctccactaaaaatacaaaaatccgggtgtggtggcatgcacctataatcccagctactcgggaggctgacgtgagagaatcgcttgaacccaggaggcagaggttgcagtgagtcaagatcatgccactgaactccggcctggctgataagagcaaaactccacctcagaaaacaaaaaaagactctcgggggaaactctcccagtgattttctgtgaaagtgctgaggaactttctcaaaacactctcacaataagcaggtgttatcattctttggtcctccagaacaggcaacatgccttgggcattccccaaacctgctgtcatgacctttactcctgcttgaccagcctgctactgctgtgactgggccacctctggctctcggtagccggtgctgtggttgtgccttgtcttcaggatggtcctgggaaagccgtgctccatctcctgttatgacactcaggaccctgagtccacctgttgaacatttccaccgaaagctctgctcctgtcggcagctgatctggacgctgtggttttggtgcccactgactggaaagtctgctcaactttaattctgcaggcagagttgtgtaagctgagccggttgagacgcccatggtgtcaactgttgcttctgctgttaattgtgggtcctctacaattagggcatgaactggatgaattttttcctcacaaattgatgtggatggtctgcagctgggggcttcatcttcaacaccattgcacattccttcttaaaatgagtcatccatttgtaaactgctgatttctttggggcattgtccccataaacttttcataaagtatcaatgatttcaccactcttcctacccaagcttcactgtaaacttgctgtttgttctggcttcagttttagcagaattcacgttgctctgagaagggctcttttcaaactgacgttttatccttggtgcctcaaactagatcctgtccagatataacacgttagtgcgaatttattttggtgcagaaacattttgaaacccatgcagtttttttcaaaatatgcattttctacgaacttttaaaagtctcctggtatttccaccatgaagcctagtttgcacgattcccacttgtgctgtgagctctgggggtcccctcaccaagcccttgtgtgagtaggtccatgttttagggtttcaccaccgcctacttcctggagctgctcagcccagcctgtcctgcaccgaagcacacttctgtgtccccacggcctccccagcacacgcgtgtgggccaagtgcatcacccgatgggcgcctcccttcatatggattttcagaggcccctccctgggggcagccaaaaatgcactcaccgggcccagtgtcccttcccaccaccaaggaccttccagaaacatcacggcagacggcagcagggctggccctaaaactttttcattcagcttttattacaaatgaaattccccactgatgtcactgaaagtatcaactttgaccagaagaaacaaaaatgctgaaaattcaatgtgaccccttttcggggatgaccgcagatcagaatcttattgaaaagttcctctgatttctggtggtggagggacacaacccccaagggcttaaacaccaggtgaagatcccgcgggctactctctagagggccagcagtcatgagtcccatcagggacgctgaggcaacgggagggcccatctcaatgctgggagcacgcggtgcctgatcctggtgccccgcgtcccatgagcaagctcagacgggagaagagtgatgcgtgggactgtgtggcttcagcctgttcaagtcagtgctgacaaactctgccctccaaacatgcgtcaaatccacacctaggcaccttgcccgccaagaaactcacttctggaacttagatgggagtcacaggagaccctgggtggcttctgagcagtctgcttctgttcttttttctgaagagagccagtccacacaatttcccctagacctgcctctgcggcagctgtagaaagtgctttccaaggacacaggagctgtgccccgagggccatcgttaggggctgaggaaacaaggtgaatctagacaggggcagcgagcttcctgccacgggtcagataggaggcacctgacctcagtctgtgggccacacggtctctgccaggaccacgtgatgctgcccttgtggtgcccaagacaggacagacagtgcatcggcgtgcgagcgtccctgtgctctgataacactgtgccaagagcacaggcggcaggacttggcccaccagctggagttgcccaaacctctgctctggtcctgtccatacaacttctgtaacattcttccatgcatgattctggtcccagagtgagaggtttcttctcacctactgggaccccaccacaaagcatggcgatttcgcaaacatggtgtacaacacaggaaacaccgcactggcctcagagcgtgcgtggagttggtgtcggcactcccgccgcagggctgggaggggagaaatcagtctagtcagtggcaggatggagagaatgccttggaatccaggagtcctttgactcttgctggacccagggccctgccctggacactggaaggcactggccccacagtcctttctgaccgacattccgaggcttcctccatggctctgaccaacctaatgggcagcaggactgaggggggccgcaggactgagggggccgcaggactgaggggggcagcaggactgaggggagcagcaggactgaggggggcagcaggactgagtggggaagcaggactgagggggccacaggactgaggggggccgcaggactgagggggccgccctctgctttcaactgtccacatcatcccaaggagactcgcttctaattattttaataaagttcttgtcataaaacctttttctttggacagaaaaacacatttccagccatgcttttggtgtggattttaaagccaagacctttttcaatgagaaccacaggcgttttgtgtggacgctgtgtccttggcgaggcactctgactgctgctttgcagcgagcgcacgtggaggctttacttccccactttgaagtgctgctgagctattttacttctaatccccctccaaaaagaagtcctgtgaaaatcgccgttaaatgaagttcataccaagagagtctctgctgtctaggcttggtgtgtggtgttgcctcaaagccagtcaaaacaaaatgggaaagatgagcccaggctcgtgggcactggcacgtcggccacacgtgaggctgcgtggggcacagtcggatgcacgtgcccacacactcattttcattttactgggctcaacaccctctaggttgtgatcccaaacacctgctagacataagaaggtcagaacgtgaggtgcatgagtgcaccttcagcacccgtttgtggcgcgactaagaaacgtcccttctcctccatgggacatgacttctttgcctgtaaaaaggaagctgagcatggcactccctgtgtcttcaggactgtgcttaccctccacgactttcctacaagaggaagctgaaggaatgtccctgtttaatagatgctgcaaaaaatgggaaactggactcacattttattcccagaattaaacttttaataaagaactcagtctcggccgggcacggtggctcacacatgtaatcccagcactttgggaggccgaggcaggcggatcatgaggtcaggagatcgagaccatcctggctaacacggtgaaacccggtctctactaaaaaatacaaaaagttagctgggcgtggtggcgggtgcctgtagtcccagctactcaggaagctgaggcaggagaatggcatgaacctgggaggaggagcttgcagtgagccgagatcgcgccactgcactccagcctgggcgacagaatgagactccgtctcaaaaaaaaaaaaaaaaaaaaaaaaaaaaagaactcagtctctaaaaaaataagattgagatgtttgccgtgggcctctcaagccatcactttaaggagagtatttccatgaggtcacttttggcctttcttggggcaacctgaggggagagaggggtgggctcgcagtttcccaaggcagtaggcccactgatcgtccactgatcgtcagctcaagaggcaggagaaatgggtggaaagaggggatctttagagaaggtggacaaatgcctgtaaggtgcacccctggggccggcaagcccagggaagccatgactgtggtgcccagagggtgcctgtgcccgtgaggcacgtacagagggaaacgtggtgctaaggggagagagcggcttctcctcgcggtggcctctgcatttagggaggtcccgtgtgaagccgtggggtgccacgcatccccttcccgtggcctcaatgtggcttctctggcaccttcgttaccgacacagcactgcacccttcactcggtcatcagccaacctgcacctgcagcctgaagacgacatctcccctcagcttcccagggaatagagctgggctgggacagcagacaggtgccagccactccccttggtttcccgggaaacaaagctgggccgggatagcaggtgggtgctggccactttcctcggcttcccagggagacagagctgggttgggacagcaggcgggtgccagccactcccctcagcttcctgggaaacagagctgggctgggatagcagtagcaggcgcgtgccagcgaactctccttggcttcctgggagacaaagctgggccaggatagcagtagcaggcgggtgccagccactcccctcagcttccggggaaacaaagctgggccgggatagcagtagcaggcgggtgccgggccactctcctgggcttcccaggggaacagagctgggttgggttggaacagcaggcgggtgttggccacgcccctcggcttcccagggggaacagagctggaccgggacagcaggcagggtgccggccactctgcttcctcgaaaggccatcgctcgtgcagcctcccagctgtgctctgcgcaaggggctgtgtcacggggcacgtctagctctaaaccaccacataccatcaaattatggcctgtacataccatcctcaaaagccacaactgcatctaaatgcaataattcacttaacagctgggtttcaacatctggaaagaaatgaccttccagttcattcccctagtaggaccctaaacaaaactcaccacaccttccgtcaacacaagcctcagagcaaaccgagcttatggggccaagaggctgcagtcctgtggccacccacagccggcaagcctctggggactccgtgggaactgggctcagggctggcacgccatgcttgagtttctggctgccgttctgccccaataaatgccctggggcatcgtccacacaaactggctcctcactggctctccctactaaggggcctccaggtggagatgctcccaaccacccacttggatggacactttctcactttttcctgaaaacagactgaagcaaaagcgtccccactgaaccctcatccacccccacctgaaccttctcccgctggatctctgcccagcacccttcagcctcctctaagccagcacctcgagacctcaccaagtgccctctcccccaaaatcagcccctactcccctcaatcccatctcacttcaacctctttgagatggccccacctcaccagcctgtggccctgtcccaatctctgccgctgttttctgggcttgtccactggcccccagatcctaccctggaatgctctttgccaggtccaagtctgtcacctaagctgccacaagacgggcctgtccaacatgcagagctggccgtgatgcttcttcattccacagtcagaggccccgatagagcccctgccatcagggccaaggtctggctctgtggatgcagcccaggtgagcgggtttgcaccatcgggctctgttccttcgggacggcccttctcccataatgtcccgtgccaggctcgttcttccaggactcagctgggggcttgcctcctccagaaacttccttggccccaccaagtgggcaggtcccctgaggtcttaccgggcctgcctagagcttgtcctcccagtcccccgctatcctccagggcaggcactgtgccggctccactgttcgcttcttacagggccggccccacaggcgagcgaaggctggcgcaggacgagctctctcagctctgaggctgtagcttatatgcttttgcttctttttgcttctcagataaatttctacataggaaaatacttggatgcacttaaagagacataattgcttttagaaaagaaggtggcacggtctgtatgaaaacttcataaccctgacttcctcaggcaagaaacccagggaccagcgtggtgtgtgcagcgggtgccactcagcaatggtgaaaacagcagacatcaggcgctgcgactcctaaaacacacctgtctacaaaaggcagcaacagcagcaacacagcaacacagcttacggaaggaacgaacattcaagagcctcagccttcccgtcttacttgaaagtttggggaaagtgaaatagctttgcccagttgctcaatttcaaggctaatgccaattcgtgaagctatcacagttattgcttgagaagatccagtttcagagacatctttgataaacttcgtaatatcacagtggaatctaagctacgaaccacgggcatctggatgtggcgctcatccctgacggaagagtccccatgtccccgcgcacaggtgagggatgggttacagagcaccatcttcatcgtcatcgtcatctccctacaagcccccacccccagcggctcagactttactcagcaacttcaaagccgcgtctggcaccgggactggtttgaattaaggttcccttttctcctacgagtctccgggcctgaggagaaagtgccggctgcttctggatttcattaggggcaattttcttatcttttcttcgtcttaggcttgatcccctgaaaatgcaatgtggcaggcaacgggtctgaataacaaggtgctgcctggaaggcatgcattgtccccggggggcccccgtgggggagaagagcagaagaaaggggaaaaccaatttctgacccttcttccccatcatcggatgcccagggaaccataaattgtaaacttcaaagtgctattttacattaaaatcaataaaaaaaaaaccctgaaacaattttccttttcaaagatgctatttaagctttaaaaagttcacttgataaggtattatcacggacacacttggcaggagattaaagcacacgccaagagcaactcagaaaggcacgttcatcctaaaggctggctgggccggccggggcctggggagggggagtgaccctgacggcagacgcccattgctgctttgggcctgggcttgcccgccagcagggatgccacggggtgagggtttcaccccaggacccaagagccgaaggcaccactgagaaacgcctatggggtgagggtggctccatcaaaacctggcctgggaccactgacctgaaagagggcagcaccccctttctccccgtccaccaggaaagccctgccttctctctctgcacgggaatttggccacagtgggccctgggtcccccgggtggcaccagtgttcactcaggcaggaagtccatcaggcagcatgcacacctcttatggtggccagagactttgctttcagagaagcctccaaggggggccagttctctggggtgacaactaagtgaggggcaacgggagcacattccatgagcagatggtgacacgcccacgccaggggtccgatttcatatgagctcattttcggaagtggtacacattgggggacgtccttctctcttaaattaggcagggcatctgtcaacattacattaaatctgatcaagagtaagaagaaacatcaaaatcaaaccgatgagatcaggggaaaagtggttcaggtacagatcagggcaggtccactgaggagcagatgaactcccaccggcacagcccgggctcactgccggagcagccaagcagcctgggctccgtcagatggggtctgttccctctgggaaccactgagtgcctggggaggggggcccacgtgtcctgggccagggcctttatgttaccagatctcaacaacctttccaaggagggcaacggaccccagttagagaagagtgagcagacactgagaggggtctcgtgacttattcaccgtccccagaaagcatgtggtagagtccacacaagacgtttacacatgtccttgtgaagggcctcacctgccggagacgtgcatactcaggtgcacacgaagacatgtgcatgcaaagacacacaagcacacgtgtgtgtactcatatacagatgtgcacacacacacagagatatacacacaaagacgtgcatgcaaagacacacaagcacacgtgtgtactcatatacagatgtgcacacacagcgatatacacacaaagacatgtgcatgcaaagacaagcacatgggtgtgtcctcagagatatgcacacacacgtatactgcatgcacacagacatgcatccacacccacacagatgtgtgtaacacacataggcatggacacacacctgcagacatgcacatggctgtagacacctgcacaagcactgagagacatgcacacagatgaacacccacccacacagacacacacacagatgaacgaacacccacccacacagacacacacacacagatgaacaccgacccacacaaacacacacacgcacgtggacacacacatatgcagacgtgcactcacatccatacacagacacatgcacacacgtcacaaagacacgtctgcacacgtgcgttttatatgtatgtaaatcagaacaagaccatggagacagagaaagagaaaagcgctgaagactgtatggggctttgacaccatactgacagcgttttctaacagagacacggcatgtcaggctcagccacgctaataaaacccttctcctcacgtggctctgggaaccgatgtgggctgtgggctgctgccctggacgcccgtcactccaccacggcaggtgaagctgccattttaaaacgatgacaagaaaacctgcgctgctcagcatcccattttgggtcacaggaatgaccccaatctggcctagaccaaaggagaaggaaccgcttgatgacaaaagcaaacactgcgtctttaaacggcgcgccctgcggctaaatgctgaagggtcacagccacacgaaggaaatgggagggagggcgacaactgcctttgatttttaggaataaataaagaagaaatacttatttccattggacatcacatcacaggaggtttgcggaagaagaattaggagatcatgagaccctgcaggtctttgccttcgtttctcatgaacataacactctgcacaaaagtccctgcctctgtctccatcactctctcaccatcgacccaaagtgagctcctggttttatttcatgcacaaaagggagcactaagagctgatggtaagaagatagtcgccaagattccacgcttggcactgaagaatgaactgagacagctcctccggaccccacagccccgttcagccacagaccagtttcagacacgctcatctccaacaagtgcttcctggaatgtgtgcacagaggaaaagctgctacttcaggtgtcatgtgaagccgggaggctcacctgaaggccgccaagtactcagcgtctcccatgggggggtccaggccgccggtgaaagccatgttgacgttgaaacccacgccgggccctgtgcccacctgtggccagaaggagagaaacacacgtcatggaccccgagcgggacctgtctgacaggaacgcctgatgcaggtggcaccgggatgggctcggccttggtgggcccctggggagagcccacgtgtcctgatctcctggtgcatattcattaagacgcgtgtgaaggggccccactgacaggggcacactgacatcagcaagggggcccttttcctggctgctgtaggctctcgccgaccctgcccttggcacaccaaggccctgcactgacatttctgcggacccgccgccctgtgttgtgtgccgtgtgttacatcagggaatcagacctgggtctctctgggcagaaagtgtctccgatgagcctgtcatttcctacttcctctaaaaaaataatatccagaggcagacggagcgtcttcctggatgaaagccctgctgttggagcctctgttcagagtgggcaggctctgaacggggacctggggcgttgtcaaggagccgctgggcctgccgttcctggggccgccatgcagccccgcgccgggcaaaggacagtggacagagccccttgccggagggtgtcctgtggaagacagtggcctgggccctgcccggaggaaaacgggcaccacacacctcctccttcacaaacacctctgtctgcctggatgggaaccagaaacaatatccagcctctcatttgtacttcagacaaaacacaggccacctgtgcacacgcgatacgatgcaggctgacgtctgactgaagttactgtctgggcttaagtgagcacgaaggccgcactcactgctgccgggcagctgtggaccgtctgccccgtgcccccacagcggctccccgcagtccccctttccccccagaggcccttatataccccacctacctcatcaggagccccgctgcctgggaagaagttcccatcgtcgtagcggtggagggacatgtacaggacgctggggtcgctgtagaaagcctgctgggtcccgtttccatggtgcacgtccttaaagagcagggacaactacttcagggctgaggcaggtattggagggtggcctcccctgagggccgtccccaaccccagttgtgcttagtgacaacggctcctgctcaggaatgacattaccctccagctgggcccgtacccggcaggcgcgattctggggctgtgtgggtcagggctacgtggtgcagggtcgcaggggttctaagggccaatgttcgcgtctgcagcactgtttccctcgcccttagcgccatggcacaatcctgactccagcagccgatggggctggagttcagccaggcctagaggccaccatttcccagacgaagccatctgatcaatttcctacacctgccgtgtctctgacaagtgagccacttcctcagcctctgtcaggaaggaggtcactggctgtggcctgcccgcttgcaggcacgtgggaggtgccaattccatgccaggcagggcgttcggcaggagacaagtcccaggtgtccgtgagtgacaggcacacacagtacggggtccaggcccctgtgcccaaatggcaagcaccgtttcttaatcacaaaacccacaggtcagatgcagcagagagcacaggcagcctggggctttactgaccgtggctgttctgccccgggccacagggcaggtggtcaccaggatgggcgggcgagggggtggccccgctgagaacagctgtgtgcctgagaagacagcatgcagccctgatgttcccagcacgagaacttgctgctccgttatctgtgctcatcacagaaaaggcggaagggcagctacaggtgaggagcgatggacaagaaccttccaccccacagagtaggtaatcgctgtgaagacgcacatggaggctttcccgacatgtggcttcacactgagatgaccctgtccgcatggtgtgtacatgggcaatatcacagctcagcgcgcagggagcacgccacacagggtctacgcagcctgtctgcgtgtcctagcgcttcactcttttggggatgggtccccagtctttagccatcagcgacctcacactgctctcttcccaggcactcctacctgctcccttaggaggagctgagggagggctcccggctcgcaggtccttgggtgtgggggacccgctgctctgccgcatcccctgacctgcctctccgaaacagcatggctgtcctggctgtgccatattgtttctttacccaaactcagaaggacttctccaattcaaatcataaccctacctgacagggcctgcttttttcccttaaaaattatgaaataaatcataaataccaaagagaacactaaatatgtatatatctggctttaaaaagagtaataagatgaatatcttgaatattaatttccggtataagaatgagtatacctattcgtggaattcagattcggacatcatatagcattatttaaaaagagatgactcttttgggggcagtggcaccccccattccagcaggaccaggtgcccacacagcagcaggaaggcacgggcttcactggggtgactgagaagcagactgccgccttcgaccagggtgagggtcctcccaggctcccaggccacacacgcaaagtagatgtggacacagcctcctccccaacacctgtcttccaagaagatctcgtcgagggtggccctggccgctgccgtcacccacaggcacatttttagacacgccaggaccccattcgccagggtcggctgacggaagctgtacaatgacttgtagcaggtttggggctttacttctccgcatctttgagaccgtttccagaaacctaagcttcccacatccaagagcccagctcctctgtccacacgctgctgtccgctcggggacggcaaaggagcaacctgagctgcgctggccaaggcggctctgcttacccagtccacgatgaggatcttgctcacgctcaacctctgctgcagaagcttggctgccacggccacggagttgaagtagcaaaagcccctgcgggagagaactgacgctggagacgaagcgcaggtgggcggtggccagtttctccacggcccgccagagagccactcggggtccacgcagacctaagaggtctctgtgagtgcagagctcctgaatacgtcgcagggaaccctcagtgatgccggagaatcggttaacagacagacacgtacacaccccacatgcagacacactcacacgcgtgcgcgcgcacacacacacacacacacacacagctcccaaacaagccactggggaatcttagccaatgccatagggtcggctaaccgacacggacatgcacacaccccacacagacacacacaccacagacagagacacacacacaccccccacagacacacacaccacagacagagacacacgtacaccccacacagacacacacaccacagagacacaccctcccacacagacacacacaccatgcaacacgccctacacacatacatgccccacagatacgcccatacaccacagacacacaccccacacacactccacacagacacacaccccacacacaccccacaccccacagatagagacacacacaccatgcaaacgccctacacacatatatgccccacagatacgcccatacccaccccccccacgtagacacacatgcacagatacacatgaacaccccatacagaaacactcacacacacacaaaccacagacacatacaagcacacacacacatatacacataagcatatacctatcacacacatccacagttccatactgagacagacagacacacacacacacacacacacacacacacactctcctgcttggaggtcccccacgctcctctggtagggaaccctatttcacatgttaccaacatttccctcatcttcacctggaacccttcctctcaggagctgccgccacgccccaggagacatggcagccgttcatctcagttgcttcctgctgaccttcctatattccaatacataaattacctttaattttagagagtcttactcaagagaccaagaaaacaagctatgaaagtgattcaaataacaacgaaaaccttcttgatctcaaattccctttgtccgaatgaccacagaaacggagaaacactagttgttttgttttcagaatccgggctggcatggggaagcccacacgccccaggacatcctagacgctgagctcctgcagcggctcacggggagcacagcgaagagctgcaacaaaacacaattcgtttgtctcctctgaggtttattatttggaatatccaacaactcaggttcaaattagaaaagaaacttcagagaaatgaaacaaacaggaagcctggtgcccaagtgactgttctgggatgtggagcaaacacgtggttttcaggtaaagctacaaagattccaacaagcatccctccctggcggttacaatctcctccctgtacacgaaggacactctgctctaacacgcggatctgactatctctcacgtacaatctcctccctgtacatgaaggagactctgctctaacacgcggatctgactatctctcacgtacaatctcctccctgtacacgaaggagactctgctctaacatgcggatctgactatctctcacgtacagtctcctccctgtacacgaaggagactctgctctaacacgcggatctgactatctcgcacgtacagtctcttccctgtacacgaaggagactctgctctaacacgcggatctgactatctctcacgtacagtctcctccctgcacatgaaggagactctgctctaacacgcggatctgactatctcgcacgtagtctcttccctgtacacgaaggagactctgctctaacacgcggatctgactatctcgcacgtacagtctcttccctgtacacgaaggagactctgctctaacacgcggatctgactatctctcacgtacagtctcctccctgcacatgaaggagactctgctctaacacgcggatctgactatctcgcacgtagtctcttccctgtacacgaaggagactctgctctaacacgcggatctgactatctcgcacgtacagtctcctccctgtacatgaaggagaatctgctctaacacgcggatctgactatctctcacgtacagtctcctccccgtacatgaaggagaatctgctctaacacgcggatctgactgtctctcacgtacaatctcttccctgcacacgaaggagactctgctctaacatgtggatctgactatctctcacgtacagtctcctccctgtacgtgaaggagattctgctctaacacgcggatctgactatctctcacgtcctgccggcccctccgtggacgcctgacttcccaggggtgacagggaggccctttcccgggcccctgcggttctgtcttgttctgactgcttcctggccacagcctgatagtgaacttgtatctgcacttgttcttgcgttgccatctgacaaactgctgctccaactctccaaggcagagccctatgccacctcctcctcaccgaagctggcaagatcaggcacgccttctccatctccagagcatggggagacgctctttctagcaccacccctcctcactagagcggctaccgtcccaggagacagcatgctctttgacgggatagatcattcattcaccacccaggctgcaaggcactccacagacagctgcgggtctgtcctgccactggctctggacacacagggatggatccgggaggacccacaccccacactcgccaccctgcccagatcctcagctgtatggaccgtcggcagtctctgaaagacccgaaacagcatcaggatagctgcctgcatggacgtggctctgtggcttgctgcgtcagtaccaggcattcggcaggcagctaaaaggccatgcgcaaaatgacctgagtcctctagacaagcaagtgctgcagtgactcacttgagggtgagtggtgtttcctctcccaagtgttgacaactactcaacaaccagaggcttctctggactaacctccacagaccctttcccatcctttcctctgatctgtctccgtcataaccgagcagtgatgctcgcagactttggcatctgcactccacacccaggagctggagccaagccggcatgcggcacatcctgggtggccagcaaacagcagcccagctccccgcagtcactcacacacccacccagccctaagggagggaaggaagacctgggttcccctgctgtgcggggctgcggcgtgtactcacatgggcgtgctctcctccgcatggtgtccaggggggcggaccacagcaaagccattctgcaggtgacaccagacagccaggagagagcaacaaaagacacactttgtagccacgggaaaatggttgcacactcaacttttagcagagttgggctacacaggaggacagtttcttgctgcaccctggccacagtgatggggacaggatgcagggccagctgggagcctttccgggaagcctgggcccttctcctaaagaggtctgggggctactaatggttcccccgaaacgcagtcactaggataacaggtgggtgcctgcccactctcagaactgtcggtgaggcgtggtgcccttggctcaggggtcggggtgatgtggaaaggatgtgctcactccccgtcggctcgggaccaggacccgctaggtggccactggaggaagatgaagcagaaggggccccactcaaggacttggccgcggggcagagacgttgtgtcccagcttggccttcacgtgactgcctctgtccttactgcagttcagctctcaggatggcgggcaagtgggcagcccacgaaacagctcctctcacactgggcagaaacgctgtcctctgccccatcacttctgcgtcaaaaatccatctgcaaaccactctgtagttgctgccataaaaatggattccagtcctctcctggtctcaccagcaacaggacactgtgtggtcaaggtctgtaatgaagcctcaaaaaaagtgccggccaaccatgagtgacaatgccatggacggggtgagccggacgccgcagggaccaggctcaggaaggggcgagggcagcccatgaggtggcggcaaacgctctcaagaggccctggcctccctgcgtttctgcactcagtgcttccgagtgtaggctgcagacccctcggtcccgacccctgctgagggtctgtagtccacgtagtcctgaggctctatgtactcttttcactgccctgacacctgcgccgatggtgctgaagcaccggagggtagacggcgggcagggaacagcaccagggcgtgtgtgtgtgtgtgagcagcttctcttaacaatgtgctcgatgaagcagtattcagacattttagtagatctccgccctcaaacacgtccttttaacatcccgagtaaagagacgggaaggaagcgtgagaaactgtgagctttccagtgaaaattacaagtttggaacacacggctctgcccctgtgagcctgctggctctctcactacttataagacttctggtgagatgggggtgatattaatggtttcaaaaattaatgacttttttgatactgtatgggtcagaatatggaagatccatgtaactccgtgaagctaagtttccaaatgaccaacgcacggtgctaccaatcacccatgaacgaaggatcgatttgatctccaagaagggctaatggttcagttaaacaaaacggagggggaggaggccacgatttgatttcagatccacactgcagctaattttcaagacactaccacttgctgaatttttggtatactgtcaaagaatacccacaattagaatacctctgaaaagtctattaaaatcctgctcccatttccaattacgtatctgtgtggggccaggattccttcatgtacttcaacatgtcccaagaatgacgccgggcaggtgtgagaaccagctgctgtccacaggcaagacattagtgctatttttatttttttattactttttaattttttagttttttttgagacggagtctcactctgtcacccaggctggagtgcaatggcgtgactcggctcgccgcaacctccacctcccaggttcaagcgattcgccagcctcagcctcccaagtagctgggattataggcatgcgccaccatgcccagctaatttttgtatttcagtagagaaggagtttcgccaagttagccaagctgctcttgaactcctgacctcaggtgatccccctgccttggcctcccaaagtgctgggattacaggtgtgagccactgtgcccggtcgctatttttaaattaataaacattttgaaaatttctcagttgtaatctctaatagagtcaatattgtggatataactcatgtaaacagaagctctttggagctttttttttttttttaagagtataaatttttaagagtataaagggttcttaagacccaaatcattgagaatctctgtactatgcacataccctatcacaaatgtgggcaatgtctctttgattcaatagcgaggctgtgctgacagagtggggtccacgcctccccatcacagccgcctcccagcctgatgagagggagacggagtgggcggcccctccccacactgggaatctatggcaggcctcctggagggccaccactgtccaggccccgactgaccttcagctcccctgtggccaccttgaagaccagctctaccacgcagcccacagccaggcgggctgcccccgccgagtgcacctcgttccatatggtgtcactgtccacctgtggaaacaacaccccacagtgaggtcaccctcccaggccaccgtcatcaccagccctggctgggcagagcagctcaggttccgtgggctctgcttctgaaaccccagggcctaccagagccagggcagctgcagcccacgttcagccttcaatctttttaagacatgccaaaaagtttaaacaggaaaatacaagagaatttaccagaagaaagatgcatgtgtcctgacctgttctgaggcatcctcctttccctcaattgcttcagtatacttccatctaaaagtaatgatgtcaaggtgatctatttccttttttttttttttttttttaactggaactgtagttaagagagttattcagcttgagtatctctgatctgagaatctgaaatccgaaatactacaaaagcattttgtaggctgaggcgggaagatcacttgagcccaggaggtcgaggccgcagtgagccatgaatgcacctctgcactccagtctgggtaacacagtgaggctctgtctccaaaaaggaaaaaaaaaaaactggaaactttttgagcgcttacgtgacgctcaaaggaaatgcactctggagcattctggatttcagatttttggattagggatgctgaactggtaagtacaatgcaaatattccaaaatctgaaaaacaccaaactctgaaatacttctggccccaagcatttcggataagggatagtcgacctgtcaaataattagcagcaaaatgaaatgtaaggggaatcacgaccagtctcttccaatagtgactttctcctgtgccgagtttaactggaagctccacatgttgaccagcgtagctaagcgggactggccgtgtgggcgggtgaggagagctgccctgctctgccctagtgacggtacacggctctgcctggacaccagcaagtcagcccgctggccttttccacttcagacagaaaacgtgtttcacacaaacacgtcaacaatccccgattgtgtgttggctcatttatttatttaggcacaccagaaatttcttacagccctggctcaattcaggaggaaagtcgacagacagagacctggacagccagttctgcacagagcagtctcctatgggagtctggccaggggagggaggtgttaagatgaaatacacagcccttgggctggccccagggaacctgagcatctgtccccaagtgtgtcccttgcctgcaagctgctgtggggtaacacaccggggacttgggggtgcccagcccggtggaggtcttagaagccgtgtcataggttgctcagcttccacacggtgctgaccagggcgattgcaggtccattgcaggacgcctccttctcaaactgagcccctctgagcgccgagtgctttggggctcctaagcaggagccaggcgtgtccaccctgcctctcccttccccagaccaggccctcgagggctcctgtccaccaccaggcagacttgccacttgatagacaccgctcattatgtggggagggaggatttctttccaggcggtcttgaagcttcatcatcaaagcaaggtgagttaaaatgcattttcaaggggctgaagacatttcctgaagtgtattcggtgatggttttcttttcaaaaaattagccagatgtgggccgggcgcagtggctcatgcctgtaatcccagcactttgggaggctgaggtgggcggatcacaaggtcaggagatcgagaccatcctggctaacacggtgaaaccccgtctctactaaaaatacaaaaaaaaaaaaaaaaattagccaggtgccgtggtgggcgcctgtagtcccagctacacgggaggctagggcaggagaatggcgtgaacccgggaggcggagcttgcagtgagccgagatcgcgccactgcactccagcctgggcgacagagccagactccgtctcaaaaacaaacaaacaaaaattagccagatgtggtggcctgggcctgtagtccccacaactcaggacgctgaggcgggaagatcacttgagcccaggaggtcgaggctgcagttagccatgaatgcaccgctgcactccagtctgggtaacagactgaagctctgtctccaaagaggaaaaaaaaaaaaaaaaaaatccaaggtgacatcgcaggagtgagagctgggcagggcaagattctgccacctgctctgtgtcagccagcagaggcggggtcccagacaggccaggccccgaggctgcccctgtggggacagcacccagagatggtttctctccaacatacaatgaactaggctttgggattaggccaacactgcagggagcggagggtgtactacacccgtgttctgaagggtcttctggggattctgcacacctggggtgccaaggagctgctcggtctaccaggtgcctgtgtctgtgccccctcccatgggaccctggggttcagaagcttctggagtcttgcacagagtgaaggacaaagccccagccaaactgcaggaccccagtccccagagaactcaagagaccctccttcgcctgcttcaggaccacggctccagctcccagggaccagcctggagctccaggcctcttgcagggagcctggctcaggcgtgcagcgccaccactgagcaatagcctggctcagggcaggcggccgcaactgctaatgcaggaaggagcaaatggctcactctgtgtttcgtttctttttttttttgttttcttttcctttctttctctctctctcgcttctctcctctccttttctctctctttcgcaataaagacaggaaaaaggcggggggaaacatggagaaagcttcccacggataatcccatggagtctaaaagggacatgccgagggctggcagggctgggaggcctttgggaagctcagaggagccgcggggagccgggcgtacgagagcaggccaggactccgctgggcgaggccgagcagggacaccagctcctcacccagttgaaacttgcggtcactggagaggagcaacgcaggagctgatctggtttgaaaaagaggtcaaagcactttacagctcccatttcccagcgccgaggagtggtgagttttccgtgttccaagccccactgttctgcctccgggagagtttgcagctgctttcggggaaggtggctggctctgctcacctgctctgccctccctgacaagagcacctgctgtgtgcccacacttcggctcccgaggtctactttgctcctcctgacaccccaggaggctggcccctcctggctctggaggagacatgaggctcaggagagctgcatctgtgccagcgacagcaggtgcatcccacaccagggcaggggtctgcaccggcctcctgtctgtcttcttccttttggaaaacaatgggaagaaaacacatcctgccggtggctgtacctcaggaagccccacggcctgcactgttccctgcccatgccaacaggctaccctctctgcccgcgtccacgtggggagcttttccatcagcatctgcacacccagacgtgagggtgcagctctcatctgctgtgcctcagatctggatttaacacttgggaggggctgctgggctcaccccctcagctctgagtctgcacttagctttcatttgcaaatgataaattctgccttgcacaggcgtgctggctgcagggcagtgcaaattcaatccttttcaagtctggccaaaaacatgccccaaattaagagattgcagcctatttacaatacaaaataaaataactctaggagggcttggtggtggtatgaataaatgccgtttattctctttctgacgggataattttcaaagcagtgatttttataaaaactcaggaagaaaacaattttgtttcatttccataacagaatccagaccttgagcttcaccctgcgatcagtgattacacacacactgcaccgtttcggctgcagcggctcctgctgtccaccggctcccgtcctccctgcctgtaaccgtctgtggtgattcgcggcactgcaggaccatgatggcccggatctgctcggacgctccgcctcagcttctcatggccgccctcgctattgccacccctgcccaggctgcatcaaggaggtcaggggccaggggagaactcttttgttattgagaagtttgattgcaagacctgacccttcctgtgtggacggatgggcagatgcccagactggaaagtccttgtgaacttatgcgcccaggccaggtccatatcatcagctcgtagaagccagcacagcccagtgattcatatgcccaggccaggtccatatcatcagttcgtagaagctggcacagaccagtgattcatatgcccaggccaggtccatatcatcagctcacagaagccagcacagcccagcgagtagccctacagactccacgtggcccatgagtatcacggtcactgcactgggagccccacctgtagcttcgggtggaaactaggtacagaatacagaagcacgcatcctacccgcaccatactcgtggcctgatgtgagcagattactgccacagacttcgaaggggatgagatgctggctgcatacaggatcctgtttcttaaagcgagagccactgcaccccagagccccagccacctgcgccagacaaccttccccagagaaaggtgcccgagtcggcgatcaaaacgctctcggctcacacggcctttgaagccgcacatgggcagcccctgcgtatggaaaacacctggcagcaattattcactttgagggaagcaaggctgcgatttctgtgaccactgggactcgagaagaaacaggacattatttacacattaaaggaacacttaccccaacaccaccgcaagggagccggacgaacacggaggcgagcgagcctgtgggggggagggagacggtcagagaggccaagggcacgcggccaaggtgctcgacaggccctgggcgcactccggggtcttcagtggcacttgggcatttgtgggacaacgaggggccactgctcccccttgtgacaccctgtggccctgctgcagggtcagtgtctggcccttagaggtgccttgactcctgtgagggctgagctgggtcacagaccctggtggggacacctcaaattgttgtggcatcagcctgtcaggggcccaggagaggcaccaagccactggggagcacgaggtacccctggtgggcgtctgcctgcagcccgtgcccctgaggggctgtatctaacagcaaatcctgctccaggaccccgagcctggctcctcagtgagctcctagggcttgtctagcagccccctcccatggcaaacaaggggcaagtcccgggattaaacatgggtcctgaggcctcttagaccctgagatcctcgggaatgtatgcagcgacagcccctccctgcgacacaggcggagcgtgtacagctgactgagggctccaaggacgctgcagctgcacgccaggcctcctcccatggaaatcggggccctcgaaacccccaccccactgctctggcacccgcgcctgctccggcagtgaaagtgctcccaggacaggggtgctgtctttttcctgtttgacccagtgctggctgaatgcacgtcaccagcttaaaacccatctgtggaggacaagagacccccactaaccaggggcgggacctaccattcctagcggctgcctgggccccaatccctcactctccgcagcccccggccccttcctgggctggagctggagtgacatctcacatgctccagggagactggcttgatgtaacaggctcctttatccaacgtgggaccccactttctggcctcagctgggctgtaccccccgctgtggggctcctctcccattctcagcctgctccagaacagtagcctccactctgtgtgctctggtccacgctcctagggctggctgccgggggccataggaaggagttggccataggtccattagggcctgtctgcctcttgcctggagggcttgccggcccggttagcacgagaggaacccttcctcagggaacagcgtgcctggctgggaagagcaactgcgatggccccaagctgcaggagagtggctggcacagacgagaagctaaacagaggcctgcttgccttagcccacggatgcccgcaccccctacggacgcccacaccccaccgacagatgcctgcaaccccccccgacacctgcaacctccccacagacgcctgcaccatcaccccaccacggacgactgcacccccatcaccccaccacggatgactgcaccctccccatggatgcccgccccccgccccgcccccatggacacccacaccccccatggacgccagtaccccccacggatgcccacgccccccacagacgcctacaccccccacgaacacctgcaccccccacgaacacctgcaccccccacggatgccagcacctcccatggatgccagcatcccccactgatgcccaccccccccatggacgccagcaccccccacagacacccaccccaccccacggacaccagcaccccccacggacatccacacggacaccagcaccccccacagacacccacatgtcccacagacagccacagccaggccctagtgtgaggcccgatgcacagagctgactcaggctcttctcactctgtggaggtcacagatctgcatcaaggccggaggcttgtagaatggccacgtccacggcccggggctggggagctgccatgccaacagggagcagggcaggaggcaggaggcagggggcagcagctgcagccactttcagaaggggctcaggggctcccaggccccccaggcaaagggaggataggcccggcccccatctgctaggagggcccggccagctgaggggcgcaggcgccatgcagatgctgtgacgttttccagacaaaggcctacgtgctcggaggagccagcctgtgtcggagggagcccgcgctcctctccacctggcctggctccaagggcagggtctgtgcccgccttgtccctcctccctgcctgggctgtacaaggcattgagccagcaggggcttcagtcggccctggctctccctgcagcgctcagcaggcatgcctcggcctctgggtcctggccctcacgcccactgagggcagcagcaccagcatgcctccccttcctgggcgctgtcctgggcctacttcctccgtgtccatggctcacggacccgccactgcctggagtcgtggctcctgaccctggttcccgtgtccacatgtcagcgtggcacatgggacaacatcagctaacacttctcgcctgaacctcatggtggtcagccctcatccccgcaggcatgttggccctgctctcctctgtgccttggtgacagcaagtagtggacgtggggctgaccatgcggggaagcggcctgcacgccggacccctttgggaggtgctggggctgggcaggagctggcgggatgtggtgggcaagagagctagtgcgcaggtggaacgagactgaaaaaggaggagggcgtgggtgccaaggtgccaagccacctgctgtcctgcttgctgcccgtcgtctgtagtggggtcacctaatgccaacctcaccacagtgggcgggtgctgccttggaagggcggtcatggccttggtgagtggctgagtagctggggctgggagtggctccgtgggccacgtccttccatcactgactactccaacgcacgggaaagacactgccagaaactagggagctcgttttccaaataatgcacgcgctcagctatatgaattcacagtagacacacgtgtccaggtatctgcaagagactgaatctctttgaaatcatagccaaccatgtctacattaaaaccacaagtcatccgactgttttgagtttgctcattatctagcaaagaccaaaacaacaaagaaaaagtacacgattatgcatccaaatgcatgcgtataggaatggagttataggcagagttttggtgacagttgtgaggagcccagcggcctcctgtggtttggagccacaatcaccaagcccaggccacgaaacgttccagcctggtgacagggcctgaagctctgcaaacgaccagccttactacttgtctgtttgccgcgggctggcagacaggcgttctgtgcctggggcagggaaggctcggctccagccatcctctcgctgctgctcctgctccctggctgggaggaggccctcgctgtgccaagtcattttcctgccgcaccctaccctgagcatcaccggcacccactcgccaggggcccagctctgcccggatgcagcaccctgccagctgacatgagcagatgagccacgtgactttcagtgacgcctagggcagcggccagcctgcctcaggcccacgagccaattcagccacgccttatgtgtggcatctcaccacatcagaaaggaaatatgaaggcccttgcacacggcttagcggcttgtggattccattaaaagaggaaagaaaaaaaatcacacagtagtgtttaaacacctcattagggttatgttcacaaaactcaagataatcatcagctattaccatgtctgaaatacttagactgatgataatgaagtttctgggttaggacaattgtcggaaattcaaaaatcgatcttgagttgtgagaaggtaatgggagaggcatcctcacaggaatgtgaacagattttaaagcacaaagctttccaggaaagaacaagaaatagaatgatcaaccttcctgtaaacaaaagaaactgactagaatggttgccttcggagaacaggaatggtgcaaagggatgctgcagagacacttcaataaagaaaccaaaaacaagaaaggggtcttcctttttgatcatctctcttaaactttgtttgaaactagcttagaaacctaagcaaggtggtggagctaagcctgccttcatccttctgctggtggagctggtcctgcctccatcctccgcccactgaattccacaggtttgaaagactgaaggtggtaggggatggaccaacagccggtcctttgaaaatggatgaaggtgtcaggagcagccgccattctgaaaggcgtggaggtgggcgcacagaactgcgtgtgtgcaggacacggcctgatgagctgatgctttgaggctgctcagcaactcccacgcctgctgaagcccctgctgtggcagccccggtgacatcgaggcaaagatcttgtcccctcatggggcccacaggcagcccctcccatgctggagaacccggccagaagctgaggtgttacatggggaggcagtgacgtttcctggtaaggactggagaatcctgagggacagcacactctagcctcagtgcctcgatgcatggcctttgtccacccagctcccggacagaaagccgcctgccctctctgccgcccttgccctctagggctcccttccccagccccagcggtgctccccgcctccgctaggtactccacaatccatgcgccatcttctccccaaggagcgcgtgcccccttcctaggggtagctgcatcagcttctccctgcagggcgatctcagacttcctggccgccaccctctcacagaccacccagtagaggccggcctccatgatgggcctcccaatgttcttttgccctgggacagcgtgtcctccggtggcttcctgaggaagaacagctggagggtgaaagctctggcccttgcatgcctggaatgcctctgtgccaccttcctactcacccggcagtttggcgggacacaaacttcaggagggcaatgaggcgcccttaaaactggcatggccgcaggccccatggagtctgcaggtgccctggctctcacctgtccctgcattctgaggctctgctgtttctccctaagagggtctttcttacccctggtgggtccctgcagcccagagactctgcctttggcctggggccttctgaattccagacacctcctcctggcctctgccttccctgggaactcctgctgtttggaccctgcacactgcagtgagctttggccttcttctccatcatctcacttcccagtttcccagagctgtcacgttttgctccagtttctgggagatgacatcaccgtatcttccagtctgaggaggattttctttttctgcggtcaggtgtttaatttttgtcttctctgaacgttctgtgctttccccttttccactgaacttgtccacgttacgtggatgtggcatcctctctgagggtgctaatggcagctgggttagtgcctcacactgtctgcccccagcctccttcccctgtgtggctccagctccaggtccctgtccagccgttcctcgggccctgggtcctccttggttgtccgctcctaagggggaagtgccaacggctgggtggaagctctgggcccacagggggtgattagccgtgagtgccagcataagggatctcaggggctatttgttgggaacccctgatgtcagcttctttggggctggtcaaatccacagaggggtctcctgtctgcttggacggtaaaggtcagcatgctggcagcccagtggggaggggtaggggcttggcatccatgccctcatctagagcagctgtctccagtccaggaagcccctgtcttccaccgtcccttccagagggacggtggaagggtgctgtaccccttctagagcagcagcaggcgaagccgctgtgtagggagtcggggcccagaggcctttccaccagctttggcccaggcccttgactgagtgcctccctgagtccatagcctctgcagttgctgagcctgagctgtcggagtctgtggggtgggtcggtggcccttgtccccggcactagctcaggatccacctcgtgaacctgctcagccacaccccggcccacctgcttcctactgctgttcactcccttctcactttccccaaacttgaggcttctgtccttttagaagcctccataccacagggcaggggggactccggaagcagcgtgaccgccaccccaggccagagcccatgcgtgtcctcacagccctactggctccatggtctgtgaccccgtctgtacctacagggcatccagtacagaaggtgccctcggcgagtggatgaaggcgtgagcgagtgagtgagtgaacgcatgaaggactaggagtgcaggtctctgtgaggctgagtctgccgggcacaggcctggcacggaggacacctcctgcaacgtgtgccctgccaaatgcagtcaacgagccaggcacggcccaccctctccttgcccctgcaacccctgcgttcatggttcctagttctccctctctgccttcctagggtcctgctcagggaagagccaatatgctcttcccagggcaaaggcacagaagatggggaagaaaaccagtgggcagtgactgtcctggttcagggtggctgggaggcagggaaagacgttatcgaggaacaaagggagccctgggatcccccatccccaggtccgtgttctgtgccctgggatcccctggccctcggtctgggttctgtgccctggaagcccccgaccctgggtctgggttctgtgtcctgggagcccccggccccgggtccgggttctgtgccctggacacccccggccccgggtctgggttctgtgccctgggagcccccggccccgggtctgtgttctgtgccctggacgctccccgcccagggtctgggttctgtgtcctgggagcccccagccctgggtccacgttctgtgccctggaagcccccggccccgggtccacgttctgtgccctggaagcccccggccccgggtccacgttctgtgccctggaagcccccggcccggggtccacgttctgtgccctggaagcccccggcccggggtctgggttctgcgccctggaagcccccggccccacgtctgggttctgtggcctgggaacactggaagccccatggagctggctgggagttcacctgcctctgctgaagatccctgtggaaagcctctcaccagctccccgggcagaggatgcccattagaaagttctctccatgaggctaaaattcccctccaccacctgtgcaggtgctttcagccagagccaagacaccagcagcctttcacccctaagcagtggacactccctaggcctcctcctggtcttgctctgatgggccttaaagcggagctcaaaacaacttcaggctccctgcagggcagggcgggcagcatgctggctgtgttcctaatcagcctctcaaacctaaactctgattcaagatgcttctaaaccaacggttctcagcccagtttttacacaaacacacctgctacctggcacgttcatcaacaaccagtggcttgtgaacagagggtgaaaggttccctttcaggccctttaccttataacctggcaggcgacacccacaggtgccccagacacaaggggttgagagctggaaacacaacctcaggggacttcaaacccaatatgggaggaaaggaaggtcctgaaatacctagaagtttcttactgtccagtttctgccggttgagggggttcgtgccatacaggagggtgtgggcttccgagtgcaccgtctgtagctcctccagggtggccttgcgtccgcggatgcactgtggggacaggcgagaggacactcacacgttctgcagaagctgctgcttcagctccacagacagaaactccaactgaaaccattgcccaaaaggaaacttaatttgatacaaaaacaagcatgttatttggttactgcaaaagaagaagcaacatcacccaacgtgatattttaaaatatttaagaaatattttagagggcttacacttaattatagctttgaaaaaacactttaaaagataattccagccttcaatgcattacccttcactgtcgcacgaatgacttggcatcaaattattactttgctttccagctgccagggtctggtcttaaaatagaggtgagctgctgagctccctcacgttcaagggaaaccccagccgcgctcccggagtctctgagccccaggatgaagcagccttccttggaccgcccggggccacagctgccagggtctggcatctgtcctggatggctagctggcatccggctgcgtctctctgaggtttggaaattcttcagattgagatccctgggctaattcagattttctccagaaattcacaggaaaattagtgttctttagttgagctacatttatttagccttttaaaggggacgatggctttggacatgagattcgagttaacatttcacatggaaatggctctcagagggttaggccaccacaggatgagtcagacgccactcaggtggccccggttgtggctgttacctgcttcccccaggcctgagcaggatctgctctctccctcccgactgcagccctgccccagcatccgctgagctcctgcaggcctcggtgtccaccctgtatgtgagacctgtggtgggcgaagctcgagggctctctatgccagcccagcacctggggctcctctcagaccaccaggagccgtagcacacagccttcctgcaggacgcattgcacctgggggtcctgtccatgcagggtggaggaagaaggggcggagccaagaactcagtccccgcccacaggggagagacctccagagggcaggtgcgctgggcagggacggatgctctgcgggttctcttctcatgaacaacaattccacaaaaccgggcttcctctatgaaggtctcttgtttaacaaagaaaagatgtgacacggcttccggtggtaaaaaacgactctatggtcccatccacataacctagtgctgcttctactttggggacataagtcacatgtccctggaaagccaggcaggagggacgtactctctgggtaggggtcagggtgcagttggggccctgggcggctgcgggggcttctaatttattttattttattttttttgaaacggagtttcgctcgttgcccaggctggagtgcaatggcgcaatcttggctcactgtaacctccatctcccgggttcaagtgattctcctgcctcagcctcctgagtagctgggattataggtgcccaccatcacacctggctaatttttgtatttttatcagacatggagttttgccatgttgttccaggctggtcttgaactcctgacctcatgtgatccacccgccacggcctcccaaagtgctggtattacaggagtgagccaccgcacctggccagggcttctcatttctaatgacttcaggaagcccacatgtgtgtacaggcacaggcagctgtggccagggccaagttccctctggacagacgggcctaggcagcccacgcttgggaaggtccccgtaggggaccacaggctgtgccctgcggtgccaagaggcaggtcatgtagtgtggactttgggtgaaagaacggcagggtagccatgtgtgtcctccccactcaaaagcgacccactggataagagactgaattgcagaaagagagatctgacgttagaccacaaatgaaattcacaaattaaagttgatgttagaataaggcaaagaagaaaagtagaaaaaccctctccttacaaacacatgaaatggacacagaaaagacacaggatcaaagccccaaaagctctgcgacaccgcgacggctggggctgcaggtgcgcgacaccgcaagggctcgggctgtgcgtgcgggacaccgcgatggctcaggctgtagcgtgcaatattgtgacggctcagactgagcacctgagaggcttttccagagccactctgggagcggtggtgatggtggccccttcctgctttcttgggaggctgacctcgttatttctgtctccctttaattcctaggataagacagaaggagtctttgctccttacagcaaacacaggcttggggcagggtgcaaatcccagtggtggccctggtctctgtggcatctgacttccagcccacccacttctcctctccttcctggacaccgtgcctggaggcaggacaaaccaagctgggcaagcaaattggccaggagctgttctggctcccgggaagcctctgcaggagggcggggcccgcacacacacatggctatactcagaggacccccgactgctcagaacgtgtgaggcagcttcccaaggcctgctctggagtgaggcagggagcgagacagctgcactgggagccacgtcttgctgggccggcctgccagtatcgacagggtcccaagcttgcagaaagtatctcccagcccactctcatccttcctcaccacgcgaagccaactcagcagtgtgaggggagggcctcaccccccaggcctccaggcagtcgtctacccagagaaggggtgctgactctgaggccctgccctcgggcctgggcttcggtcttgctgtggcctccaagtggtccgcggactggggaagtcacagccccatccaccccatcttctcctatcgggtacccactctaaccatgccccgtacccatggcccctctgctcggccatctcaggaggccagtgacccctggcaggctggcactggaagtctggtgggtgacgtcacgtccccctgggctgagttagcacactgctcgctctgaacctggaggggcacccgcactggagagctgccccacgtgtgggagcaaggcactgctgtccagggagtatggcctccaccgcctctgtggctgtctcccagccacctgtctttctccagctctcctctccctgagatcctgccaggctcaggtcttgtcccacagccccaacacctggggaccctctgccagcccctggcccagtcgtggctggcaccttcacccatggtgctgaggacaggcagaggagccgagggcgggcggaggagctgagggcgggcggaggagcgggctgtttcttccagggtctttgctttctcactcctccctcccttgcttgcatttgctttgcttttctggctgagagaccctctcccaatcccctggcctcagcggaacctcctgggggtgggggcacatgtaggggagggacaaggaagcaggttatggagctctggaagcctcaggaggccttgggcagtccccagaaggggcagcaggacagctgtctggtcctgtggagggaagggacgtggggaaggagtttcctgcagccagtgtctgctgggcaatgctgccctccagtggcacagccgtcctgaccagatccctgaagcaggtgccaagagcctctacagtggctcctccccgccttcctcctccctcctcccagagggcactgcaggagagggtcctgggcctgacttttagagaattcccccctgaaaattatgtatcaccaataaaactggtaaaggaaacggggggtaagatgaggcacagattaaaagttcacaaatatcccagcttctaaaggagggcaggcgaacctgcagggcgggaccctgcagaaactaagccaggagaccagaggccctccgtgccacgccagctccacgtgctcactcatctctgccacagccacttgggccctgggctgtcgggtgtccaggactgttggaggggtgggtgtggatgttcctgtccaccctgtgcgctatctgtaggatggtgggattcctggtgtggggagtggacatagcaggtctctactggtgggccctggcatgggtggggccttgtgcgaccctgcacagtgttgccagcccctctctacagacaaagaaatggaaatttgtccaaggtcaccagctcccagacgggagtctcttctcttcctgccctcgctatcagcagggcctggccacaccctcctccctgtcaagagctcaagatcccctgtgacagctgcctccagggtgaagagcaccagctgggacagcctcaccaaagtgcggcccccgtcctgccctcaggtgttaatcggctgatccttcttgcctccttgggcctgggagtccactgcagccagattcggggcagggctctggttcctatcaggaggcggggccgggccctccttgtatgagaacaagtgaggccgctgccatcgcctggcggccagggaaactgaggcacagccagagctgcagcatccccgaagcctcctcgtgtgactcagccacataagggagctgaattcaaaccaggccagggccctgcctgcagctccattcccttcacgacccactgcctcgccagcaccttaactctgaggagggccccaagggcctgaggtctccctgtgttctcgaagaagcttttcaaaatcttaaaaaaagagaaaattattttaacaaaaagccaacaggcctgatctgagatataatcggatctccccgtggctccttcctggcagccctgggggagcatggtgggaactggtttccttggggaagtgacccggaggcagaaagcaacagccctggaccttgagaagagcctgctaggtgggaggtgggagcgaaacatcaggaaaggtcacagacagaggcagcagcttcctgcagggagggtacgggactccagggagacagccccgggcttctcagcagatagctgcccgcccaaatgcagacagtgaagatgcttgtggcccttcccccggggctgtaagcccaaagaaccacctgcaaaaccaacaccctgaatcacgcgggcccacgagggtcccctctaatggtgcccaaagccgcagctgcccacctgccccggtcggcgttacctcgcatttgccccggaggcccgtctcctgcaggcgggaccagatgctctggatcctcccggcgtgctcggggtggctgctgctactcccgcaggtgcactggtgcttcagcatcagcgtgtcatacacgaggcctggggcggggcagaggggccaagatcagcgcacatccaggggcgagccgaccacccactggcaggctgcccccgggtggtggcggaaccaccacttccctagaaggagacggaagctgggacggttctttagaaaaataccacgtttgccaagactccttgactggccaggcccagagaacgtggacgaatgcagaggccaggcgggtgggagggcctgcctgtcactcatgctcacagtaacgccccaggacccaggcagggacgtgcgcagctgccctgctgcagcaggctgaggagaaaacagtgatgaggaggtctgccctgggtggctggaccttgcaggggtgagctctatgtgggacttgtgctggggaggacggtgctgacttctagaaggaggcgactctagccccctaccctcaaagtctgcctggtcctggaccaatagtaactccagttctgctggacggagaactgtccaaggtacttgagattccaaagaaacaccagattcgagctctgcctttagaaacttccagagggactggaacacatatgctagaaaacacacgcaaaacccatgtacacaggtctacttaacctctgactgtgaaaagaggccagccatgtgctcaccacagcactgagctcagcatggacgggcccccagggtgcggcagccacagaagaggctcctggtgggggccccagaaccaactgggccggcagcctggggctctgcagcaggaaaggcaatgtgcctgaacccgtgttggatgccaccctgtctcagtcagcatacgtgggaccgctgtgaaggggagagtatctgacctgtctgcagaggctagagatgcgagggaaggccaggtggccctccggggcacagctctgccccggccccttctcaccaggccttggcccctggtgacacctggcaggagggctgccccgaggccctgccgggacatgtctgtgctgcacacacctggtcttccaggacttaacaaagggaaggccaggctgggtgaacagacgccttccgcaggcaggtcactggccaggggcacctgtgctaatgtgggttcatccaggctgataagggcggggcgcacggtgaagagcctgggcaagctgcccagacagacctgctctattgcttcagtgtgctggcccaggatgcggccctccccacttgtgttcctattactgggaacacaggcagcatccccagccaaggggagctgagattcaaggtggtccagtgtttgcagggtccagctacaggatacacttggtgcatattagttcccatacttcctggctcagcctcttgtgagtcaggctaacaggagtcagtctcctgcacttgaggaattctggaggtacttgcacaacagtgctgtgggatgggacttctggtaaaaaaaaaaaaaaagcatcagggtaggtgcaggcttacaggagtcaatgaaactaggactcacaatcagtacactgtgtgtgggcatggctgtgcttgggagtttgtaatggcaacacagacacataggcaatgacggacactgccccgtgaaatacgtaagtgtgtgtgcagaaacaaccagttgctcacggatacaaggaatggggactgcccctacagtggaatcatcatgataaggtcacgtgcgctaatatttactaagcacacggctggaacttacgaggcagacacctgctttactgcctttacagacagaaaagctggagcgtagagagatggagaagcggcaaagcccacacagctgagggtggcagagccagccaggagaccacgtggctaaaggaacgcactgcgtcgctgtgcacggacacgggaagatggctgagagtgtgaggtactaacagaaagcatcagacacaacagagtcccgtctctgtgaaacaaattatgtttgtgtctatctgtccatctggctatgcacagaaatagatctggaaggtttaaagcaaatactaacaacctgccaccactggggagtggcattacgggcaaacggcatttcctgtgggtttctatcatgtttttctttacaatgaacatgtactgttttataaatttgtttaaaaagtaatcaagacaaactaagaaaggacaccaacgaagcgggactccctgcaagtctcctgggaccagccagggtgggccagcttagtgggaggattctccttggtggcggtgactggggtctcccttgtctgagctgcattctttcaagaacacacttattgcagtcagctgcccaggacttgtggagtgggtcatctggctgctcctgtgaccttccatggttttctttctgagaagcagcattttacttgctggatacctactctggaaatttgtctctgaatatgaatagcatccttctaagacctgagagtgagaacctcgcagactgcagaacactaagccacgtgatgagaatcatctgaagaatgaagccgtgctgtatttacagaacatttttcttagtgcgtcattaacaagaaatattagatcataacaacatgaagagcgctcctgcctctgtgcttgtctcagaggcaagccctgccagaagccagccctccttccctcctctcccctgcaggggtggctgggtggcggggcggcccaggacagcagtctcctccccggctctggctagctccaggcagacaagtccagggcccggcccctcctgcctcctcagccgtggtggacgccttacttgcctccttcttgtgagggaaaaccaaggacccctgctggcagatcgcctccccggggtgaggatggtatgagggatggcacagacagaggacgtgtggctcccacagcgtgtcccaggggtcccgggctctgctctcgtgtaatcacagccccccgccagccattcacagccctgtcactggagcctcagcgtcaacgctgtggacgtgggcgaagtgtgagggagtaagcggagaagcgtgggctcatgattcctgagccggaccagaagctgtaggttctcatggccccacgggcatgggctgtggactgttcttggaggagaccatgggtctctgggacaggaaagtgggcaagtgagcccgtgacaggtccccagcatgacagaactgaaggtgtggggtgtagggcggggagagggcctctgtgacagacctgtgtggtccccaccatccagcgtggccctcgtgcctgcccagcccctcctcagcctctgcagagctgggccgggaagagccccccgcgctgtgcccactgtggcccgcgttgcaccctcaggctgcacaaaggccacgtgttacctgtcgtgaacctcggcttggtggggggctcctgcacagacacggggaaggtggcagacgcgggtgaggactgcgcccgggacagaggcctgtggccgccgaaggacacggggatgccggcggcctccatggacgcctggtagttcctcagctggtggatccgctgctgctccagcaggagggcttgctgcggggaagaaacggccgtgttggcggttgcggatgtctcccgcccctgggctgcagggctaggggttgccctctcttgcaagtctcccgtccacgcacaggccatacatgggccacaaggatgccgggaggccagctgcgtggagaggccttccctgtgagtgccctgaagcctgagtgggcccagagccaagaacgaggccagcacaggctctgcctcccaggacggtctctctagggaaggcaggctgtccacgtgggatcctgccatgggttacgttaacaggataacacaggttgagtcagggggtcccagggaggcctggcccagtatggggtatcaaggagggcttctctgaggaggtgctgagccaggagcagcctggagcaggtgcaggggagtagggcctggcaggtgtggagagaagctcttgctggggcggcagcctggccctcgctggtttcactgggggatatgcgaaggccatgtagatgtggggaccacagcgtccactctgccataccacacacatacggtgagtgggcacgaagcccaacccccttgttgggtttgtgggtcttagttctgaccaacagcattgaatctgcatgccaaacttgggcgagaaagcaccatcggctctcagacttgaaagtgccaactgggcttcatctgcagccgctcccctccctggtctcacatcccacacaccctcgtgcaggctaaaagcagtaacagcccatcagcttctgggcacccaggacctttggggcctagagcaggcctgctggtggggatgtgcctctctgatgagatggagctgggctgggctctgtgtgtggggggggcactcagccaggggcctgggacaccctgagggattctgggaacaggctgaggtgcaaacccccatacgaggcagagtggagtggagggagcagggcagagatgaggtcacagctgccaagcctctccccagacagcagctgagggagagcacagcaacctgccacccaggccgaggcacaaagaaagccgggcgcctccttgctgggagctctgcgccaatcctgtcttagttttgatgaacaaatcctgtgaacatggaaaaccaggtacctacatcccagctcctgtatgaaggcagagcccagccctgtgctgccagcactgggggaaaccagagctacccggccaggctccgatctgtcctgcctttaggaatcaggctgggcgtggtggctcatgcctgtaatcccagcacttggggaggctgaggcgggtggatcacctgaggtaaggagttcgagaccagcctggccaaaatggtgaaaccccatctctccaaaaaaacaaacaaacaaaacaaacaaacaaacaaaaaattagccaggcgtgatggtgggtgcctgtaatcccagctacttgggaggctgaggcagaataattgcttgagcccaggaggcggaggctgtagtgagctgagatggcaccactgcactctagcctgggcaacagagtgagactctgtctcacacacacacacacaaaaggaatcagagccaggagggagcagagaagaaggaagccctgagacagtgggaggagctgcagcaggagctggagcaggagccagcacccacaggcccccagtctgctgctgaccaaattcagctgggattgccgtgggccccacgcggttaagtggttaataagcaatcctccccgacgcgggctggaggtgccccgccttatgtttacctcggcaaattgctccgtgtactacgacgtttccctgataaggggttctgcctattactctccagagagaacagaaaataagtgtttctaataatcatctcatgcttggaatataacaagcctctttttctcaaagtaaaggctgatctatgagaaactagccctaaaaattattaatgtaaatagtttcccatttcttatcagcctaataatagcacactgaatttcagatcttcatcaacttacaaggcccgaccacaggaagaggcccccaccctgggcctgtcggacaggacctgtggacgagtgttcaccatgaagcaccgtgtgtgtgccagagaggcccggggctttctctctctgtctttgccaagcgttagttctgctgggctttgtagtgtttagtgcccggggtgctaattaagaaggcccagaaattagagacaggcccccctctgaacaagaaggagaaatagcacccaatgccagccactgggggaagctcggtggagaagggctcctgacccagaagcctctggagaccactgagcactgatcccgtgtgtggcaggcttgggtctaggtgctccaggtacaaggccccacactgattcattcagtggcaagcatttaagaactgtagctgagaattaaggggaacagtttactgcagggcgtcctgctcctggcttccaaggtgctgctgggggtggagatgcagcgtctggccacacagctggcagtcaggaagctggggaggtgctcaacggcacggccggcatggagtccagagagaagggagggaacgagccagtggctcctgcagccgaggcagcagctctgctgctggaggatagaatcaaatcctacagagctgtggttcctcggactggcttcctgcctacagggaggaagccactttcctgagggcactctagctgcagatacggggctccagctggctgcccaaatgccttaggtatttctgctgactcagaagtttaatgtttcaatggaaattaaccagtcattcactggccttcttcatcagtctcctgtgagtttggttactgggtgtcagtgccctgaagccttactggctctgggtgccacaatcgcacccgtctgtctggatctgcagggctgctcattagcacctctgggtcacaaaaggtcttgacttctgatcaggccctgcctgcctttttgatcaattaatacctctagttccttcacttctttaaaaagcatgctgtatctcactaacacatggattctgtgttcatttacagcctacagacaggaaggaaatccattctctggggcctgcgcatggctggaaagcagttacgtaaccacccacagggggcaaacatctcgtatccctaggaacggctgggacaaaatggaagccacatcaacctccctcactggccaggacaagacaggtgagacactggacagtgaccgcgcaaggatgccctgcagcccccgtgatcaccacagaagatgccacctggggaccgagggtggctgtgcgtgccagccttctggtgccctccccgcctgcggtcacctgtctgaagagcagctcctgctcactgggctggcgctggcccggctccacctcccgtgggggctctgcctcttcctcatcgctctcaatgggctcctgcttcacctgcacgccggcctgtgcgtgcgcctccttctgccccggcagccggtccaggtagggctcgtccagcagagcctggtgctcacggagctcctcctccgtctcctccgggtggctctccggctgccgggctggctcgcttggcttggggatgatctgcaaggcggaggtaacacatgaagcacagagagctgggtcctctgagctcatctgacaggagaagggatgctgcaaaccccaccctctggggcagacaatcagggactcagggcaccttatcaccctgccacaggccagcaggcacctttatctcccaacaggcactggggtgcctgagtgcctaagaaaataatgcccagtaggaccccagcccagggtcaaggtgacctggcccagggaaggaggctgactaacatttggggtttactaagcacctcttctgtgtcaggcaccgagaaacagaaaagaagctgcaggtgtcaacagagtctgcagaggagagcttgagtgtgaaggggagaggccaatgctgacctcacagccacaactgctaagagaaacagcccaccacccactcagcggaagacaaccacgtccacaatgctcactgcccaatcccaccaacacgccacggcctcccctcctgcaggatcccaccgatgtgccatgacctccctcctgccggatcctgggaacactccaggacctcccttcctgctgaatcccagggatgccacggcctccccttctgcaggatctcagggacaccatgacctcctttcttgcaggattccatgggtgctccatgacctgccccgctatggggccccaagaaccgcaacatcctccctcctgtgggactccctagatgcccccgacctcttttcctgttggatctcacggacgcttctcggtctccctccccggcctctcagtgcggaacaggcggcaggtgctcctctcctgctccccgcctgctcctccgtcttggtttgtcctgggcctgctcctcggctcatttccccattctggattccaagtatcagcgactcccaaaggtggtgctgagcccaaactcgctctttacctccagacctaatggcctgccagacgcctcagcttagcctagagtgcccatgagccccagcacagcaggtccaatgccgaacgcagggcagcttcttccaagcctctcccttctctaggacctgttcttggctattgggacctctctctggccagctgtccagtcacaccccaagctcccaattctgtccgccaagcactgcccatgcattgctcacgagaaacgcctctggacggtgctgcttctctccagcctcgacctcctgcctttcctgctttgccccacctggcctctcctgcctggatgacagcatggctcctgggaggcccccacctccagcgtcaacgctttgcaatcttcttcatgtagcagtgagggcacgctttcaaacgggccagtggacctggtcactcccctgctgaatgtcccccaagtgctcttctgccatcctgcctctgctgaagagcccctccatcgtgtggccatgttgcccctgcagcctccctgccaccctgctcccgaccacgccgctggctctgcatccctcatgccacactcgcctccagcccgctgcttgccttccttcctcggcctccagccactccaagaggctttgtgagcctcccgtgcatgtcaccttttccagggtcagctgatcttcctgatagggcaatgtgccctcctccagcaccccccgaccccagtcctctggcttttctgtggttgccattcatgtatccatctttcctgcagtctgcagttcccaggagggtagggaccacttctgactcatccacgtggcacaggcattgctcatcgcacattcactaaaaggatggggcaaatgcaaggggtgtccgcgtagtggggcaaagtggaacagggtgtatggctgacctcaatgcgctctgggagctgtgggaagccagcagggctgcagcgtggaaggccagagaacaggaacacagggtgccggagacgaggtggggctgtgggaagggcactctgggctgaaaacaagcaggtgcacgttctagaagcatgccctgctgcagacaggccagaggttgaaagggtgaggccagccccacgtctggctaaggcatgggagaaagaacaggtttccatgacaccaaaaaggaagcagctctaggcccagggacagactgcatatggagaggcaagagagggtggccaggacaactccttcgttttgggcaatggagctgccccatcacatctgggagccagaaaagggatgaatgtgagcagagcaaaggctggagttgagaacaagaggggagagagggatgcgggaagtggcaaaaaaaaaaaaaaaaaaaaaagctcaggagagagggcgggggtctggagttagactaggaagggcgcacagggagtttctcagaagaaggcactgactgagctgcattcctctgcagactgtgaaagaacgtcccacaatcccaaagtcccagatcgaggggtctctccggatgctcgattcatctgtccccgtggggaacggcctgaagggcagattcgagggacggtgggacaagccgagttcctggcagagagaggagctacagcgcgtggaggatggatctcggcaccgcatccgactgtttccagaaggaaactgaggtgtgcaaggaagactgacacctgaaatcccccgagcccttgcatttcaacacccttagagcactgcatgctgctccacactcacgcgaggcggcctctccagcagcctgaactacggggcacgggttggtgggcactcagtgtccgcttgctcccaggggtcagccgtatcagacgacaccggtccccacgcagcagggctgagacgcagactcacacacacacaacatggtgagttttcagcctccagagccctgctgtgcctcactgtggaacatcagagacttcagattgggcggggggtttgttttatgattgatcatcccttaactttctttctaagagcagtttaaagtacggcagtaaaagccgagtgaagaaaacgcagatccattgtttatctctaaaccgaaggcagcttttcttcagaaaagctttcaacctggcacagggaaatggagccaggtccagccgggtgcaggcagcgtgggtgtcggggcgggccggccatcggcagtgtgggaaccagtaggcggcgtggcacgtaaggaactcagcttcagaaagccaaactcgcagggaggagagtgcagcggtgggtggccgcgcgtcgggaacaggaacgtgctgtccacgggtgagcgtgccgttgggagaggaataagttccgggacctgatgcacagtttggtggccccgatattcacggaccttaccacagacacaatgagagccccgtgaggccaagggggcatggatgaggtcccttgtggcgatcatttcacaacgcatacaagtatcaaatcatcacgccgtacgctgtaaatacatgcgactgtttccggttagactttcacaaagccggggagaaacaagttcaactaaggaatctagcaacattgtccccatttgctctgacaggtttctcagtggttgaccaaaaaaagcatgtgtttcaacactagtttcacttgatgattttgaggtctgtgattgcttctggtttctcagtcccatcttcttcctgcacactgagagcctgagaggccctgtggggggcagggagaacagggagcctggcggtaccgctgtcgctgtgagcaggggtgccaggtgcagcaggggcgccgggtgaagcagcgctgtttcacaggggacctcgaagatggcatccaagtcttggctttcaggacactcatcaagagggcacccatacgctcagttcctgcagctcccccagggcccggtgcagtctgatgtgtaacgggatgtgactgactgagtggtgtatgggaggtttcttgagagcggggcccttatcactcggtgcaccggagggagagcaaagaacaaagaatctgaaagcagaacaattccctaagaaggtggcacagagcgctgaggacaatgccctggatgaggagcaggagggattcgggaggagggagagcagcagccaggacgggccttcaggaagcaagaatgtcctggaggctgcaggtgtggaaggaaaagcaacaggctaaggatgaggagacagggctcagaccacaggctgaggacatggggacaggagctcagggctaagggtgcggggaccagagctcagggctgagggcgcggggaccagagctcagagctgagggtgtggggaccagagctaagggctgagggcgcgggaactggagctaaggggaacggagctcagggctgagaacgcagagatgggagctcagagctcagggctgagggtgcggggaccagacctaagggctgaggacacggagatgggagctcagggctgaggaggtgttcagggcctcagagggctcctcacaatgtgggctttgctcatcagtggatgggcaggagaggctgcgggtctctccgaggggtgcatggtcctgcctgtgccacaggaaggtgctaatgagtcagcgcgagggcaggggaatgcctgcagagaagcgactgcacagaggcagcagggccgggcagaggctggcacagaggctgggtccagcggcagtggggaccacccgtggacaggagagtgagcaggaggcaccaggactcctggccaagtgccagagaaggcagtggggaccacccgtggacaggagagtgagcaggaggcaccaggactcctggccaagtgccagagaagggccaccacagaggaggtgctggccccgggacggggaggtgggtagagggcagctcagagaggctgaatcccagcatccggtggggccctgagaaatccagcaagaaagtgcagattcgagtctgggatttgggagacagatcagaactggagcagtacgcaggtggaataaagtcaaagctgggagcacagaggagctacgcagagctggggagctgaagaaacagggatgaggcctcagggaccagtggtagggtgtcgggaagcagggaggccacagaggctcacatacagatacatacacacacagatacatatacccgcagaggcacacacagacgcacacagacacacacacacagacacagacagatgcacaaatagacagacatgcagatacatatacacatgaagagacagatacacagatacacaaatacacataggcacaggcacacagagacaaggagaggagaccagagggccagcagaagggtgggtacaatgccaggaaagggcaaggggagaaggaggaaggtgggggagggaaatgggggggcggggaagggaaatagggggaggggtgggggaggaaggctaggaccttagaggggaccctgtggggctgccccatcccagcaatgaccgaagtggtgtgcctgcctttctttagcagcccaggggccattctgaagtggataaaagtgatggagggcagcaaccccatagaggacacagaggcaggtcccttctctagggtggggtggaggacaaggcagctgagggtggaggggaggggttcctgcagcaaatggccactcccaggaagccaggctgatcgaggaaaagggtttgtctgtttgccttttaaaggagacggcccagggaggactcggtggacacagaagctccaagacttttcttctgatgctttcctttaaatttctttttttttttttttgagacagggtcttgctctgttgcccaggctggagtgcagtcatgcattaggcagtcctcccacctcagcctcctgagtagctggggagtacaagcatgcaccaccttgcctggctaatttttgtagagacgggatttcaccaggttgcccaggctggtctcgaactcttgagccaaaacgatccacccaccttggcctcccagagtgctgggattacaggtgtgagccaccatgcccagctttaaatttcaaacttaaagaaaaacttcaagaactctgtaagaaaatctcaaacgtccttcccctatgcacagatgaatggcggtggaggtagtgggggtcatagcgggggtcagcctctcttcctggggggctgtttcaggggccccaaggccactgcaacctgcctgcctgaggctttcggcagccgcgtctaccgtgctgtgcatcaggagacctccccactgttccaagggctcttggatggcccttccccggctggctgcggatggcgtgtgctgccaggggccgcatctctttagtgtcctttagtgacaacattcccaggtctttttcctccctttcacgaggatgaagcctctgaagtgtcccccgctgccgcacgcccctcggcctggaggagggatcatctccacaccgtgggcctccggcgagggctctcaggcagggcctgaggaggatgtcactttggcagtggtgccacgtcagagccctctgtgacgcaggccaggccccttgccttggcactgacgcaggcgcctgtgggtcacctccctgggccatggctgcaaacaaagcctgcttctctctctctctctcctttgacattcagttctgagtctcactggctgggctgtgggctggggctgcactgcagagctggctttgggaggtgagccggacgcgggcaaacaattgaagcagctctgtgcagcccgaaggccttggggacactgagagcccctttcatcaattcaggaagaacaaatgcacctccatatttggaataattacatttttaaaaagtcaggctggagttcacggccaaaaccgaactggtaaactgccagtattttaaaacaatcggacacactcgtaattagaccacccaaaatatgagtccaagttttcatattcaaaaccgaggatgtcaagttaaagggaaacacacccgaggccctccgctctgcaggaggcaggttcttgtgcagagtccagaaaccatgggaagaaccaccttgagaagcaaggcttcttgctgtaggggtggaggacaccttccaacgaacgtcctcttttaatagaaagaggtatttcgcctggacacacatcacccactgctcgcaaaccagacataactgaggccaagtccggacgtggccagcgaacacggagggccagtttcacctgcagagttccaaggtccactcgccctctgatggtgtgcgttctccagaaagttccttcatgcagcaaacccttataaacaccactgcatacaaggcacgggcaacagaagctgacacagttggaaaacatctgccaccatcccgaccacaggctggggagaggagagcagagccagctcggggtcgatcctgtccacctggtggagttttctcagccaaaaggggcagctctgcaggctgcaggcctcgggaaaactagagtggctacatatggctgcagggaacaccagggctaggcacgggccgcctctctttcttttttattcacagtgatgtttccaaaacaactgccctctaaggtacaggctgaaggaggggcagaccaagccggccccagctgcaaccccaatgtaggctggagcagcgcagtgggacaggagggttcacagctgccagagctgggcagatgccctcagggaacaagcccctggggacgtcatcctccaagaggaagggccgggacgtcagtgttaggcggccctgggcaagattcttgtcttcctgggcatcctgggaaaacactgtctaaacgtttcaatcaactgtcattcactcccgtaaatcaatcagagaacaaactccagtgagagtacccggtttctaaatccttcaagagtatacggcatgtgaataggtgtttcctgtcttcctcaaacctcctaccccatcactcagataatgacataataaaattaacaaacctaagttggcattaggaagacggatgtgaaagtgcttttgacacctgggagtaaagatgcctggcaggcgcccgacacgcccacagcctgtgcccttcccgtcccaatgaggggatttgctgggtgccccatccatttctgatgcgttccctgctgtccgctgatgagggcttgggggtggaggggcatgtggggtgggggtggtgagcctattttgtggtgtccagtgggcagcaggggccaggctgtggcctgtgctgggcatctggtctgacgtggctgccaccctggagcaaggccccaaggggcccatctcctcaatcctgagcctgcagccccatgatggctcacacactaggatggatttgggccacagccggctgccatctcccaggggccttccccgactcagccccactggaccggacaccacgcaatcaaagcctttgaccactgcgccagggctgagctgactcctcttctgggctggaactgtggggcttgagagaaggaaattgggaccaggcaggcaggaggggctaatggtatcaggaggtcagggctgcgggaagaggcagcagtgttggtggtgtaggggtctctccccacggctttacctctgctcttgctgggatcctggtatttcactttccaactcctgtctacgtgtgctaggaaagtctatctcctccccagtcctaaccccaatttttcaccctcaggaaaaccacagaagaccctgagcctccggacaggtggacaacccaggaccggtcctgaaatccagggaagcaacgggggtggggtggagtgaggggggcactttcacaggagagacaataaacggagaaatgattccgtctgtcgccaaatctgccaaaggtttctccacgttcccctcccatcaactcatcctctttcttccttgtaacagctttactgggatataattcacataccatccaattcacgcttttaaatgatatcatttgttgtttttagtatatttacagagctgtgcagtcatcaccatatctaattttggaatattttcaccatccctaagaagaggcgctgttccccagaaatgctccccatctgcccgcagcagcccaggcctggctcccacgagtctgtgtcctgtctctgtgagtctgtctgttggggacgttttatgtgcatgaaatcataccacacgcggcctctcgtgcctggcatcctgcttccaaggcttcccgtgctgccgcttgtcagtgtcattccactttatggctgaatgacattccggcgtgtggccacgttatatgacattccggcgtgccggcgtgtggccgtgcgtcattccacgttatatgacattccagtgtgccggcatgtggccgcacgtcattccacgttatatgacattccggcgtgccggcatgtggccgcacatcattccacgttatatgacattccggtgtgccggcgtgtggccgcgttatatgacattccatgttatgtgacattctggtgtgctggcgtgtggctgcgttatatgacattccatgttatgtgacattctggtgtgctggcgtgtggccgcgttatatgacattccacgttatgtgacattccggtgtgctggcgtgcggccgcgttatatgacattctggtgtgctggcgtgtggccgcgttatatgacattccatgttatgtgacattccggtgtgctggcgtgtggctgcgttatatgacattccacgttatgtgacattctggtgtgctggcgtgtggccgcgttatatgacattccatgttatgtgacattccggtgtgccggcgtgtggccgcgcatcacaggatggacacctgggctgttcccatgtaatgtggctatcacgactgatacggttattacgactgatacggtttggatctgtgtccctgcccacatctcctgctgaagcctagcccccaatactggaggtgggacctggcaggaggtggctggatcatgtgggtggatttggcatgaacggctgaacaccgtctgttggtgctgtcctcactgtaatgagtgggttctggtgaggtctggtcggttagaagtgtgtggcccctctccccaccccttgctcctgctcttgccaagtgatgtgcccgctcccccttcgcctaccacagttgaatgtttcctcgaggactccccagaagcagaggccaacaccacgcttcctctacagcctgcagaaccagaagccaatcagacctcttttcttatgaatcacgcagtctgaggtatttctctacagcagtgcaggaatggcctgaaacagggactcaggttgctgtgaatgcctgagtgagtttacgtgtagatgtgtgctttcatctctggccgcagagctgtggggccatgtggtggctgtgtccaaccttttgaggaactgctggactatgttcatagcagctcatctcatctcttaccttaaagatgctctatgtcaaatgccagcatttgatcaacacgtaatcagcatgttagttttcctcttcacgagcatcacagtgctagccttgcctactacctcctcctgaaaatggacttatctgagtgactttcaagatgtctgtaggttatgcagacctctgtgggctggccggggcccagaaccagctctgacagtgtcccttcgacttcctgctggagttctgcacctgtacaactgcacccgggccccccggccctgtacgctgcttaccctgtacgctgctcatgcactcaggcaggctgcaagtgccggatggcctgggagatgggcactgtgggttgctagtttatttaaaggtatgtttactaaatggccttaggaaacccaagaaaaaagtgttgcccaagtagactattccattcgctggcactgatgcaccacaggcaggacgtggtccagtggaactcacatgggctggtgggagagggcactggtccaacggaactcacacgggctggtgggagagggcactggccctgcgcgtcccactccctgcaggtgaactgttcctgagcccaagctcccagcagcatcccttctgcccctgcccctgcccagctctgtgctgtgggccagagcatgtgcctcctcggttccctctttctgcctcctggcctcccttaaggtcagaaaggggccagtgctgaagcctgaggctgaagcgcacagcacacagccgccctggggcctgggagcgctgagccggcaaacccaccttgttcatctgcagttgctgctgctggaactgctgcttgtgtttctccagaaactgctgatgctgctgctggatgaccaggtgctgcagagcctgggcgttctggggcagcggggccgactgggtccgccccagtgggcggtgctgccgcagcttgtggatggagggggacacccggtctgcaccaaccaaggactgtgcgtggaggggcagtgctcccaggcctgaaagataccagtctgaagataattggaggaagaaacagcagaggggaagaggaagaagagaggagggagagagggctattgagtaagtgatggagacaactgcgccctgtgcccgccagcccaggcgttctgccctggtgccccagagctggctcgctaactgggccccttccagctgaggctgggggccgtgagctggtgctttgggactataggaaccataatttggaggcaattttctatgaaaatcaggtcgacacaggaaacgtcaggagtcctgtgtggcaggtttcaaagagcaagcccttccccagagtggctaccacacaattgttcctgggggccacaggccctagaaaagtgggttttggtctgaacagcacggtgggaggggagagagggccaccagtgtgctgaggaaggctgccacggttctgggagcctccacatatttccaaagacagcctgagttgtgagaaaaacaattgtccttagggttgacatcgttttaaggtctcttcgagcactgattttatgcacaaagatggcgtaaacattttaaaaagtccttatgcatattgtcaaaacccctttctgaaaagatctggctaatccctgccagcgagtggaggatgcccacttcaccaaccctgtatgttttgattaaaagaatccattttgatagatgatcttgctttaattggcatctgtatcttgatttacaatgcaacctagtgaagtacattttttccttctgcatgcgttcatcgagatatatataaattgttggtttaggtcgtttaacatttttccatggttttgtgggcaaaaggatctaacgaaccctctgtcctgctctgtgaatatctgttcctctggtaacctgagtggggtaaacactaaactaaacaatgctgctcaggataaaaatgaccctgacccgctcaagggcatctgaccgggtgaaatgacaaaggaagtaaccacaccagctcttggaggccctggtgggggactctttggaactcggcatccgcctgaggcagcctgctgttcctgctgccaggcggggctacatgcctgctgcaagggctacgggacctccagggataccaaggtggccctgccggcaagtggcagctcctgtcctgtccctcccccaggacactgatgccagggctcgcagggcagctgggtgtgtcatcaggtttagtggagtccaagcctcccagtgagagccatgctgcttagtgcttctcaagtccctttgcaggggctatttctaaatttaagaaatactacgtgatatgcaaacacaaaggacacatccagacagactaaacccagcaagaccccagcaaggctgctcttcactaccttttcaaaagttattcactagtgttctctaaaccaccatcccttttcacccaaccccacaactttccggaaagacatgttatcttaaattttatcatcaatgcttggctattaaattacagtgaataactaaaaatccattcagaatcattccctgaaaacgtaaaaaaagaaaaaggtaaaccatcctaaagaaggcatttcaggctgggcgcggtggtggctgtaatcctagcactttgagaggccgaggtgggtggatcacctgaggtcagactggccaacatggcaaaaccccgtctctactaaaaatacaaaaatcagccatgtatggtggcacatgcctgtaatcgcagctactcaggaggctgaggcagaagaattgcttgaacctgggaggcaaggttgcagtgagcccagataatgccactgcacttcagcctgggcgacaaacgagactctgtctcaaaaaaaaaataaaaaaaagaaggcatttcagaatttttcaattgttgacgtgtgtattacgtgggattgaactacttcacggaggaaataaggaagtcagtcacacaaagctgctttcaggggacgcaaaggctacgtagttgctggaaaggtctctcctcggaaagcaatgggaacctgaaatacattttccttagcgttgttttcccccaaagcctcagtgtgcacaccattcaggggtggaggcggtgatgagctgcacagtcccctgcccaggcctgaccctctgcagaggagaaggacacgccaacttcataggattcagcttcctggtgtgacacacggtaaggaacaagcgactcgagccagcggtgtgagtgggggctacacagcgctcccaggctccttctggtccagggctctgcctcccgccatcctccgcatgggcccaggaatttcccaggccaccagcttcacacggggacacaagcctacgccccattggaacagggcttcattttcagaactggtgtgagcagagacccctgtgcagaccggccctgttccttttccagttgcactccccacggaccagcccctcactctctctcagcctatctcgcccactcagaatttcactctgctgcctccagggtgcaaaacccagggccgccatacacagggacaccctacccctgggtatccttgaaaagcagcgccctgacctctgcatagcaatgctatttgctggcagggtggtttccaatttggatccctgagatcattaacaagagcttctgatgacagaccatgatgtggtcttcaggatatgctgtcagggacttttgagcataagtccatcaggacacaattctgtggtcggtgacccagctgcaggggctggctgtgtggtgctgggcggggtgtggggcagagcctggctcctgtggtcccagtggccccctgctctgggctcctcccctgggcatcttagccagggtttttccagcttctgctctttctgccctgagcactggcagaagcccttccctgtgcccagtgcaagggcaacagctgaccctggctcctgagctgaccctggctcctggtgctggacggctgtgtccctatggctgccggctcctgctcctcctggaggcacttggggctgggcctgaactgtgctcagtggccagctcccctggaagtccatactctaacacacaatcacaataattgcaatgacagttcccgagtgagcatgctggaatgcacccagccatccagggtctaagtttagaacaccctgctcagcaatacccaaactaattagtgagtgtgcaaatgcatcacttagacacaccccaccaggtatggggatttaagaaaaaagaaggtgaaagactggattgctctcaagttccggacccagttttgaagagcgggtctgcacacactgggattctgtttaggtgatgaattcacatgagatgaacaattcagggtgcctgagtccttagaagtccatctggtgtattccattgctttttctgcaaaattctttaaaatccttccattgagaagcaaaccaggcaagagttagatccaactcacagtttgcaatcccggccgcccaagggaacaatgtgggtgctctggattcgcttggaccaatcagcatctgtttgagcttctggggatggagctgaggccaggccagggctgaggaccacagcctcgcgtgccaattataggacatgaaccacggccagctgtgctcaagcccttcctgggactcgctgttttttggggaaatgaggcctaaacagtagcatgccatcgctaacacagaagccaggggcaccctccactcagcatgtgacagcgggacagtgggtctccactgccagctcaggaaggctacgtagccttaagacgctggtggcatgctctgtttcaggatgctagaaagatctgtgacagggccacctccacgaggcatacacatctccctccacctgtccttaagacgctggtggcatgctctgtttcaggatgctagaaagatctgtgacagggccacctccacgaggcatacacatctccctccacctgtgcccttccctctccgcctgcaagctcctactgagatctcagctccgacgccactgctccgggaagccttccctaggcccacctgcggcacagccctggtctccagccttctcctccacatgcctgtactaccaagctcctcctgggtcttggggggccctgtctctcgggtcctgacagcagattgcatggttctcaaagtcctgcttctcagccacacgggcatcataaaggacttagctgggctgtccaggcaacaatcatgcccacagttttgcgtccaactaaagcagcagcacagggctctgcacagacactttccttcttacccgggaatgggctcctgagctccactccccgcctcagctagttatgcggagactaatctccgaggatgtaccagacactctgcaaagatctgagtccacagtgaccacgtgcggagtgccgcactggagcagcacatgaacagggacatagaagaggcacgcccagcctgtgactggcgaggaactgcccggagcggtgcggaaaggggctgactggaggtatgtggcgtgtaggaggcagctctgggagaccctggaccatggctcacccctctggtctctgacagtgacctcacccacagaggcctctgtttcaaagcatttgtggctggagggctgttctagctttgatatcctatacacctatgcaccacgattaccagcgataaggtgggtctgtctgtgggccaggaaaacacaggcactgctgtccaggagaccaactcaagcaagagttcgtcaaaaactgcaggaaagggcagaacatggaaacgaagatgcagtgtgatccagggaaggagcaacaaggcagggctggggcagggatggaagcctgggatgagggggcagacgaaccacacctgatggggaaaagggccctgggaaagagccctggctctgggggctggctgcggtctggtccagcattgagccggctggcctggctgctgtaccggactagggaagagaaacgaggcttctagaggaaggctggagttcctgctcacaagctgggacttcactccaggccagtgccgccctgccaggaccttctgtgacaatgagaacattcaggggacagccgtgggccgtgcactggatgtggtgcacatgtgactgagaaactgaattctaattctgacttatttatttaacagctccccgtggctggtggctcctgacctggccagtactgctctagacagcgtgggggcctccaggccttcaaggagagtccggtggatacaggaggacagaccggaggggaggaacctgcacaggaggcttcttcccacaagaagatggggcaatcccagcgggttccaaatgagggccctgctcatggcggggctgggggagggcccctgagacactgaggacggacaggggctggctgggggagtgagagagcatgggaggtggcaggttaagaacaaggcaatgactacaacaatgatgccaacacctgcaggggcacatgagtgcacagcccacttaaccctcatcaggctcacgggggcggaccgcttagtatccccacttcctagatgggaaaacaaggcacacagagcataagcggcttcccagggtcatggagcaggagaaagctgggacagaggcggctgtgtggctgcactacgctgcacacgtgacactggctccgaggctccctgccagggggtttgcaggatgagctgctggcaacctggggaggctgtgcaggagagaaggggcttgcagggttttggaggtggcggcataggactggaggggcttgctgggcacaggcgtaaagcaaggccagagcaagctgggcaaccatgcatgggccccctggtggcacagagcctgggcagggcacggtgggcaggtccccatgccaacgagcaagctgcacctgggaggaaaagagggatgagcgcacacagggaagaagcaacgccgagttcagtgcgtttctcagagaggtgagacccatgcacactcgatatccaggttctatcaaaaaggctgttttccaaaaacctgatacacaagattacgcatgctatttaatcgtgcagaataaactgatttagagaaggaaagaagataagtgacaaacatctctgacgaagtgaatcccaggaatcctgaagatcaggcacattttacgtttttaaagacaggcgagaaactcaggtgtccttcactacccacactcgtgccagctgatctagagcatccaagagactcagacgcaacctcagatacattcctccagagagatccgcgtgcctgccactgtggccgcagctcagagaggcactgtgagggctgccccctccctcgttacaccacgggctcctctgctctggacaggcagggacacgaattcaagcttctggagaaacaaacagaaaggggctcaggcacaaaacaaagattgcgccatttggcttctgggcaaagaaggaataagaaggaatcctctctgtctaaacagagacacatgggcagcacaaaacaagaaaacaccaaaatccaccagactagtcaagccagaggcccaagcccacccaagccagcccctagccccacgcatcctgcagcgcagcctcctacaacacgccaagcccctgagttttcaccaagttcactgccagagtttcacaggtgcagctctgagggtatttcagctttcaattggcaacaacaggtttccaggaagccaaacacaaagctatgaagatgtacaacgatgacccgcacggcaagggggtaggtagctgctccctcatttatttatttttgagacggagtctcgctctgttgcccaggctggagtgcagtgccaccatctcgggtcactataacctctgccttccaatttcaagcaattctcctgcctcagcctcccaagtagctgggattacaggtgtgcgccaccacgcccagctaatttttgtatttttagtagagacggggtttcaccatgttagtcaggctggtcttgaactcctgacctcacgtgatccgcctgcctcggcctcccaaactgctgggattacaggtgtcagtcaccgtgtccggccggtgtgccctcatttctgaagtgacactttcacattgctgttgctatgtaatttcataaggacgttcccattttcctctaaattgtatttttctaaatgtaaccactcccccagacagtgcacatttgtaaaagttcgctaacacaaactgaccacaagagtcggttctgggcttccagcgctggctcagcttggtccagacagaaacccaaatcgcaagagccggtggcctctcccaaaaggtgagaaaggggaagtgacttctgtttccactccatctacctgactctgggagtgaggcatggattttcactgcagtcacggtggctacatcacgtgatggggatgtgtgtttgggaactgtgggggtgggacaggcgtgcattcctgtctcctccaaaggcaggcgaaggcggggcaccatccagagcgtgggcagcctcagagcctggctgcacccaggcccatttgtgctcacctgtgacgaggggtgcttgtgccggcggctgctccagtaagaccatgtgctgcagaagagggctgtgcgctgcccctccgtcccgctccaagggcgaggtgctcaggtagggagtgaggtgggtgccggggaaaagggagagcctctgctggagggcgggaagggtgagtctctcggcgtcctgctggcccgccgtgccctggaaagcacagccaggatgctcgggtggaaggacccatcaccaccaccccacaccacacggacccacgggggctgacttaccgcagaggggccggtggcaggcaggcccagcgtgatgttgggcaaggatggcgatgtgtagaggggaagtggagcggccgagccttctcgtgccacaagtctgtgcgccaaactcgtctggggacagaacacacgatgaccatcacagtctgtcacggccaaacatcagcaatatacaccaagaaaaacaacgatgaaaacacctgcactgaattctgatatatgagcgtaaacgtacatgtaacaaatgagacagcaatgagagcatgagatttcaacacgtgccacaacatgaaagcacaattcaccactccagtttcctcctcccgatacgagttcttcttctgtcaccttgtccagcatcatctcgttgatttctattcagtttgattatttaccacagaacagttagaaggaaatctaggctaatatagtttacaatgccgttttgcagtttctaggataatatagtttacaatgcttttttgtagttggcaatgtctttccagacataacatcaaaggcagaaaacaaaaaggaaataacatttaactgtacatttaaaaataactataagggtatgattggattgtttgttacacaaaggataagcaccggagaggatggacatcccacacttcgcatgacgtgattattacaaattgcatgcctgtatcaaaacatctcatgtaccccacaaatatatacattatgtacccacaaaaattaaaaataaagagaaaatcataaaacaactgcctctacgaaaggtgggcaatgatgacaatactggccatgtatgaggcagacgagggtcagcacagagagcttgcaaatcaaacaactaacagtgagaaaagcacgcggtgaggaccagtgacggcagagctcaggaaggggaaggcgctcaggaaaacacatcatggtcatcaaaaaaggtattctgaaacccaacaaattggcaaacacttttgaaacatggtaataccatcttggcctagaggaacggcgaacactgttgggtgaatcacaaatcagttagtggcaccctttctgcaggacaatttggcaatctatgtcaaaggccttcaaaatctgtctaacctttgatgctggagctccactcttgggatgtaacgttaagaaataaggagatggcctgatgcccatgaagcctccgctgcagggccgagcacccagcaggcatggcagagctatgcggcttccccgacaccttggtgttaacagaacggaggggcattgcacaccgggatgctctgggggttgggaacgatctagctgattacttggacacttgtttatgatacattaagttagaaaaacaggttatagatcatgtaccttttaaagaatgggcttggataaagcaaacacaagccaggagtaaagattagaaggccacacaggaagagtcagcagcaacagtctccaaggacttgaactactgtgatatttaacatctttttgcttgtagaatgaacgtgttttgctaaaaaggacaatagtttatcaccactatatcccctacacagtagctactcaaggaatgtctgctgaatgaatgggcaaacaaagagaaggaataaaatgttgttgtaatcatgctagttagtggggtttggcagatagaaatccccttgccagaagctaacgttaataatgaatagataacagatttcattatactctctacctccatgacagcaacgtttttagctcccccagatgaatgagaaaatgccatgtttgtctttctgtgcctggcttagttcacttaacatgagggcctctagttccatctatgttgctgcaaatgtcagggttctatcctttttgatggctgcatggtattccactgtgtacagcaccacattttctctgtctattcatccactgaaggacactgaggttgattcgacctcttggctattgtgaaagatccatggctaagacctcaaaagcacaggcaacaaaaacgaaaacaggcaactgggactctgctcaactaaaaagcttctgcacagcaaaggaagagaatcaccagagtgaagagacgacctgtgggaaggggaaacatgtgcaagccattcatccgacaagggagcagtatccagaacatgcgggaactccagcaactcaccagcaaaacctgaagcagccagtataaaagtgggccaaggatctgaagagacatttccccaaagacatatgactggccattggggataggaagaaacgcttctcctgacaaacacttacactcaggctgttcctacagaacagaaagcccggccttctcacttaggagcaaactcacggcgcacctcgccccagaggaaaccctgcaactccctttagatttgctcacatattacattgtgtaaggaatgattaaagggctactgaggaaaacatttttcctaggcaattttttttttgtcaaaagttaaagaattatcagtaagttatgctgtagaggaaatgcttgtgttatcatttgggaacaaaataaggagacgttctaatgtttgcaaagttttcatttcctttgtaagcaaggttttttttaagcccatttctggaactaaaggaggcttctgagaatttgttccttggagatgccgactggtccacctgagaaatcgcagggcgttctggcatctgctgcctcggggccgagccctgcgggaggcattctgaggctggcgcccccggaccgcatctcagcatgtgctcagagggaaagtccgcgggcctgaggtcagagcatccaggcacgcgtgtaaataacagcagcagcggccacagaggagctgtccccttacgcacctgggcgacttcctctcactctctgagccctgcctcctccctgtagaggaggtgccggcacactgggcttccctggcctgtagaggaggaggtgccggcactctgggcctccctggcactgtagaggaggaggtgcccggcacactgggcttccctgggtccagggggccttcaaggtacagtagtgtttctagggaccccagggtgaacagaaaaggcagtgctgagagccaggctgggaggcccctgctccccccacatcctcatccactcgagacaccccctctgacgggcaagctcactacactctgcaccacgtgagaacggagagccagcccctggccatgaagcacaggtgttctcacagacccgtccaactctagagatactgaaacccagaaagggcgcctgggtgtgatccaacatgcaaaggctgcccgtgcccactctaatgaacatctgatgtggaacatgaacaatggcacctcttggtatttcctgtaactccttctacatgttctattaatttccagtagcttcatttacgtatcgtgatttctaaaaattaacacagaactggaatgatgcagacccacccaaacaaggcactgttccaatattaactaccatgtacataagtgcctcattttaaataaaaacatgtatctaggaccacaatcaacaagatgcaaccagtgttaacctcagggcaggaagtaatttctaggttgcattataaggcttattactggtagacctcagctatgaccacagccatacagaggactgttaaaacttctaatcatctaaataagtactgaagttggcaggctgaagaagacaggtaataaaagaaatcgatgtatgaagtagaaagagtaagagaaattggggattaagcagcctggagacaaagggcaaaattcgttctgagcagtaattctagtctctaaaaatgtttatacataaacggtcttgaaatttgaaatgaaaatgctaaacactcatgcctctgtatcccagctaagatttgccaatcctttggaagggcaggattcatttctaaatatttaagaaggaaagtcaataactatatttaataaattatagccttctgtaagttggagagaattcagaaagaacctcccactcagtagaactctgccccatgaagcagacacagcatttccagctcaactcatcagaaaactcactgctaaagcgtacccctcccacccctgccctgcagtcaggcccacccaggcccagggcaccactcagcctgcgggactgcctctctctgcctctctcttcttccccgtgctctgggggtggcctctccttgtcagtggggcattgtgtggagtgtggggcaggtccttgctgcctgcctggttctgtccctgggcctggcacaaggcgctcgggacacgtgtgggataaaggcagggggcgcaaaggagctcaaggaacacggagcgaggtcctcggacctgctgccctggaaagcctccgagtatggtcagtgtgcgactcggccagcctgggcgccactcctccctgccttgccactcagctcctgcgtctctgacatctttcccacctagggactccaagcgtcccctgactcctctctagcttgccaatgtccctcccagactgtggcaccacttggggtctgatgaaggcaggggaccaggggtgctgagctctgcggtctgagatgcctggttcccgtgatgcctggaaaagttccccgctctgtggctttggccggccctgccatgctgaccacgggtgacgctccagtcggccctgacacatagtttgttggccgacatcgtgttgtgtatttctcaatacaaaataaaaaatgttaagtctcacttagcaactatacccacgtgcccacggcctctcagccaccctcagagcactggcgaccacagcgagctgggcagcagggatcctgtccacctagagcacctgccatgcgtgggcttgtgctgggacaccatctagtgacatctgctctggaagaggtcaggagaaaggaccaggctcagggctgtccccgacgtgcctggaactagcgtgttcataatgaaaggagatgtctgtgatgagaggaaggcaggagagtaacctccaactgcgtcctttttaggatggctcacaggccactttccctcaccccaaattggaaggtgaagagtgaagggcaagtgcaaagtggggtcatttcaagctcatccgtcccgagtccgactctagccgtaggacacaggacaaacgcttcgcactgacctccgccgggatgctggggacggcgggcgcgataccgttctccgcgctgacgctcccggagctgttgttgggtgagctgggtccggagcctggggcgctgctgcacgcggagtctgcggaggcagaaataccctggtgagtgttactccatgcggagggagggccgtgctgacctgtggcccgaatgcccggtgccttccacggacctgctcgttagcttgcgacaggcagaagtcccaacaaaaagaacatggccatggtttcaaaaaagaaagtatgatgctgatttctgattttccagttttgccactgacttcactttttctaggacatgtacgttaccaattttatacctcgtttgattttcaagacaattttaaacaccaaaaagataaatccttaaacacttattagtgacctaacaacagaagaccagaaaatgcagaagctaagtgactttgaaaagcaaaaggtcagctttcctgtgctcactataaaaagcttagttcaaaataaagcaacctactattagtgttcactctgagctgaatcctctcattttccctacatagcagcaagcatccaggggaaaatatagccagtgtctcctgagatctatccgtgctactggaaaacacacgctcggacagtcttagaggatctttaaccatcggtgcggcttgaccctggttaatgagaccaggttccgctctgactgaatgtgacttccaaaaggggccacgtccaatccaaagatcccttcacctctgaaggggtctgctgctattttgggcacacacatccaccgtgggaggccgctgaggctctcgatattcacacaaggatttgtttggcttgtcatatgtttagtttaacggcattttaacaatggcatcatctggttaaagctttccaaagaaaacacaatgtgacccatttgcctcgagaactctaggcgtctgctgttcagcaacgactctgggtgctcagaacctcgccccaacctatatgcgcagcgcatacaggtcagaaggaagggacatggtgggggccctggaggggaggttaagggatgttttccccaagcagcccctcaacggagccatccccagcaaagcctcctccacggtctgcttgctgcccgcgtcctcctggagcccacgaggacgcaggtgcccactcatgctgactcacgtggtatccacgcctgctggaggtggtgactctgcaaatatagccccgagccacagtgaggaggatgaggagggtgggggaacaggtaaagccacccacagctcccccaacctggcagacctgattccaaactttgcctttattagctcatccatctctcagtcactgtttgaggaaggtgccattatgaccccgtttcccagaagaggagatggaggcatggagcagcaacatcactcgtcccaggccacgtggcttgagggaactgtcatgggcgtctgcataccagagttaacccagctgggtggtgaaggcgcacctcctctgttgaccacgctgcccaccaggaacaccctgggaacatcttgccctcaacagcagggcagtctaaacctcccaagggcaaaccagggtgtccacccagaagccctacaccagccgctccccatggctcttggagctcaaaagagtgtggggtcagctcactgtcctgggcattgagcatgaatacaggactgggtcccgaccctaccccatcctctttctttccctggccctctcaccctctcacttccaccagacactaactccagaggtaggcttctcccgctgccgaggccatgttatttgcactgtgagtgggcattctgagaatgccacctgggctgagccagtgtttgcatttcactcaagaaagcaggacccgccttctccaggcccctccaactctcccatctctgccccacctgcagcccaccgtagcccaccctagacccctgctctctgatgtcaagctgtctccagctacacaccaagatccagcagatcttccctgtaatgggtgcctcccagctgtgtcgtcagataaataccctcacgcatgtgcctggggagtccggacaactttttggggcggtaaaaattatatgtgtaactttccacccacttttaactcaacgaggttaattttatttttttgcattctacttccaggaataggtctaagaaaattcatataaatgcataatcttcatagtattacttagatcagcaaaacgggaacaccattggaggtgctcaaaaggcgtgtggctgaaattgagtggagagggatgcaggatggcgcaggaagatggtgagaactcagctgtgaggaaggcgcagaacatgggctgcgggaaggcgtgcagagtgagagaactcaggtgtgaggaaggcacagaacacgggctgcgggaatgtgcagagtgagcaggattcactctggacagagtgcgtatgggaatgcattttcttctttgtgctctacagtagacacccaattaattagtgactgagaaaaagcagagtatccacctggctctctttctgccaagaaccgcgactgcctccaccgctccatatgggaccaccctgcctaatacctgtcttctggaaatcggctccactcctccgtgtgggaccaccccgcctagaactcctaatacctgtcttctgaaaatcagctccactcagagcagcctccccatcgtggcagctccctggtaccagtgccggccaggagatgcacaaccctctgcctctctgccccagccccactcacccgccaagtcccagtgcaaatgccaccttctgcagagctctgctggcttagagtggcttgtgctgatctcccaactcctaggtgcctcggcacgggctccctttatgccacagctcagcactgatcacgccctgccacgcatggctcctgggtgagctcagcactgatcacgccctgccacgcatggctcctgggtgagctcggcactgatcatgccctgtcacacatgactcctgggtgagcttagcactgatcaagccctgtcacacatggctcctgggtgagctcagcattgatcacgccctgtcacacatgactcctgggtgagctcagcactgatcatgccctgtcacacatgactcctgggtgagctcagcactgatcacgccctgccgcatggctcctgggtgagctcagcaatgatcgtgccctgtcacacatgactcctgggtgagctcagcactgatcacgccctgtgacgcatggctcctgggtgagctcagcactgatcaggccctgtcacacatgactcctgggtgagctcagcactgatcacgccctgtcacgcatggctcctggatggtctcacgtgtgatgtgctgcttgctcaaattacatcacaagctccttccagggaaggactctgtctcactatttttgcgcccagcccagtgctgactcaaaaacagcactcagtagtcactgggtgacaacaggaacaccagctttaacactcagaagaagcttgctgaagactccgtctcacccactgcacactttaaaaaaaaaacaacaaaaaaacgcaaaggttcacgtgtccattagagctggccaagcaaggcactgctcataggaaaaaaggctgcattggagtttgaaagcttttaactcacatgattcctcgtttcaactgaatcttccccagtcagctagacttagtgaaactttagatcataacatttcttgatggctgtagaaaaggtctgtgtgtactataatggccagaggaaagaaacctacatcagaaatgacacatatggagttcccctgggcatgaagatgtcagatactttttaatagaaatccacaaatattcagacccagacccttacaccgtggttaggaactcctcaagtagagaggggacagggcacgagaaacaggcagggccctgtatttagcgggtaggtctggctctcacctcactgctgaagcagagtccctgtgtgatgccaatgctcgcacacacggggcatggcaccaggagcccctccccggcttccctaggtcaacagcctgctcagtggaactgtgcctttcacagaccacctaccatgagccttggccttcaagttgaacactttctgttgtgcaaacatgtccgctgcctcccctctatccaggccatgcccaagcagctcctttatcctggtgctgtgatttcaggagtggtggggtgaggggtgtaccctggtggtggttgggaatgggtggtcctctggatggggatgtaccctcaagaggggcgggtgagccttcaggatgggggtctgctcggtcttgtccttctgcgtgtccaccactagatggggccaaccgtgacacgtcactagggccaagctgaagcaacttcactccttgcttccctccctgctcagttgatgggtgctctggcgtgggaagacgttaaaatgccccggtggttcagacactgctcaggggcagcggaacagggcagagcatgcgattcaccactactagggtgggactggttaagacccaccttcagaggagcctcaactcaagctcctgactgcatctcccgcagtgccaagctggggcacccttgtgcacctcagcccacctagaaccagctctgagtcactaatgccaggagcagggcccggcttagacatgccggagtcatcaaacctggtcccctgggcctggcacttccagcgccatgggaacaggaccacactgggggttgacagcgtgaggcagacacgtgggttttcagaagctcctgagagaaatcgcctatggcaggaaggcctggcagagagggcagcggggcgggtgtacctgctcagccgacatacctgtgacatccaacggacgcttttttagagcagtgaccactggcccgtctttcctgcgtaacagggggctgctccgtctttcggccactttctgctttagcctggaccgtaatttcagattcggttcagaagctgcacaaaaaggagatgtcattacagccaggcagacaccactggctcaaggttatcctgttggtggttttttaaaaatacgcactctggtgagtaaatatttgctcaacactgctgtgttgctgcaggggagagcgcagggagctcacgaagcaggggattctaaatcccattcatcagtcccaaataatgaataaaacgaatctggtgctttggataaatttctgtggccacagcattatgcaagcgctggcactgtcttcacagaatcaggccaccactgtttaccaggagatggaaacaggactgacaagctgatttactgggcgtggcaggaggctgctgaggtgtgaagtcacttaatggcgatgtctcgtaactaatgctcttctagataatacacccctatcttcatagctgtgttgctctaaaatcagagaaagactgacagggatgtgaggctgggcccagggatgtgaggatggtgtccacgttgcacactttcttgctcgcccatgcatcgccccagctgtgtcagtcagtgaggcctccagagcgtgaggctgctatccccaccccgacctggggaggctcagcagagcccatcccaacatctgcgccggcttcacctttcatctgaccacagggtgaaggtactgggcgtgggtcggtttctgtgaacagctctgcctgtgtggacagagccatttgcgaatctacacctttcagcccaccgtggtccccaactcatctgcatctggaacccaaacctccggcgcgaggcccgccttgggaagcactagggatctaaaggcagcgaccggagtcaaagaaatccccaaacccacccgggagaggttatcggctttcagagtccagaacagagccaagaataccgccacggagacgtgtgtcacacaagcctttgagttctgaggttttacttggctactttcaagattctaccacttggagatttgcacattagggagattttacctcttcttaaagaatcagcactcctgctgttcttaatctttctggaacaggcagtgcaccgcctccagagcaacaaggaatgagacggagtttctcctggaagcaggactgatgtggctgggcgatggggaccaacatgacttcactctttgggacgtgcagacagcccaggaccttctccactttggaaaaggcttcgagtcagggacagtttttctgcaggtcttggaaggatgtgggagaagcaagctccctaaaacagccttcccagagaaaccagagaggcgctgtgagaaggtaccagactctaagcctctgcagggagcgaggcctctgtgctgtggcacgggggacctggatgacgacagatgacggattcagccacaagccggcctctccacgggctactgacgagggcacacttctgtgcctaacacaaccgaccgaggcaagcgtagattcacaagctccacttctatttccacgctgggtttcttgccattattcaaaagacaaaacaaaaccaaaaaaaacaagccaaaaaacccaactgatgactaggcaagaaaacagtacctcttctctcaccaccagatctccactgaaacccacatgggctctgcagggattccccgggcctgggacaggagccacttctgagaggcaggggctgtgtgtgcccacagaagagcacagggtccctggccctgtgtgaaaggtcttcctcagtggctgccctgccacatagagtgggacacgtggcatcgggaggcgggcatgacatggtcactccaggctaccatggactggctgtggtactgcagcccagtgcaccgcctcccccaggccctgtgggggtcatcacgctgccaccaggtcatcagtcaggcggcagatcctccacagccctgccgggcactccagactctttgtgcaagagactcttgaggagagtcccatggtggctgcttcaccccaccccttccctccactcccctccccttccctcctctccccttccacaggcctctgctccacgcccctcccaaggctgccctgaccccccacagccccactgcccccatcacagccccactgccctgtcttcctcacagcagccttctcaccatctggaattcttctgtcccctcacctgtttaccccctgcctcccagcctgcacacctgcctgggctccctgattctagccgactgcacgtccctggtcgactctgcctgcagggtggctgcagctgaccaggaggctccaggacaccatgccagcactgccagggacagcatggcatgaggctggggccctccgctcgtccctgccccgtgggctattcagcactctgactcccccgcagaacctatcagacaagcagggttttggatgcggggctcggggaggggattgagcagcagcacgtggaccaggagagaagggggatgctggagaccacccggggcacatgaagtggccttcctggggagaacagagaagccctagggggcagaaggcagccgggggagccgcataccacgaggaccggctcactgcctgctttcagggtggccagccttcctgcttcctgccctccctcattacttccaggccgggcatctcatagattgacttaagacatagggacctacaatatcagcccttcaaatgcatgtgtcttaaagcttgcacaatgcctgtaactccaataattctgccaaaggcagccaaagtggaagatgcaggtaagccggcacctggtgactgtgagggtcgaggctgcacgtgtactggctcagtgcagcagccccttcaccgccctcgcgggccttccactcattccaggcacgatgtggccaggtggaggaactgcagaaactggatcccacccctaagagggctgcaggtacattgacagaaccaaagcatcaggccggaggcctcatggaagagttgctcccaccaagcgtgggtgagggcaggaaggatgccaactgtacttccaaatgcagtgtctgctccttagggaacagggagcaggtgggattgtttctcctgaagccaatcaagtaaatgactaattaaggcgatacaacattccaatcacaaccttaaaattcaacgcagtgcccaatgcctagcaggtgccttcatccttctgccagaagcaattctgatggagacacaggctggctcctccaacttaaacatcctgagagtcagctgcaggtgaagcggctctcagagccggaacgctttaactcttaggggccgggtttacagaggggacaggcgtgcacctggcaccagtgtggagggcggtttctttgtgggcctgatgcaatgtccagcggccagcgaggaaagaacccattgatgtagcatcagagaatgcacgcaatatcgccgtgggacagggcgggcaggcagaactgcagagagaaggaggcacctgcttccagctgctctgccctgaaatcctaaagtgacaccaaaggaaatattaaagaggataaagacaagaggacaaaaactaaagtgcagaaggaaggggctggagaaaaagttgagaattgtcagaagggggaataaaaggataaaaagatgaaaaatgggagtgcaaaggtcgtacaacaaattactggaaacgccaggagaagagagaatcagcagggtggagaaatcatgagcagcaattccaggcctacttgtccagctgaagaggagctggacacggaggccaagaatcccccacctgcgggatcccaaactgcttcagagctctggggacaaaggctcggccttgagaacagttttgtacttggcaacagccacatcgagggcaagacgatgacctgaaaaccctgcaggaaacccgtcccaaccaactgatcatccaagagtgcgacagaataaagtgatttaccagcaaatgaggactccaaaaactcatgctccatgcacgacttctccaagagccactggaagacgtgcatgaccaagatggcgaggccgcagaaaggaggccacggagcccgggagaggaggcgggggccaggccgggagagcagaccgttcacacgcaccgggcagtggggccagaagcaccaggcggcctgctgtgcagaggagggtctcctaggtctgctgaaatgtgggcctgaattgatagcaggcaggtgtgaaactaagcaaatgaaaaaaatgatcaacttccggaaaaatttctacgaggtgaatgcagtccaggtggactctggttctgctgtgaacgtgacacacgctgtaataacgcaggcgggacaggcagtcagggacggccgttctcctatcatgaacatcatgggggtctatgtaaatgtacgtttatttacttcggtgaaaataaaaagataattctggccgggcatggaggctcatgcctgtaatcccagcactttgggaggctgaggcaggtggatcacctgaagtcaggagtttgagaccagcgtggccaacatggtgaaacccgtctctactaaaaatacaaaaattagccaggtgtggtagtggcacctgtagtcccagctactcaggaggctgaagcaggagaatcccctgaacccaggaggcggaggttgtctcacttgggcgacagagcgacgttccgtttcaaaataaataaataaataaataaataaaaagataattctaaaagacaaatgacagactggaatctaacttctgtaatacatgaaaacacagcattgcaaacaacatataaacagtacttacaaaggaacaagcaaagacgatgccccacagaagaacaggtgaacgcactgccgctaagcaacctccattcagcactgatggaaccgcctcacgtgccctgcgtggctccagatgctgggcacagggtggctctgaagacagagcctgctcagggcagccccgctgcccagctccggggcaccagccaccctcgactttgaagcacgttgctcacgtgctcctggggagggggcaagcacacagccatgcccgcccttgactgacggtgacggcactgctcactcaaacaccaacaggctcgccatcttcaccactggccacattgcctagaatgaactgcaacaccatcccgcctgctcgtggagggggtggggaaaatggactctcaggctgctggggagggggtatcatttgctcaatgttttggaatatacatactctgaaccagcagctccattttcaggaacctttcctacagaaatactaacacagtgaggaaaggtgctcaaagttgctggcaaaatggtaaccagaaaacagtccaacttatatctatgtcttagactacttgagagaaaggcgttgagcttcatacgtaaaaatggaataatggccaccatataatattaattaaaaataaaggtagaggagaaaacgcaaaatgggtatttttgttaacaagacaactcagatacatacagaaacacaggtacacacacagacacacagatacacacacagaaacacagatacacagacatacagatacacacacagaaacatagatacacacacaggtacatacacagatatacacacagatacacagaaacacagatacagaaacagatacacagaaacagacacacacacagaaacacagatacacaaacacagaaacgcacacagatatacagaaacacagatacacaccccacacacagaaacacagacacacacacagatacatagaaacacagatacacacacaggtacacacacagatatacacacaggtacataaacacagatacagcagcaggaagtctcaccacgctgcacctcctcaagtatataccacaccttcacatacagcagcaggaagtctcaccgcgctgcacctcctgaagtatgtaccacaccttcacatacagcagcaggaagtctcaccacactgcacctcctgaagtatgtaccacaccttcacatacagcagcaggaagtctcaccacgctgcacctcctgaagtatgtaccacaccttcacatacagcagcaggaagtctcactacgctgcacctcctgaagtatataccgcacctcctgaagtatataccacaccttcacatacagcagcaggaagtctcaccatgctgcacctccgtatgtaccacaccttcacatacagcagcaggaagtctcaccacactgcacctcctgaagtatgtactacattacacctttacatacagcagcaggaagtgtgggcactgcccatttcttcctggtcccacccctctccagcagtttctgcaaactgcattagaacaagggacagcaagcaatggtcagaggcaaacagagagccccttcccaaactcagggatgaatgtgagggtggaaaacacactctgtcctatttcacagtaccctgagcctactctacacacagataagaacaaacacttgtaactttattcaggtcactagtacacagggcgaaagccatgagcctattgatgagctgtgggacttgactaatgaaagaaccatgaagccatgaagtggatgcccaccgccccaccttgcagacctgcggacacaacgggaggtcatctagtctgcccaggatatggtgtcgtgggcgccagcctggccacaggccctgtgctcttcctcaccaagcgggacagcttccccccaaaatggaggaaaacccaccctatctgcacatctaagcaatggatggatgtttcccatgggcagccgtgaccttgagtgactggtttcagaaggccccaggtgaggagggcagagctagatgaacacttttcaagcctgaccatggaggcaagtgcagagggagcccaggacctttgactgactgcccagatccatgatccatacaggggccaacagaattcggtccctaggaccagcccagcctcctcccaattcacacccaactgtggggaccaagccctaccaggcaggctagagaatgccggaacaaggctgaagttaccaacttctcaccaaacgtgagctctgggattttgcttccttaaaagagccaggacaatccatggcagtgccacagcccaggccagcagccgggccccaacacatgctggggagagtgtttgctgctaggaccatgtgcccagggacacatgaggatgctggacaaggagtgctgtggagtgcacggttttcagtgctcaggcccaagaagctgctgacaaatgggaacgaactgtgctggctggacaacagttagttagttgttttggcctcctttcatctatcagcagtcacatgaggggaaaatttaagagtcattataaaaaatacacggtgactaatatctttaagaagatcacgatgaagatgttactggggaaaactaagatccctcaacatcatcaaaatgacaaaacgttgcttgcttttaaaagtggaaaagcctccattcctcagcgtgaacatggactcaaaggctctgtttaaatgcagtttctggtgaagccatctgacacccacacagtgcaggaaagatccagcgtcctatgtccatgacagtgatccacacagttctgtctcttctgactatatttaaaaatacacatttggcggcttcacaagtctgcagaaacccaaagtcagggtgacacttgaggctgcacagacatgggaagggaccaggcacctcaccctgggccgaaatctggcgggaggtgaagacctctgaagtggagacacccctgctgccaatctcccaggaaaggggcggggcctctggcaggaagagctggacctgaggccctgggtagaggtctctgactctcaagcccagcggtggaggctcctcctgggagatggcactcaggtgaaggcaagccaggagcgaggagatgagccctgaaaagccaacagagcaagatgggcccttctggccagattttgggtataaatcttggtgttcccatccttgtggtccttctctaagtggaggtgagtggctcctgctggtttctacctgaactgtaggcatggaggcaaggaggtggggggatgctgggtctggcagttaccagtcattggatggagaaaaaaatcaaaaacaccctaacagcgtagagaaacaagagcagaaaacacctcgatctggtcctactcgaaggactttgcaaatattaattaattcacatctcatgatagctccaggagagaagcaatttaaaggtacatttcacagatgacgaaactgaggcacagagaggttcaagagcttccccaggtcccaaggtggcgggtgaaggagctgggtagaaactcaggcacctggtcctgcccacaggtgcaggcgatgtgaatgcccagaatatgcccaagctccgaataggagtcactgcattgctttcaccagggaggtcagacgtttgagctggtacaggcgttacctgtcagcagagccagcaaaggacatgcaaaaaatgcatggggtgacgacaaaattcacaagacagtgacaaagcttttcacatgttcacaggtcatacaattgccctttagagatgcagaaatgggcaaactgtgtgccgggtcaggataagttaatgtaaaatcaaaatcatataattatttaagtctacatcacaattattaaagactatttcagttcattcaaggaacttcataactaaaatttaatgacgtgtttcatattaccaattactgcagaaaagcacagatataacttacttagaatgagcgatgtcatgtgtttgaaagtagatgtcaagggtgatacagggtgtgtaactacacactattctcttaagtggtttaaacgttttctcggaaatctttatgttattattattaatgtggtagtgatgactttttaaaaaactgataatgcaatcaaatcttaattaagttcttctggagcactatgtattctaaataacatttcccggagtgtgaaaacagaattctctcttccgttctcaagaaagcagggagttggagggtggtgctatcacaaggttagaagcacagtagaaggtgttggagactttgcttccaatcatccccagagaaacacaaggcagcatgggaagccaacagccacggaatctacgagagatggcgcgggccctgcctatgggagaaaggcctctgatggtgaacagcagggcagggccgtgacagtgtgccgtctcccatgctgatagccttccttgctatgaagtactcaagctggttctgtttcttagaacaggaggctgatccccaggtagtgctgacatttgggatgggggaggagccagtgcaaatagctcctagggctcccccatccctgctgttctgttgcgagttggggtgtggagctgctgaggaactgctctggggcctgatgggatgggtggtgtgtgctgtcctttcctggggcccttggtggaaaggctccaaatggggagtttctgggaaggcacgtccccacatgaggccgacttgctgggcttggtgctctcgctggaagctccctcctgggtccatggctctggagtctgagtgccacagccatcactcccaggacaagaggagactctggggatgggtgcatgccacagccgtgaggatgtgggtgtgggcagacccactgtgctgatgaggaaatggaggccaggggaacggaaggcatttgtttcagggcacacagagctattacatgaatgagcacacatccaacccacagcacttgatgacaacacctccgggctcccaccctccaccctcggcatcgctccagtttctagggcagggttcttccgggtaggcatgttccttgcctccccattccccgggtctctctcccagcatagggcccaccactcaccgcggactttggttttgttgatggaatttgattaataatagcatcagtccccagaaagggaacctggagggcgatttgtaagaatcagcccacagattctctcctgatactactgggcacatctttctggaaaaaatactgatctctaaatccgttctttctgtcaagctttagggcgctctccaggtgaaatccaggaccattctcagtagaagcatcagtaagaaccacaggctcacacccatgaaacaaagcagcagaagctctaggttcacttttcccaataaaggtttatggcccaaatggaaatgcgcccatgtttgcagggttcttgacttggagaggacatggccgtgctgatatggcccactccagcagggtctccaccagcccgatacggcccactcctctgaggtcacagctggcctgttatgacccactcctccagggacttggccggccccatacgacccactccacctgggacatggccagcccgatacgacccactccacctgggacgtggccagcctgatatgacccactccacctgggacatggctgacccaatacggcccactgctccagggacaccaccgcctcaataaaccctaataggtgtactgggaacatggccggcctgatatggtccactccacctgggacatgggccagactgatatgacccagtccacctgggacatggccagcccaatacagcccactccacctgggacaccaccgcctcaacacaccctaatagagcccactccattgggaacagggctggcctgatatggcccactccacctgggacatggcccactccacctgggacatggccgacctgatatagctcacacctctagggtcacagctggaccaatacagcccacggctccagggatgtggctggctgatatggcctactcctctagggtcacagctggcctgatatgaccctctgctccagggatgtggctggcctgacacggctcccagcagcccctcacaaagcctcattgttccagtgaagaagcccttgtgtgactgagtacgttcactgtttccgcccagaactggccaaaacctttggataacagagaatttgtttagcaaaaaaaagcggtgcccctaggctctcatctccaagagccgccccctagggaggacgccttgggatttcccacactgtcttgcagtttgtaggatccactggccacatctgggatgaggcactgcccgccctcagcacctgctccagctcctgccctcaccaattctctgggcagagcctctggaaggcactccctggcccctgcccttcttgctaccccagcgcactgcccacagccaccctaatcattatctaaagccactgccgtggcccctgagaaagtcacagagggtccgtcctgacttgccagacactgctgcagccgcctctccctgcttctaagatggtccaggcacctgcttgtgcctaaatgcccttctcccttggcttaggacagaactgtggcacataactctgagcccagctgggatatcccctgcaggacatagcgaatttctttctcataaagatttccctcccactctggggacctggaaggccctgctgctggcactgcccagcgccatccctgaaggccacaggctcacctgctctcagacggcacatggcccaccaacaggaacttgcttcaccctgtgaccactgcggggacgcccctcagtgtggcaaaatctaacacaccaccgaaagaaaactaaactgagtgtgctttcaaagtgagtttgagtgttcagcagtggtgtacatgcgttaggttcatttcttttgaaataaataataaggaaatgtttagggatatcttttaaaaacgatgctctatgaaaggagaaaatatttaaaaatctgcaggtgattccttctctaagtggaagacagcggtgggccctgcgtggcttgtggcgtggaaggtgcccgtgcaggagacctcccggcccacagcatgcctgggcactgacctgttttcctaagagggaagtcatctttggcgtcgtacattcccaggaccgggtggttataggaggtcgacactccgctctggggtggagaactctggtcaagggaactgtgctgcgttttcctggagagaaggcaaagacagatggtttagtttacccagcgcactgccccaggcatgctgcagccgagaagccacacacgatgatctttcccttgaaacctcagccccacctcaacagacacaccttttccctagggtcaagctgaaattaaatggaaacaaacaggatgctaaacaagcaagcaaacatccgatgcccacatcctcctctgcgggaccagcagtgcttggggatgggatgggcagcacctctggccgttttcctggtggctgttctccacctggccctgtcctctcagatggctccagcccagtcagttcgctaccagggccaccactggccactcagagagcctatccccggtggggagaggaagaggaaaacagtaggctgctgcataaggaatcaaaggtgagttcataggcagctgagacggggcaaaaaacggtctaagaacaaacgctgtgatgtgtgggactctctctgccacctggagagaagaagcccatggggctgtctctcagaaggcacccatcgtcatccgtgccttcaccaaactcaccctggtcacctccctctctgggggaggaacaggatggcagctactgataccctgtgcccagggagctgacctacgaaagggacttcctgtatgaacagctgggtacaactccacaccctccaggcagcaagacaggaatcgtctgccaggagaatggccggaggacggacatggggaggaggcgggccctgggccgggacggggatgtgggctgccacccggatgaccatcagcaaggccttttttgacggcactgacagctcagtcttgctcaaaacactgtgctgagtggaataaattctgagtctttaaactgcgtaatctgcttaatgactacaaacaaatttgccgacttacttatttggaattggttagactatttgaatacatagtatggcacaccaatgcacctggagttatttgaattaagaatgggagcttgtaaatgggtacaggtgtatatttaaatatttgagagcacaccagtgcaaagaatgtgctgaagggaactcatagacaaaattgaggagccgagcccaggcacctgggcagtggggtgctgggccgtgcatcacaggaggagctcagggagctccggaaaactgcacagcttcaggccacgccccaaccccgcccactgctcagggcacacctccaaccccaagcagcttctcgctgtttcccggggaattccaccatgcagtcaggctcggactgcagggctgggacacgcctgtctgcacctgtgcaggggctgtggcctccaagtgggaccacgtccttgtgcaagcctcccttctcttccctgtagttctacccctcgtctcacaatctcatgaaaaggtctgggggcaacactctttctctaccaaatagtattttcagattgtatcctatggggaatgtgatcttggctgattccaaacttcttcaacaccaggtgacagtctgggaccatttccgcgttcactttttccttcatgggaaacacggagtgacttgtacatgcatcccacgagttaaaaagatcagtatttacataataataaatttaaataaatggaataaaaattattatatttgaacggtaggatttgcttacagtgaagtaggagttgcaaaagttacattggtttaagatctaacagacgttctcttactattctgatctcttgaggtgctttcagtgttaaaatccccactttcctgtcaaaccttaaaacgagcagagcagcaggtgcaggaggggctgggccctgccccccaactgccagcgcctccccgctggaccacctcgatggatccagagacctcacaggagcgacctcacctcctgcatagcccagctcaccgccaggagcacaccatgcagagcccgccccaccgcgcacccgccctccagacaccaggagagggcggccctcaccgtcagggcaggtcacacccgcccagccctggtcacatggtcccaggccagaccgcacacgcgtgccctccgcgaagaagcgtccagcagggcgagcagaagtgaagctctatccctgctgcaatcacacccgcaccgcacacaattactctcactcacatccgcacatcacacaactggtaacactcacatccgcacatcacacaactattcacacccatgcctcacgctactcacacccacccatacctgcacctcacactattcacacccacacacacctcacccatacctatatctgcatctcactactcacctccacacctcacacacacacacccgcacttcacaatacacccactcacacctgcagctcacccaactactcacacctgcacctcactactactcgcccccaattcacactactcccacccacacctcacattactcacacccacatctcacttttcacacctgacgctcgcacctacactactcacacccactcacgcccacacctcacctcactactcacgcccaactacactcacacctgcactgcacactactcacacccacattccacaccccacacccacctcacacccacacccccctcacaacctatacccacccacaccccctcaccttacacaaactcatgcctacctcccgcactcacacccatctacctcacacccacttacacgcacaccccacccacaccccacacacccacacttcatgcctcacacccacccacaccccacctcccacacacacacccgcatctcacactcacacctgtcacctttcccacacctcacactcataccccacactcacctcacccactgcacacacccacatcccccattcacaccctacactaagctaaccccggccacagcccacactcacactcaccccggccacactccacactcacacagtcacactggccaccccacggagccctgagggcagaacctacagagctgctccctctacctcacctgaccataaattatcttccgatttttcaacctttcatttcctgcagcctggggatgggacacagacgctgggccaggagccgaggtgcagcccccacggggccctggggccaacccggatgccacacctaaaggcaaaccttgtcttccggaggaagatggaaaagcaaatactgttttcttctaaacactggcttgactgtagaataaagcttcatacaaactcaaccatttcagttccaaaccattgccctttcatcagattcgtaccagtgatttccaagaaatacaacgaggaaccacatacgccaggatactccagcagaaatgtaccatgatgggagccacatgtgaaatttacaatttcctagtagccacattaacatggataaaaataaatgggtggaattaattttagtattcgattaaaccattataaaaaccatcctttcaacttataatcgatataaacatattaataagacaccgtaggtcctttcttcagaccaagtgtctgaaattccatgctctgcatctatggcatgtcctggtcggacccagccacgtttcaagtgctcgggagccacgtgtggcttgtggcagccacactggaaggtgccatcttgtctcaacagtcttaaagctggaagcggtgactcacgtaaacacccacagagtccacgccctgatgaagccacagcaccatccatctctgcagcctcccagccctggtctgctttctctcacagtcgattcactttgctgactctgaatttcccatcagtggagtcatgggggtggcctctttgtctaggcaccgtgcctctggggctcccccaagctgctgcaggcgccagcggtccgttccttgtcactgcggagtagcagtgcaggggccccagtttgcacggtagcgtgtgcaggggccccagtttgcgcggccgttcccctgttgatagcttggttgtttccactgtttggtgactgtgaccgtaagatgacgactcgtcgtgttgcttgctttcatgtcttgggcaaatacggagaagcattgctgggtcacagggttggtgggtatttgtctttgtaggaaactgcctgcctgttttcccacgtgtgattcagattccaacaggcagcacacagaggtccagggacaccgcatctgctccagcacccggcctgtttcactccggccatccccacaggtatgaaggggctgcttgccgcagttttgatttgcatttacctgatgaccagccatcttgagcatcttttccacacttactggccatccccatgcctttttttgtgaggtacctgttcaaaccttttgaccgtatttttaagtgggcggcttgtctttttactattgagttataggaacgagctctacattttggatacaagcggtttgtaagatatacgcattgtgaatatttccttccattctgtagcttgctttttaattttcttaatggtgcctttgaaagagcagaagtgtttcagtttgtggaaatatcatgttttgggtttttggtatctagccgatgattttggcgacctaagaaatcttgcctccccctccccatcaaggttgggaaaagtttctactaggtctccttccagtttgatcagttttgcgtctaggctcaggtctatgacatctgaactaatcatgcgtggtgtgaagctgggatcagggtttcagttctttccctatgaagagccggttttctgacaaagtttctgccaccactccatgatgtttaagttcagggttcaaatacggcaaaacaagaaaaccaccaggctccaggaaaacaaacctgtcctatggctgacttgagatcaagtccttccccctccagcctgaaggtccccagagccctctgagaagaagtacctccggcccctgccattaaagccagggcacgccgcccttgtccaggccaagacactcaccttgaacacccagctcacccagggagttccaggaaaagtcagtcctcccagccccagccactctgtttgccacccctcctccctggaagccccccatctcccgtctctcagcacgtccctcagcgccctgaggctgccccaggccacttcttctcccgtggcctccttgactgcaggtgcagcctttccttgggcctgctgctccgtcctcccctcaggtccaggccactgcccggcttctattcctgctggcctcggccccccgtccactgtccactgactcctgggcgagggggcgccagctccccaccttcttccatgctgccgtggccaccctctgggggctgccctgtgctcaccgtgacccctgcttcccagcagccccactgctctagtcctccaactcccgctgcagcctcccagactctgtgctcctcttcagaaagggctgcccgtgcttgccccactcctatcactgtcttctcaaagctcgcttgctcggctgcctcacagggggacccaaggcggccctgccctggtccagcaggctctgcactccagctctccatcctccgccaggccccaggcccaccctgcccctggctcctcatcctgccctttccagcttgggccccaggggcaccatctgaaccacgatccacactcctgtcccttgctccttctgccctgcaaccccacgccctgccccagccagtaggacaatggagtttctccacaaccagtccaggcagtggactggctctgggggcacagatcggggtctcccccaaagcgggctcccaggtgccggttgccagcgattctcaggaagccacctcctctctcaggtcccagtgggtcactgctgtcacgtgctgcctcccatggacgccggtctcactcctccttgcaagtttgtgtgtccctggtcgagttacccaaatccagacggtgtgtctgccgtgagtgcagcttatgtgccactggcaagcacagcggctgccagagtggaggacgtgggccacctgtgctggaaacaccttttgggatgtgtcggggtagcgggcggcctccacggaaacaagggggatcgcgtctgagctgtgggggggtctcactacacatagctgtccattttgaggcttgagaatagctattttttttccaacgaaattactgatatttcgatttacaaaaactcccttatgggatttttttctagaaatgaaatgaaccttgagagcagcagaaaactacatttcaaagcgatcctctgttgcccttgctcactgtttcaagccgcatcacctcgccactcgctcgcactgtgctctgtgaactctcccccgaaggccttcttttgcatggcaggtcggctctcttcagtcctcagacgaacaagccttttgtggtctctgtcaattgcgtgggccctggcagggtttcttagtataaaataatagaagtaccacgggggcttcctgactagcctaagaattattgaaacgtcaggtgggagcgctgtcggagcacagaggattcagacaagagttccagtttaagtggctcttattgtggctgaaaaatggcacaacattaccaagagtaacgacaggcaccagcctccggagcactgctcggtccctctgcaggggggcccactcccatgaggacggccaccgtgtgagtggacccccagaccacgtcactctggaggggggcccaccccgtgaggatggctgctgtggaagtgtacccccagaccacgtcactatggaggtgggtccccctgtgagggcaggggcagctgccgtgtgagtgtacccccagaccatgtcactctggaggtgggcccctccgtgaggacggctgccgcacgagtgtacccccagaacacgtcacccacatccgagcaccactgtgcttggggtttcaattcctcaccctccttccctgcctccggtgaagagctggctccatgcaaatctaccggcgatcagacagtcctctgggcccccagagaggaggccggggtgctccccacacccacacttacccgtaccagtagcgagggtcgctggaaatgcagtggttcagattccggtgggccagcgccttctttttattgaggacaaattcttgtaacttcatcttcacttctgtgctggccacggcacctggcgtgggagaaagcatagcagggggtgaagtgtggctctgccctacagcagcaatgcagggcagcggggccacagagggagggaagggctggggacggctatgcaccttcaggacgctgtggcctcctgagcgcttcctcaaagaaccaaggccgggaggggttttaatgagaggttttcttcccatcaagattttacatcattgcattctatttaaaatgcagatttaatcatccgaaagacttattgttagctaacacaaaacccacttctgaaggaagttttaatattcttacataaaagaacactctgaattaggcagtggcagcgtggtggttgcattcttgctaccgcaaagcagaatctaagagagaaggctttgtgcaaatggatgcatcacgcagggacaaagccagtctcacaggcaggcgtgcttccttctacacctgcgccgacatgacggccggctctgcttccaacagcatcaaagggcagcgcctgtcctccccagcttggcagctcagactcaggcagagtgactgcaccaagtgggaccgaagtcgaaactgtggttttcttccgtggcggtgattctttttcaaagcctcattaaagggaactggcaaaaaaggccactctcaccgcctgaacacaaggcctgttagcacggaggctgctcgcctcagatctccaatctaaccacacagtacttctatccttcttacagcaccttaagtatcttcctagtgttgcataatattcagatagcgtttgtaatggtcaaaaacacaccttgaggtgagtgaagcatgtttacaaaaccacttcccgactgggagacagttttggttgttagaaaccacgctgcagtgaacatttatgagtgggtaacactgactacctttagaattacttgcttaggacatcttggcaaagtgactacatctaacaaacttactattctaaccctcggcacatcttggtaaattgctgtccaaaatatccctacacataggccaggcccgaaggctcacacctggaatcccagcactttgggaggctgaggagggcagactgcctgaccccaggggttcgagaccagcctggacaacatgatgaaaccctgtctctactaaaaatacaaaaattagccgagtgtggtagcatgtgcctgtagttccagctacttgggaggctgaggtgagataatcacctgagcccgggaagtccaggctacagtgaaccaagactgtgccactgcactccaccctgcgcaatgcgagtttagaccctgtctcaaaagaaaaaaagaaaaacgaaacttctctacacgctgaccccctgaaccacccatccacctgcagcaggggcagctgctcctcctgctggtcctcaaatcaccatttgcccaaatccaaaagccagcaggcatcactgtgaggcacccctgagcaccactggacacgcgccgatttcctctcttgcaagataattcatgtccttggcttatgtgttcttagaatcttccggcgatgtgcacagtggtgttgtgggtctgtgtgtgtgtgtgtgtttcatacttgtatccactggagttgcgtgggtttcttatgataatggctgtatcgagagcctagtatatgccagccctggcctggttcggcctcgcatgagagctataaataggtattctcatcccccgactgtggatggagaacacaaaggcggccaggtgcgcctcaggtgaggttggctcagttaccaagtctcatggacgccctggttcgtggctctcggctgctccgtgtgtgtgtgcatttaccctgcctcttgtttccttttacaatttgggtaaaatgttcaaatgcttgtttttataaagtctattttagtttttcctttgtgagttttccctttccttaaaactctgccattgttcctcctttcagtggttaataagccatcattttaattttatccttggttctggtgctgggttttcattcatttggttatttgctaaattttttcatgactcactctgatggctcagaaatggatttggcatataaggctctatggatattctgaccaactgctaataaatgattaatatcattagaaagatgtcttttccttgccaccttcatcacataccaaatgtctttgctgccactcacaaatggagtttttgttagttaggctcattctgtgttccctacggcagaaccccactcccattacattaaggtggaactttaatgtctggtcaagggtcagtcagcaatgagacgcctggaaacagggtctacccaggctgtggtggggcctgcactagccaagccagggaaacacaaagacattaactacacgaccaccagcatgagtccgggaagggccaccgtgatgcatgaggcttcaggctcagggctctctgtcggtctgagaaaatcatgtcattgcccgagtcaagctgtgcctgtgacgtcccccagctcatgctgctgaagatgtctcatcacctaagttgtgactgcggtgagcactgccccaggtagggtggcggtggggggacaggagggatgctttttcagggcacccggcgttagactcgaacatcacttagaagcacttttagctgaactgtctgtctgtaaggggactggtcagaagatcacacacttatggaaaccattcgcttctaccattcccaggcatgtgagcactggcattcctaaaagattatcagcaacaggctgctaactttggaaaaacagacccagacataaaccagagagttaacctcgtaaatatacaaactgcctccacaactaggaataaaaggaaaggccgggcggtggggaagataagtgagcagagaacacagaaggcgaatttcaaaaggagaaggcaaatttgccaatgagtatgttaaatcagcttaactttactgataaaagaaataagaagtgaaatgggtaacttcaattttttgcctttacacggataacatttttttgggtactacccatgctgctgacagtgcagggaagtagtccaaccgcaaaatgatgctggtgacagcgacagtgaggatgaggacccagatggccagttgttggaggggactgccctgcaggtccccctacatggccgtccttgagtggaggcagcagagcaggacaagaagcaggttctcggtgtgcgggacgaggacgccctcaacactttccagtagacccaaactcagtgcagtcagccttacctgctcaaaacaccagttcccagggacagctgttactgtggatccactggccctccacgggggagggtgcgcactccaggaacaggacccactttatgacccacgtcctctccctgcttctgcaaacaccattcggtggcaaagggtgacttggccacaagcctgggtcctgcctggctccctctatgcagggctgggtgctgggcatgactggcgttcatgccccatgcagtggggggcagacatgactggggttcacaccccacccatgcccagcataggcctggccagcaggaaacacgaggaaggtaagtcttcgattcatgacctttctaaccaccaaggaatcttcttttgatctttcagactttactaggagagtattcaaaatgaggggctgattctgacccccaccccgtttctgcacttctggttatgcacacgctcatctgtcaacaggtttctcacttaaagttctagaatgaaaaaacccattcaacaaatggatagcagatctccctaatttttacttttactttttttttttttttcttaattcacattgagtatcactcatcccctgcatggaggcttctacagaggctctatgagatgccagcccgttctggccagcagagatgaagcggtggataaaagaggccaagttcttcccataccagggggcagagagtgcacccgagacctaaggaatgagcgagcaacagctgagcggggcagagagaggaggacagcagctctgggtggggcggggcggggcaggtggggagggacggctgtgttcggggagggacggctgtgctcccggagggccgtggcctgggcctggcgagtccagacgacagagctgtggcaggttctgcttggcttctgcctgaaagtgctcctttttctctccacccccttgcctctgaggaaggcacaacttcatggaaaggacacctaatgactttcaggatcagcctttcacgtcatttttacacagagcaaaggacttgctcagtgacctccctccattccctgcagggctgcgcgtgtggaccgcagtgagagaaagcggggctgtattcgctccacactgctcgggccgagtccagcctgcccctgctccttccccgagcttatgtgaagagccgtgtcttagattcccaagtgccgttaatctaaatcaaaacctagctggttaaagacagtgtgttcttgctaaacatgatgaaaactgccaccgttctgtcaaatgaattgcattacttggtatcaataaataaaagtgcagaattatttaaaattaaaagtaatgtaaatgtttataagtgtaatgatatttattagatactcaataagaaattcacttaaaaaaaacccaagagaataaacagatgctgtgcaccgtgttttcaaatgcttagatgctggcggtgcttcgtgtcccccgcgccggcccgccactgctcctccagcctgcacagacaagaacctccttcatgggggaagacgccggcttgggccccgcttacataagagcccccgagtggcgtccaccacaggggcctgcggccctgcgtcctcaccacaagaccacactctgagggctgcagagccgacacaagcttgccaagtacccaactgtacacagtttattattaataataaaatctgaccacccaaatcctcagtgaaaaccaccgggacggccgcctgtgacggggctagaggggagcaggaacattccagagctccagttaagggtggacggcgcttcggatgcagcgcagggattgttttgggctggtaaacggatccaaaatgttttctgaagtgaagtcttttcatattctgtgagcctcaagatggtatttttattggaagagtctggtaaactctgaggaagtaatttagaccaagctgctttttagcaatctgaaaaactcttatttgttggttagttgtggcacaaatcacccagctgatatttaaattttaaacttcaattctttgataagcaactattttccctactccaaagaaaaatacataggatacaccctgggctaccggcgaaccacagaagcgtggaggggaggccggaccccaggcagaggccccagtgcttgggcccgtggcgcacacccgcgatgtgggtcccacgcacgcctcctgcactgcagcgtcaccagcacaggccagacaagtcaaagccccgcgcacagggctcccacggggaccgcgtgctattgtctacggaaggcagctttctaaagtggaaagcaaccccacagggtgggccccgcccagcaggccgtggagcccctaagatactcagattcctcacacgtgaagccagagggctcagctgcgctcctggtcctcaacccaggcaacgcactaggcagcttcagaagcaagaacactgccagccgggttccacttgggatcagtttggcagaacaccctggagtgaacagagacccacagcacagccgtccactaccgagagggcccggatctgcatgcaaagaccaggcgtgcgtgtgtgcagccctgtctgcagggtccttctcctcaaggcctctgcagccatgtctggaagctctcccctatgccgccccgtctcctcaaggcctctgcagccatgtctggaagcgctcccctgtgggcaatccctggggattaagtcaccaccttatctaatcaatgtgccaggagccagggccatcaggcagatttggtactcactttcaaatcctgatgcaaaaattagacctacaatggaatataaaccctcctcagaggccttctaccttgaaattctaccagttaaagtgaaaaaacatttaaagtgcatttattatttcaagagtaaaatgctgtgataattgataaaagtgttagttttatggacaaaaacaattactaagaacttggaaatagctaaatagaggaataaactaaaaactcagagagtgcattagctatgtactcttaggaaaaatatatctagtctgaaatagcaaatatttataaaaatgtacaacataatataggcataataatacagtttagattatatcccaattctaatttagcattagttataacattcattacattaaaaataaacttacaaactgaatttacttaatagttatttaattctttttagaacacaaggatttcaaatacaaacaaatgaacaaaaatgtcctatttggaaaaacttcaaatctagtgcagattaattaaaagcaaaatgccaatttcacaatctaaaaattatatgaaggcaaatcaccaaacacaccaaatattaacatatcctttcactccagacaaaacgaagaacataaacagtataaagaacaggttaggaaacctggagtactccaagcacatggtgttttcaataatgtaacttcaagaatttttattcaggtaattcaattaaacctactggaaatggtcagaagatctagacaaagcaccctagccttctgtgtgaaggcacagagaacaactagggcagcatggaacaccagggccgaggtcagaaacagggaccgcggggagcaggaccccaccctcgggtagcctgttctctagactcaacagtgggtttcggaagaggcccttgatagggccacaaaaactgaggaaaattaaaggaccccaataaacctcatgagcttgtgcgtaggacctcaaagggatatgccttatgagtaacgatggccagaaatccaccaggcctttgaaggcctgaaacccaactcagaatcagctccagacctgactgcattcagatgcttaagaaacttggccacttctggtcaactgcaagaaggaaaacaaagtccactcgaaaagaatgtgtcaccatcccaggtcccccatcatcacaacagtgcaaagtcagacatgcaacctaaaatatccaaccatagaaataaacacaatctgaccaaaaaaaaaaaaaaaaaaatgagagaaacaacaggcaggaaagccttgccacagggccagagagtgttaccagtcagactccaaaataactgcactacgtgcagaaaaaaataagatcaagaaagtctatggaaaactatgaaaaagggccaaatgaaaatcctagaactgaaaaccaaataaatgtaaaatccaatggatgagtttaacagcagattattgtgcaggtaaagcacaaattagggaagtggatgataaattggaagaaaatacccacactgaggcaaaagaaaaaggaaacaaagacacaaaaataacttaagaaacttaggggatactgaaagctaatccaacacaggtgtataactaaatcccagatagattaaatggagagactggggcaaagtcagtatctgttgaggtgaagtttgagaataatcaggtctaagaattcataacagtataaaacaacagatttaggaattacaaatcccaaaaagaagacattaaaatgaaagcaactacagttaagcacattaaagaagaacttcaaaaaaccaaagacaaaatcttaaaaatagctagggaagaaagattatttccaaagaaggaacaataggatggacagctcatttctggagattaacaatggaagtcagaagagaatggaatggcattctcaaagtgctgaaagaaaataaatacaaacctagaattctatactcagcaaaaataaccttcaaagattaacctgaaatcacattttgaacagaaagaaaattcatcaccattagacccacattaaggtaaacaaagaatatcacagatgaaagttcagacatgcagaaattaataaaagtggaaaggataaatttatgagtaaatcttgactatataaaataataacaacaatgtcttgtgatgttaaagataagtttagagttaaatacaggtcaaaatagtatataaattaagagttaaagtatcccagacccttactttgccagaattggcaaaagtattaatttagataaggctgtgatagattaaagacagttgttgaaatcctactgataatcagtaaagaaacagcaaaatagtgattaccaagctggtgaaaaaaaatatatatatatatatatatatatatcactaaaaacatacactaaaggcaagacaagtgcattagaatagttgagataattataattcatattgtacaatgatagatttaagcataaatatatcaataattacattaaatgtaaatgggccaaactaattgaaagacaaagattgtcaaactacgtatcaaaacttgtgggatgcagataaagttgcatttagaggaaaatgtatagctatataagcatatgttagaagacagagctgaaatcaatgctctatgtatctatatcaaaaagctacaaaaaccacaatacaccctaagaaaacagaacatagagaaataaaaatactagaaattaatgaaatcgatattcaacaaacaacatccataaagtcaaaagctagtctttgaaaagaataactgataaacttctggagagagtgaccaagaaaaacaaaagcaaaacaaaacagcagcaataaagagaaaaagcacaaacaaccaatatctggagtgtaaaagaggacatcattaaaggtctgacagacataaaaaacaccagaaaaggacatgacaccaaaaaccactaagtcaaaaatacaaaaatgtataacaaaggcatatatttcttttaaaaaaatacaacttagctaaagtgagccgggggggaaaaatgtcccaggaactattttaaaaattgaataagtaatcaaaaacctttgcacaaatgaaatcttagggttaagatggctttagcagtaagtttcacaagatatttatggaaaaagtaatatccatgttaaataaactttgccagagaatacaaaaggagagaggaatgatgcttaactcattctgaggccagcacagtcatgacaccaaaacttgacgaggacattatgagaaaggaaactgtttggcaatctccctcaggaacacagttgcaatcatacaaaataaaatgttagcaaatccaagttttcactacataaaagataatatattacaatcaagttgactggggttattttaaaaatgccagttagaatttatattcaaataaatccatatgctttacttcattaaccacataaagccaaaaaatcatacaatcatctcaaaagatgctgaaacagcacctgacaaaaatcaatatccattcatattgaaaccccgagcaaacaaggaatggaagggaaacttccatgatctgataaatagcacctgtcaaaaacaagtagacaaatgagtaaaaaatacaaagcccctacagaaaacatggcacctaacagtaaactgggaaccagacaaatgttcctgccatcaggaccacaatttgatactatattggcaatctcagcccattctatataataagcaagtaaaagacataaaaggtattccaatcagaaaagaggcaatcttctcattatttatagatgacaggattctaaatgttgaaaattcaaaacaatctattaatgattaggatatctgagtttaacagggttgctggacacaaagtcaatggtcaaaaactgactgcttttcaaaattataaaaaccaagccattcacaatagcaaccaaagccatcaaatggcttgacatatatttaatcaaatatatgcaagcctcctaaacataaaactattaagaaattattaagaaaaattaaagaaggtaaataatcaatgttgtaaaaatatcaggtcttcctaatttgaaccacagagtcaatgcaatcacaaacaaaaccccactagtatcaattccaggtacaatcagctcctaggagataattaaagaggatgtatccaagattctgaagaaaggaaagatttcttaaggcacaaaatcatctaaaggaaaagactgaaactgtattagaagggagaatttctgtgcctgaaagataacattaagagagtgaacaggcaaagtacagagtggaagaagagatttacagcatgtacaactggccaagggttgattccataatatataaagaacaactccaaatcaagaaaaagggagacctcgcatcagaaaaatgggcaagagactggaacaagcacttcacaaaaaggggaatattcattcggcaaaaaaaacttatgaaaataaactatcttattggtaatcaaagaaatgtagctgagggcatgaggaggagctgaaattaaagtgactgacagcagcaagtgttgacaaggacatggagccacaggaacccctgtacatggctggtaggagtgtaaactggtacactactttgaaaacttttgggcatcacgtatgaacactgacaacatgcatgccccaaagttcaacaactccacttcacatttgcccacatgtaccaagaaacatgtacaagaatgcacatagcaatactgcttttaatagctctggttaggaaacaagccaaatatctaacaactttagaagaaatgactacattggtgcatttataaatgggacaccatgcagcaatatataatagataatgaatgacctcttgctaaatgcaaaatggggatgaatttcacaagcataatgtccacagaaagaagcaaaacgcaaaaatcctacatattaagggttccatttacatacatttcaaaagcaggcaaaattaatcttccatgttaaacatcaggagaggagttatctttggggaagggggaagtgcataaggacttctcttctgactcatgggccagccctacaagagtaaatccctctactctccttacctggaatcctgttacctgaggaaaatgtatacctcgactccttttcagtattaccagggaacagacaaatttaactgagcatgtaagtcctgggcagaaactcggagtgtctatgaaagtcccttcactctggtgattagatcctgactgtctgtgtcacttaaaacaagaagttgtccatggaaaggatataaacacacagtgagccaagggctcttttaagtgaagatctgagaggatgctcagagctgactcagccccacggtggaccctgcaccccggggacacgccagggctcagacacactggcgacgctgggcaccgtcctcgtgcagaggagcccacgggtcatcgtcccagcagcccacagtcagcaggggcgacactgttaccttttcctcagtagatgcgtccctctaactgtccaaagtgggaaacagcaaatacagtgttctcctggatagtatgaagtgtgggctctccttagaagaaaacagaccatgctggtctccagatgtacaaacacagcccccacagaaggcaaaattcagagtggaaggagcagatagcaagagcacgctgctggccctcactgggccgtgggtcactctacaacctcacacctgctttgaaggcacttataaaatgctcccgaaagaaaagtactttgaaaaatgcagggcagaactcacagatgaaattcactgtgcatctggcatgctttatggcttttaatatttttaagtctattaggaatcctgccaaatagtctttaaaatgtttaaatcaaaccaaaagtcgggctgaatgccccttgctttgatgttaatattgaatcctgcagccctggatgaagataaatccatggactctggttcactgggggagctaaccatgggtgggctgacacactgtcacactcactgtccctgtcagggggtgggggtcccattcctggcctgcttcttagaaacccagcacaggcaaagtggcaagagtcaccatggtgaggctcagctgcccctagatctttccctactccccgtgtgctgccccagtgccctcctgcactcactccttctgcccctcaccttccggagtccatgcccccactccctccctctgcccggcctccctccctctgcccggccttctgcgcccgcactccctccctctgcccagccttccgtgcccgcacccctccctctgcccggcctccctccctctgcccggcctccctccctctgcccggccttctgcgcccgcactccctccctctgcccagccttccgtgcccgcacccctccctctgcccggcctccctccctctgcctggccttccgtgcccacactcactctctttgcccttctccttgttcttgagctgctgcagcttctgctcccggtgctgcttctccagctcctgctcctggcggtgcctctccagcttccgctggtgttccagcagctcctgctggtgcttcatggccagcatctcctgttgttgctgcaagtggaaggaggagacagacggtcagagcccaggctccacacacacacagagacccaatgaagacccaagaaaccagcccaggccctacacgtctgccctggtgtggccctgggcactgccctgccctgcactgctgctatttcagtccaaaaaaagaagtcagggccattccgggctctgggcattgtcttaccttcgaagtggaaaacattaaaaacaaaagccattggcttgctagaagaaaatacgcaagaagagttatgttatcttgcaagttggaaatgctattttgagaacgacacaaagacagtgaagagagcgtgaaatggtacaaccacttcagaaaactgctgggcacttccttataaagttaaatgcacatctgccccgagacccagcaatcccattcctagctatttatccgaaacacggaagcacacccacaaaaagcctgtacaagaatgtgcatgggagctctggtcacagaccagccttgatgcaacccacatgttccctcgaaggtggacacttggagaaatgatgtgtgttcatcaaagagaataccacctaaccataaaaaacaacaacctacgtgtacacaagaaaacacaggtgaactgctaaacagcaggtgttggcagagggtgaaagagcagagagaagaggcaagactgaaagaccctccgctgagcctctgcacttgcagctccagatccgcacattccaccacagcctggtgtggaaatacgggtggttggccctcagtgtctccaggctctgatcctccgctggctcaatcagtggaggtgaaacccaaaaatatggagggctgactatattcacatgaagccctaaaacagaaaaaactaacgcacaaggatgaaaatcagaagaaggctgcctctgcgggggtgaggtagggttgggggtgccgaggccggaggaaacgccccagcgggtggagtgtccgacctgttgactgtctacagggaagggcacagccacccaacagcacccttaagggctggcattctaccgagtataaattatatctcatatttcaaaaactgacgtcgacataaaatgtttgtcttaataacaaaaggcagaaggtaaaagaaaaactgcagtatttatgacatacaaattttatataaatggttgttatccattaatgagaacatgacaggcagcccactaaaacgttgggcagaaaagaacaagatgcacagaagaactgtttaaaaagaaatcgggataaatgttcaagctcactagtgaacacttcccatttcactcacggtatcggaaaaggtgaaaaggaacaatttggcctggcgctgacgagtgtgggaaggtgcaactgaccagacgccctgagagggactcccgcaaacccagagcacctctgtcctgggacccaacccaggctccagggctcccgcacgtccttccgctcctctgagatggctccgctctcgttcgcatgctccagggttctgtctgcacacactttcctcggcttccacacaaacccctgggccagcccgggggaagtgccaggcctccacaggtgtgaggagctctgccacctgcctgcctgggagagcctctctgccaccctctgtggccgcacgtgtcccggtcatggtctgtctgctgtccccagtgattgttccgttaccagttgtctcttgtcccagtgtcttgtttattttagacatagggtctcgctctgttgcccaggctggagtgcagtggcgcaatcatagctcactgtaagcttgagctcctgggctcaagtgatcctcctacctcagactcccaaatagatggcagttaattaaaaaaacaaaattgtagagaaggggtcttgctatgttgcccaggctggtctcgaactcctgggctcaagccattctcccacctcagcctcctgagtagctgggactacaggtgcacaccactgcacccagatacgttttcttcttttttgatgaaacaagatcttgctctgttgctggggctggtctcaaacccctgggctcacgtgatcctcccgccttagcttcctaaagctctgggattacgagcgtgagctgcctcacccggccactggtgggttgctttttgttggtcttgctccccttatggaggaagaggggacggtgagagggtacgggataagcaggcatcctggcaaccagagtggcccgaggaactttctgtggaggaaatttagtgaatcaggggctccgggctggctccagagtggggcttccaccagctggtgattcttcctggaggatgaggctcaggccagggaaaggatgagcaaagcatagagtggggtgtgtgtgcgaggcagccaccggatgcccgaggcatagagtggggagtgcgtgcgaggcagccaccagacgcccgaggcatagagtggggtgtgtgtgcgaggcagccaccggacgcctgaggcatagagtggggtgtgcgtgcgaggcagccaccggacgcccgaggcatagagtggggagtgcgtgcgaggcagccaccggacgcctgaggcatagagtggggtgtgcgtgcgaggcagccactggatgcctgtgctccatgagtggctgcgctggcacagcaggactggcgcccatgggatgccacccacgtcacactgtcgtccctgtgtattcttcaatccctctacgacaggggtccccacctccggccgtggacgggtagcagcagtccctggcctgttaggaaatgggccacaaagcaggaggtaagtggcaggctagggagcattcccgccagagctcaagctcctgctggatcagtggtggcattagattctcacaggagtgtgatcctgttgtgaactgtgcgtgtgggggatttaggatgcatggtccttatgagaatctaacgcctgatgatctgaggtggtggaagtttcatcccgaaaccattctcctgcgtcccccacccctgtccacagaaaaaaccatcttccacgaaaccggtccctggtgccaaaaaggtcgggaccgattgccgctctacaacaaatgcgcatcacttcagagcaagaggtgataacaaaggaaaatgaaaagtggctgaggggtaggaaagcagatgaaaaggattacatcggacgggcagaggcaaccccgacagagtagggccagcagggatggggggctgggtccctgaggtgccacagcctgagagcccacgcggcgtgctcagggtgggaggcggcacaagccttctgctacagggctcgctgctccaagacaacagggctgcccgcacggaggaacctgcacatcaacgtgcttgtgcacccaagtgtgcgttctgaatgtgagtgagcgcgtgggattgagcatgtgtgctccaggtaactgtgagcgtgcaagggcgctgcccttctctgtgggcgccaaccttcagcggcgttggcaaggtgacgggggcaggcggtgtgtgtccgggaacatctcctgcatcttgctgggtccttcttcacatgagaggcccgagccgactggcaagcttcacacccttgctgcccctgcacagccagcttccaggtggccaccacaccctctcctgcgagagcctggaggtccagctcagcccccgggcacccagcacacacacctttccaacccctaggcttctgggaagatccagcctgcaaaaacagcctggcccaagccctttcatggtcacaggcggtgcaggggatgaggaatggcctcaccagggcatcaatcccgttcctggacctcgcttcccactgctgaggactcagccggtttccacgaccacccagaaccacttgtaaatagggaagaaaggatttcagcttgctcacagcctcttcctactcaagatgagacatgccagtcaccccgcatgtctgtgacctgtgtgaaatttgaatcacattgtgtccacgatgttaaacgtaacatcaactgtgtaattttgtaaggtaaaactcctcattcttccattctgtaagtaaagcccccagcccagacaagggacagagacaggcattggccaaccaaatggcattcggcaacctcaaactggcgctggcagtgaacaagcaaaatgaacatgattgcccctcatgagtgccccatgtggatggaagggtgtgctgggccgctgccccccatggcccaccccgaggaagagtccccaggcagaaaccgcctgccccattgcagtgaccccagcagatagctctggactgaggctgccccagcctccaggacggagaccacagcgctggtctttcccggcccacctgggctgggtcattgcagcctgcagcccacagccagcctccccgtccactgtcccatggcagcggaagtggcctggatggcagagccccacaggaatcgcttggagtccagggcagtgggacctcgggctctaggcaggtctgcccagtcacacctgtggtcacacacagcaaggatttacagcagcagagagagcagatcagcatccagacattggggacaggacctgccggctctcctcacagatgaaaagccctgtccacaaacacgcccacccacctacagccctcacaaggggggtgggactcaattccagccaggagcacggggatagaagagctgcagaggtggcaggaggtaggcccacacccaaggaaggagggaggagaggaggggctgaggcaagaccctacccaggcaggtgcaatgcaggcttgccttccagcaggggtgctgctcctggcagatgtgtgggcacaggcaaggcaggaggcctgggtgggccgagggagagggggcacccaccacgcccggcagcagcgtgtgcgcaggaggggcagggagggccgtcagggctagctgcacacaccaagcatctcacctgtatctttcccatggcaaaaacttaattccgaacaaccaacttaaatgaacttcttggggatggtgggataaacataagcaagctcttgccgtgtccttcatcagggcagcgctggcctccgaagactcacaggcggcccatagcacgctggctggagggcagtgcccaggccaggctgcctggctgataaaacctgctccacccacctgcttgctgccagcgcacttgcacctaaatatttaacctctccgtgctgggttaaatgtggcacctgcccccaagggttcctgtgaggactggaagaggtggcatggggagaacactcagaagagctggtctgggcttgcctccgtgcggcctgattgtcatcaaaccgtcacttttgaaagatgtcgcctagagacgccgacttcctgcagacactaaatatcctaaggtaaaatcaggccccctcaaggctagggagatactacctggagcacaccttcctaacgcggtgttccttgccgccacatgcaagcaaagtccctctaccaggacaaacatctgggcatgtacagattcaggactctgccctggggacccggagctgtgtacacagggaaaggtgccccgagagcatccctgggccacactgtctgcagattgggaatgccaccagcaggttaacctataaacatacaacccacagggcttcggggtgcttctcagctcagaaaacaaacacagtcctttgttgaactgatctcctcgtcatggcgagcccctcccctctggctgtcacctgcacagggccccttggctccctccctcccgctgctcagagctcactcagggcggaaacgcagagcggacagatgcagcctaatgcagtctcacagtatctacttgtcagccagaacccagagggaaagtgagctctttccaccatcatttcaaaaagaatgaaagcaacaaccatggctgctggggattaaaattcacaggaaggcaaaactcccagaaacatgactgtggtggagttttaatgaaaccagcagtcacaaacagtgactgattccctacctgcccccggcaacgctgtgtgatctcggcttcgctacttgtagggaggcattccaccttattagatttataacagattatctgtagagcaaagcctgcaaagtgaaagccatcaggacaaactggatttcaacactccctgttcatagcacaagctgagacgtcaggcctgtttcttgatcttcaaagaagacacagggaccctctgccctcggcatgctcggaaaatgctggaaccacaagggaagatggccatttcactcttcttcactcctgccccacatcctagcatcgtgaataggtacttattctccatgggaaccctcagttggcttctggagggcaggtgcgtcactggaataccaaattcaggcttcgaaaaacaggactttgagatgcgcttatttttaagttagctaaaattgtctgcaactagtccctcgctaactttacacgtcagactactccatggggcaagggctgttgggaagcaattttttgcagactgaaactataatgagcaatttaaaataagatgactacgacctcattcttctaagaaaagcaaaaacaaaaccaatcatagctgatcctattactctaaccagactttaagtttacgttaagcgtacactgaactctgaaccaaatataggagccccagaatttagctgctttgactctgacttcagaatttaatatacaaatattcaagtggtaacccaaaaagattttcacttttaaaacgaaactcttgactttcttgtgtctctttttcaacttgccaggggaacagccccagagtgggcagatgccgcgcccgcataaagcggcaggggccaggaggaaagggcggcagaatggacgccacggacggtaagctgccgcccatggatgggaacaccaggtgcagaccagctggggtagggccacggcatccatggctctccaggtgtgtgcccacgtgccctatgtgtcacctggccccactgcccactgccacgtgcatgtgcctctgcctagcttgggaggcagctcatgctaagcaaaggtgtgcacgaggtcttcccgtctattcttaaccttcacccagaggcaccacagagggactctgctccaaaccaagagtgtgctcctgccccctgcctccccaccgcacccctgtcctggcgcagagccctggatcaggcattcggcacagctcaggtgagctctaatgctcactgacagctgcctcaggtgaccagaaagctgggcctgggcaacatctcttcaccttcctcggccaggtattaaagagaataaggatcatgacccacgctcccagtgccagaaaactaggttcctttccgtgttagttcctccctgaaaggaagagtcacactatcaactaaacagctctgaaaactctctcctatccactgtgctctccatagcacaagtcacatggacacacacacacacacaagcacacgaaaaagaggccagccttgctagtgtaaaaaaaaaaaaaaaaaaaaaaaaaaagacatgccactaaaacagtgtgtaaatgatttttactcttcatgcattcgactgggaataggctgaagttagggaagaaaaggcacgccttacaccagtgcagggagagagggtaagccttgcaggagggcgatgtgcaacctacatacaaaaggtgccctgtacctgccctggaggctgtgccctatgggggggtccctaagtgtctgtcctggaggatgtgtcctatggtggtgggggggtccctcagtgtctgtcttggaggctgtgccctatgagggggggtcccccagtgtctgtcctggaggctgtgccctatgggggggtccctcagtgtctgtcctggaggctgtgccctatgagggggggtccctcagtgtctgtcctggaggctgtgccctatgggggggggtcccccagtgtctgtcctggaggctgtgccctatggggtggtccctcagtgtctgtcctggaggctgtgccctatcggggggggtccctcagtgtctgtcctggaggctgtgccctatgatggggggtccctcagtgtctgtcctggaggttgtaccctatgggggaggtccctcagtgtctgtcccggaggatgtgtcctatgggggggtccctcagtgtctgtcctggagactgtgtcctatggtggggggtccctcagtgtctgccctggaggatgtgtcctatgggggggtccctcagtgtctgtcctggagactgtgtcctatggtggggggtccctcagtgtctgccctggaggatgtatcctatgggggggtccctcagtgtctgtcctggagactgtgtcctatggtggggggtccctcagtgtctgccctggaggatgtgtcctatggggggggtcccttggtgtctatcatggagggctatccctcagtgtctgccctggagggctgtgccctatggggggggtccctcagtgcctgccctggaggctgtgccctatgggtgggtccctcggtgactaccctggaggctgtgccctatgggtgggtccctcggtgactaccctggaggctgtgccctatgggaggagtgcccagtgtcttctggggagaggtgcaccccatggggtgcctgtatcccccatgggggttgccctgtatctcctgggaagagttgtgccctataggggtgcctcggtgtcttctggggagaggaatgccctaaagggggtgccctgtatctcctggggagaggtctgccctatgaagggtgccccgtgtctcgtggggagacatgtgccctgcagggggtgccccacgcctcctggggagaggtgtaccctaactgctggggaaaggtgtgccctgtgggggtgtcccgtgcctcctggggagagatgcaccctgcagggggtgccccgtgtttcctagggagaggtgcacagtgtggggggtgccctgtgcctcctggggagagatgcaccctgaggtgggtgccggggcccagtcttgtgcttggggtctcccacatgcccctgctccatcactcaccagcctggagcatgctctagccatggcttcgtggcctgtccttggaccctctctgggtatccatgtttgtgtcctgcctctccatattcttctgggaggcattgatcagaaatgcaagagagaggccgggcgcagtggctcacgcctgtaaacctgacactttgggaggctgatacaggcagatcacttaaggccaggagttcgagcctagcctggccaacatgggaaaaacccatctctaccaaaaatacaaaaattagcagcagggtgtggtggtgcatgctggtaatcccagccactcaggtggctgaggcatgagcatcgcttgaacctgggaggcgaagattgaagtgaactgagatggcaccaatgcactccagcctgtgcaacagttgagcgagactgcctcaaaaaacaaacaaacaaaaacacagaagtgcaagagagaacttccacgcttacctgggatccgcttcttggtggaaaagcaccatccgagaaggagaggcaaggctgtgtctaaaccaccacaaacagccaggaaaccggaaagtccaaggggaccacgagcattaaaattctcctaaaagatcctatttacccaacattaataatttaagttatattttaaaaatgactcccttttcaattataaaactctattcaaattcactgatgatttaatgacactaattagattttgtgttcaagaaatctgtctgacaaacactattgccaaatgtcactaacaaacaatatgatggcttataaagagagtttaaatcatccaaacaaaagcctcctaatgtaatgaaaccactatgtagttcaaatggcttttataatctctattttaatgaagaaataaatgattaaaatgcaaagagaaaggcaaccttgaacttctttctgtgcttttgagaccctggcccagagactggctccagagccatggttctaaggtctctggccatctctcagagggtgatggggtgggctttcccagggacccctccaggaatgaggagcatggcctgaaggcctggcctgtaggagcgacgtgaggactggggtcggggtgctctcttccaagcagtgaagccagctcctggggcaccagaagaggagaggcagaggggttctggaggtgagacctggcctcaccctgagatggcagcactgaccccaactcaagtgtcttctttatgtcttctggcctcctaggactaccttgaggagccccagtcaaacacacggggcttaggcttacttctcagcttctcatctacgtcgtcttcttgtaaaagctacaaattcaaccagcacggaatgagacatcagcaatcccatctctttaacctcgctctgcaccgacagccatggcggcttcggggtggggtcctaatcatgcactgtgaatgctccaggtggatcaacggcaaggactgcagggctcaccagggtgcagtgacaacaggaaaaatggaattcagcaggagcccctgaggccatcctcagccagcatctgtgttggcctgcaggaaggcagggaagccggagtgagtgagtggtcctcatgtccccgaggcaggcgggaccaatggccgacgggggcttctgagaggcacagggcagtgcctgggtcaagactgctgtcagggagtcctcgggcttgatgtggggttgccaacatgcagaatacgaaggagctacggtactcattttaaaaaattacttctaggagtcatagaatgtgagcctatggcgcaaaaactaaataaaacgagtggcctcttgagggctgctcttcgcagatcatggaaaggctggtgagctgaagccctgggcaggctgcagggattgcctgcagtgactcccccggacccgcgccttctgcctggcatgcacctgtttcctgcagccagcttgaaaactcttctcccaggccagaaaaacagaggccagctgcagttgcccatggtcagggccgtgagggaggcaagactggcctgtccactgcaccgagtggtgccatcagtaaagtgaagactgtgtcctctctcatgtcccacctgccaggagtgtcaggatcacagggatcccaaagggtatggtgcttgtggagctctcaactgccccaccctaaactcgagtgtgcttgttaaagtggacagggtgccagtggaggctggtgggccaatctccacagggacaagtgacgtgtttgttacacacggctgctaggtcgctctgaaatctgaaggcaaaaacgataaagcatggacttcaagagctcaggaaagtgtcctctccttggtttgtcaaacactgacattagcaggcccatgcatctgggaaaaagcagcagcaacaactcccaagccaacaaatgccaaggcaacggtgccaagtccaaagacccagagcccgcaagcagcccctcagggtccagccagaaacctcccagcccccgttccctcaaggccagagggggccgagtacagagctctccgggctcacctttgaagcacaggcactcacagaatggtttggcacccatgagaggggacatggagctgtccctgagcctgtcctccagggccagcccagctttgggatgcagcctcccccacaatctgccactaagtctacagacaactgatactactttacctccatttctcgacagtgattatgaaataaagacactgaacaaagtgtcttacatataaaggaagggaaactgggatcctgtggtcaagagaattatcagctagggcagaaacagagggatgcacccctaagctactctgcacactaggtgggcacactaatatctgtgtgtgggctaatgccaggtagccaagacctcaggtgaacaacttctacccatggaccacgtgagcatctcagaagcaccaggttgcatacggtcataggcttttgatgccctacatctgtgctgtccaacagttgccacgaaccacgtgtggctcgaaatgcggctggcctgaatggagacatgccctacgtgcgacccagtggcttgccaagacttagcatgaacaacaacagcagcagtgttggtggcggcctgccacttcccagatcagggcacgagagaccctgtggcttccatgttggccatgcttcctctcgggttgctccctctgggaagctggctgctatgctgtgagcagccctgtggatgaggacctcaggcctcctgcctgcggccatgtgagtgagcctgaatggagctcctcccgcctcagtccagtcaaccctgcagatgagaccacagccctgcctgacatcttaataacaacataatgggagaccccatcagcgaagctgctccaggattcctgacccacagagcaagacaatacaaacttgctattttaaactgctaagtgttggggtaattttgttacacagatatagataacttagtctggttttgtgggatttttcactttgtttactgtgaccactagaatatttaaaattactggtggaattttaatatactcatgtatatttctattagacggtgttgctctaaatggttctaaatgcagtgacagcatattataatcacagatatcataactagcctgccaactatataactttgctacatatcactagtacatatttccaattgatttaattttaaaatctggtatcagattaaatatttgtagacagtaagtaccaaaaaaagtcttttttttcttaccgcatttaaattaaaagaaaatattatctttttctaattataaaaggttagtagagaaaatagaaaatatagaaaagtcctaaggaaaagaaaacacagatttgtcaatacacctcccagcaacgatcattaaggttctggtgcttcttccctttggtagcttttctatttctgagcatgtttcggatgaaattaggcgataagcatttttcctatttggaatatgcttccactcaatgactttggaccgccgttcccactcagcaccacgtcctccacaatacacgcaagtgctgcccgcggtttgttgcctggtgttaccgtcccaacgcagaaggcctcctgcaggaaccctgcatcatgcctggggccccagcacactccgcggaggcagggctggagtcaccgggagttgagggtgccggaggcctggcccacccgcagccccgcaccgcgcctcaccttgatgtgctcgtggagctgcgcctcgtgctgccgggagagctgctcgtgctgcctctggaactcagcgatgaggatctgcctctggatctgctgcttctgcttgagcgccaggagctcctgctgcagctgctgctcccgcagggccggctctgccacaggcagtgagaactggtggtccaggcgcaggtccatgggcactgccgagggggccacttgcagaggcagcgccgtggccacatccactgtgggaaaaacaagcaggagagccggtcactgccgccctttgctgtccctgggccccagagcccccacccaacacactggccaccttcacggggcggggggggggttgtgaccatttgaggattggatacccctctccccctgtccccctcttgcccaacaaactcaaaatgcaagactcagaggcctctggggcccattcctcaagggcaaaaaccacaaaagcccatgggaggtcaggccaggacgcactccacaatccctgttccttcctccaccctccccgggaggccggctctcagaggaccccgctacaggcccagaggccttgctgacgtcatttctagaggccaataatgagaaaaataaagaaaaaggttgtggctgttcaaggaaaagcgcgggcgccaggtctcagccaggaagactgcctgtcctgctcctcttcctcctcttccatcgaagtcaccgtgccgctgtgagagccacaagagcgtgtgccccagaagtggtccagacagacgctcgagacccggagcccgtttccatggtgagacaagcgcccccttggaaaacatgtttaccagacacagccaacgagacgtgctcctggctcttggcacaagtgcgttcctctgggcatgcgtttctgcacctcgcgaagaaatggattttctgccctgtactaatgtgctattgagaaaaggctacaagtaattttgatgaggaacagaagctgaatcaatttcattccttacaatcaataccaaatgaaagtgagaaaagtaacacaggaagaagggtaggtttaaattacagatatcacaaacagcccgacctgcgcaccccttttacggcaggtccctattctgaaagcatgcagtgtgtgcaggcactcactctgagccagcactgctcctggcacagcccagggacatcccagcgtcacttctcagacacgcgactctgccgaaaacttcactgagagtccaagtgagagcccagcctgcctgctcccctcccacaggcccacccctcagaaagctccccataaccaacactcatgtgacctgggccaagtggggaggtggggccttgccctctaggagggtctcaagctcagaggggtgtctgggccaacaagagggctgctgagaaaacagctcctcgcccctcagggtcagcacctttgggcgtgaccttgtccaggtgcatccctgagagcagcccacccacgttcaccctgacactcagcccgtctctggactggcttaagaccaggccttgtcagcaactcagttcctaggaaaacctgcactccacagtctcaaagccaccgatttgggtgaaacagcccataggtggcagctgcccctgggtgcaaagcatttccacagtcactgcccaggcagcaggtcccacactggctttgtctccaaaccactggaggtcctggtcccaggactcagccttctcctgagaaaagggtgggaaatgctttgggggaggcctgggcactggccggagcttggggttctgatccctgggttgccgcttagccgtgggagctgcagtcacctgagctcctggtgcccagggtgaggggtgctctcagcttctctggctgacttcactgtctcctcacccctcccctgccccaccgcagtcaatcatgctcctaacctggccctgctggctgccctggctggactggcttgaacctgaggagtgcccaggcctcaggccacgaagaccagctcaggccactttcctggacagtgaaaagacacaaagcaacccagaaggtgacagaagcttctgaatatatctgatcacattccacagcgcagcacgggctgcctcgttgttattgttgttttttaaatgaaatcctcctctctgactgtttctgtttctttccccaaatcagtgaagtgcaacccccaacttttaaaatgcatgtatttagtttttaattgggtgtcgactttgacacagtaaaaggttttcatttgctattatgtgagaagaatctacgcacataaactgcgtgttcaatgtgcggaagcagggagtaggggtccgcccaccccccaccccgcacatgggtgaggactgttccatgtgcaggagcagaaagcaggggtccacccaccccccaccccacacataggtgaggactgttccatgtgcaggagcagaaagcaggggtccacccactcccccaccccatatgtgggtgaggactggaccctattcatttcctttcttcccttttctgatcatttttatgacaaaatatagcaaaatggaaaaactgcgtaagcaatgctggttttatgaaacatcagcgttcacctacatttgcttcagactttcttttaaggaataaaatatatgaaaggcagggaggagagctaagtcagcaaactcgcaaactcggagaaaagagaacggggcctggcttcttgaagaagactcagctggcgggctccctgctgtgggcactgggggctacgggtccggctctcacaagcacggcggtgctaaatgctttcctgaacacacagtctcgtgaatgactgtcaggttgcggttccctcttccgcgttcatggctgtgattggcacgcggttctcctgggaccagtgccctgcagtgacttcctagagtgcctcaggtgagcgggcccgtgctttccagggataaacacaactttgttcttctaagttacacagtcagcacccatgggtgaacccatcggggaaggcatacacttgtataatgtagaagaacaaagttgcatttatctccaggaagggataaagttagaaaaacaaaatagcatcaacaacgaccatgttatttagaatgctggtgtctatatttgtaggtgaaactggtctctctcatattctttctgtttggtcaaacagagacattttagcttgaacaaataagcacagggaataagtaactgcacagcgttgcatcttggaagctgggttattgcctacgtctcgcctcatttatccctgtgtggggggcctgggtgggacccctgcttataagatgtgctgctgtcacccaaggtcccatgtagaaacagggtcccaccacaggcgctgggcagaggcctgacccgctgctggctttagcgcatccccctccatttctaatttctcacagatggagggagggggcagcattgtaaacgtctggtgttaatctctttaaaaaccgaacataaaacaacttttaagggattttttttattaacttcaaaaacatgacatgcccgcatttccactcctcattcagttcccaaagaacattcatggctcctgctgtgtgccaggtgctgtgggaacgggcccagggcagccgctggggcgccgaggagcacaggagctgatggcaggcccaggggaagggcccacagtgggctgcgtctcaccgagggcaggggctgcctgagcaaggacccagaggtctgggtgcaggtggagggtcatggggacgggggagcccagagaccagcctgccatctgcaatcctagagtgtcactcaggcttggggccgggagagcagccaagagcgcgaggggaagcagcagcaactctggtgctggggaggacccagcttctcaggacaaagtggggaaggcggggcaggctctgcacacccaaggttggctggccgagtggaattttctttcttcaaacttttctcagattcccctgaatctggaatcacaggacatcttaaaaggaaacccaagttcatgtttgctccaaagcatctaatagagatgacactaacatgatcttgatgcaaatgccaccgaagctatttcatcagggtcagaggcaaaattcagtgtactgaaattcccatcacaacgcaggcacctggccagatctgagcccggggtggtcaatgctgatgtgggccaagggcccccaccacctgggagttttcagaaatggaaaatgatcacaaggttcctcacagggatgccggccagcattcatcattgagcgtggaggagatgcgctcacttggatgccaaggaggacaggcagcgccctctgaaggtaagaattgctccctggatgtagcctcatctggataacctacacaactcatctttccatccagtctactcaagagctattaatgctttaattcctaaggcattcattctttaatctgttccttaagctgttttcttggagatttgtacaagttctgcaaattaattcaaatttcatcttaaaaggaatttgtcaactggactgagagacaatcaaaacagtcagacacggaacatgctgagcgccacgctgctgccggggaattctcttctgaagcttgggtgacgctcctgcccgcctcacaggcacacagctgaacctcctgtgcgtgcatcacctgaacggtcacagctcgacccaagtctgctcttaaattccaccacctgtgaaacagccagcgagcagcctggcccagcactccccactcccaaaagacaggaccctatgggggaagaaactgctgcccaaatcttctgaatgtcgcttacaaactcctttttctgctaaaaccttccattctgtgacagcacagagaggatgatgcagactgcagctgggaagctgcttcctactcctccaggcccctgctgggtcaccctagagctgccaaggccagcaactgaggaggaggagggcaggcaggcagggctccttccagccactccagcttctccagcagtttagcgcatgctggaaggtgctggcgctgatccgcccctggcagtgctggtgagagaggcaagttactcctcgcagatctgtgtctccagctcggtgcgcgtctccctacggacatggaagagtgcgggtcccctgaggagcagggaggcgaggggccctgcagagcagccaccttctgctgagaaggagcctggactcactggcacagtgcagccagagggggcttcggtgggcaccgaggctggggagtcgggctcaccaatgcgcagaatgctgtcgctgttctcactacggcacctcctgcattttcactcattgtggggaagggatgttcacactgccttggtttaccggactgccacgtgaaactccactatctgctaaagtaagctaagagcagagcagagaaaatcaacagcagcacacgccgcctgcatcccatgcgcacctccggccacggccattgctcacctctgaagacaatgctgcatttatgttggattcaataacacaaatggagcgttcacagggcaaggagacccaccccagggctcctgagggcttcctaatgaggatcctgggagccgggtgggtggggatgaggcccaagctgtcccaggcccggccccacacaccagctgcagagatgagaaccacaatcgcattcacgcattcgtgcgcctacggctgtgtcagacgtgacttgtgctatttctgtatcaaaaaccattcaaaatgccacgagttcccaacagaagctgctagtgcttttgacccaaagcaccctgaagaaaacaataaaaccttctctccttaaagaatgcagcatcaaaacaaaaaagtctgtattctcatgaatattctacggtacagcagaaaacggcttttataggttgtgccttgagaaacatattaagacaatcagactcctgacgtcagtgagagcacaaaggccgcattcagagtccaatgggagacggtcagtgtgctgtgaatgaattctcaatcacaaacagaaaaacctgttagtctctctctctcgctcttttaaaataaatgttcataaagaagcatactgattttccacgacatgcttaggtcctcttctcaggacgcgatttcatgccatcatacagatatggaagaaaaagaggcactattctttaggtaacacagtcaatgtttagggtctcttcaagtaaagaatgactcattcaaatcaagggaaaaataatagatatttcaactatgtaaccatgatttcctcttacactgatattttgcctctatgtgggggtggggggaagagagaggatgggacagaagaggagggagacagcacatcagaaatgcatgacttagctacaatgtccttcaccctttatttattgtgcagtgtgccatccatgctgaagaacaagtatgtttagtaaaagaacagtaatgaaaccagcaccagtgcatcctccgcttcaatgaggcccaaacgtcaccctctgcgtcccttcaaaccacatgcaccccctaccccgtgagcaacatcctgaccttgttaagtgtcctcttgctttgctatgataataacatctgcatatatgtggccctgaaaacacgtcctttgctttctgaagactgaaggcagcaacaccagtgcagtggaaggaggagttgacgatggttcccgggacaggacagtctcgagtccgagtctgccgtcagcttctgggacaggggaccagagcttcttctggggtgaagccacgggtgacccccaggaaaccaagtacaccccgtctaacatctggcagggcagtcatgtggaccagaaccaggtgccagaaggtgtggtctggggggtgagctgccctccatggtggccacctccagctctcaggtgggaactgggcagaagacccccttggagaaatgagtgacctcggggaatcgaggcagtggggcaaggaagagagagtggggccatgtggtcaacagaggtcaggcacagacaagcggctgagtgttgcatcctcaggtttaggcagcgaggcaggcagtctggtgaggccggcccagacgctgcctccgaagctgtgccactcaccccgggcaggcgctccctctgtctgcactgctgctggcctggacgggtccaactcctccaggggattccctctgtctctgccctaccttaagtctcccgcttcctttgtcccagccatcgtcttccttggtttattttctcactctgcagaactcaggctccagctgtgtcttaaaaagggaggcatgagagtaagttctgcacatctgaaaacgtgtcgattctccccttcacgcgtcctgactttggctgggtatagaattccagcttgaagaccatccttcgccttcgggattctgaaggcgcaactctgttgtcttcctctcccagtactgtcaggaaaatgggcgccacgtgatgctgcaccttgagtgtgactcgatgtctctctccgggtatctataaggtcttctccaggcccccagcgttccgaaatttcgaagccgtgtggtttggtgaagacctttcacacccactgctgggcgcctggctggtcctttggagacggcagctcccgtgctcccatcgtagggggctccctgaagcacttcatcaagggttcccctttcccattctctccttctggaacttctaccccttgagtaggagatctcccagaacaatactgggtcttttccatcctccctgttttccttgtctttgtcttacacgcttcttcatgtgtgatttccttaaatgtatattctaaccttttaaatgaggtttcatgatttttgctattttgtttctaactgacaaataaaacagccattttcagaggacaatggaccctggatattctttttttaaaatgtcatcctgttcatatttcctagataaaatatcttgtctagtctctgaagatagtaatgatagctcactaaaagtttgtgtgtgtgtgtgtgtgtgtgtgtgtgtgtgtgtgctgagtgtcacccaggctggactgcagtggtgcgatcttggctcaatacaacctccacctcccggattcaaatgattctcatgccttgcctcccgagtagctgggattacaggtgtgcaccaccatgcccagctaatttctctcccttcctcccttccttccatgttggccaggctggtctcaaactcctgacctcaggtgatcctctcgctgtggcctcccaaagtgctgggattacaggcctgagccaccaagcctggtgacaagttttcttttccctgtggagtctctgtttgctctccaccgtccctgcaaaagcctcccctcaggtgcctggttgcccctggttatgtgttgccgagtgtgagtggaggcacgaaaaccacctgccaactgtgggcacagtctggttctcaatgccaggcttcatggagggtgactggaggtggcatcatcaggaaccccctggctcagtgcccagagaaccttcccctagggctggcctactgtccacgagaggcgcctctccatcctgggactagagggtgagagctgggccttcagtgtaccaagggagggaccccctactcagtgtttgctgtggacacagtgactagccccccgttcttgctgcagtacccacatcctcagcttgctcctgtccccatgcagaggcgctcaggatcatagtcgctggagagcacccctttgtggcagcgcagcttccatctggtgagttctcagtgctcctcgtggttggctgagatctgttttttgggtctgctgaatcgctgtgactctgtcacctgctgtcagttgccaggctctcattcgtgtcgcccctcttctgttctccccatctttgtgagcttatgacctttctctggaatatatatttttatctttcatgagaaattccaaaaatacacaaaagcatgaagaatagtgtaatcaagccgatctcaggtcctctgctcatccaccacttccccaccttctagatgacagggaagcaggccccagtcgtcactgcgaagacttccaaatcaaatgccatcaacacacgcaaataaatggacaagtctgtaatattatgaagtagccagaaagtgtccccatagtttcataaacacttttaaatattttgttcaaatcacgatccaaatacattgtaattagctgatgtatcttttaagaccccttcccctgacctcctgcttcctgccccccaccacccccaccccgataatttattagctgaagacatcgggtcatctgcactttgctgattacaccctggtgctgacgagcaaggctctgtcccccgttcttctgaaagctgggtgctcaccgagaggcctggtcagaggcagcttagacttcccagcaaggcctaaggcgaacccctgctctctgggtggcttttttgtgttgcgaaggctcaaaatgatcactgactagattctctcatcagggttaaaaacagagctcttcgagtcccatcagcccctctccatgtgttagcaggaccatttctataacgggaaggaatccaagatcaactatcttgttactctcacaaacagcgcttatgagaaaggcagtgtcatgcttgattctcttcctcggtttgcccatgtctgaaaatcctgagtgggtctcgtggcagcctccaaactcgagcagtgaggagggtgtgttttccggtcactgtttacgaatgctcacagtcctgtccttgacgagcaggagccccgtggttggatcgggcggccctccagaccctgtgagtgctctctgagagcagcgccctgttctgctaccagatgctttggggtcttcctgtacatttctttttttttttttttgagatggagtctcgctctgtcacccaggctggagtgcagtggcacgatcttggctcactgcaagctccgcctcccgggctcacgccattctcctgcctcagccttccgagtagctgggactactacagacgccagccaccacacccggctaatttttttgattttttcagtagaggcggggtttcaccgtgttggccaggatggtctcgatctcctgacctcatgatccatctgcctcggcctcccaaagtgctgggattacaggcgtgagccaccgcgcccagccctcttcctgtacatttcttgacccctgtgtgggtccctttcttgggaaatagtcttagagaccacagtctggagactggggtaagcgctgttattgggttgggacttacgaactatcgatctttactggcgtttttgtgaatttcctgagggacggacatgcgtgtttgacctgccatccctcctcagagctatggagagcacctcgcgctgaagctgacattcaaacgcctgaacggtcataactgagacccattccaaacgctgacttacatgtgatgtcattttcccccagtgttcttaactgaattgcaactgttgtatttaccatggtggggaggggcacgcacgcaaagtagagacgaggtagagaaagtagaagtattctttaaggtaaagatataaaaatattctgtagataacatgtaacttaagtggccctaccttggagcttcgtatgtaggtgagtttttatatgccacttctgtttctctcatttagatggatatatgcaatgccaaagacaaaagcttatgttaacaatcactgtaagttaaattatgcttgaaaaataagaataaaaaatattatggtgcaagaagaaggtgctttgtattgctttccattgaaatcaaaatgtaaagaaataaatgcaaagagaagatacagtggtatttatggatgtgcacaggggaggctttctctgtgtggggctgggcgggagagagacgcgtcacaggcagattgcattcgacgccgtgctcggagtggcgttctcggtgcagagttctagcatgaaggcagctgcagcacatggccaggcctggatggcactgcgctttagccttctagaaaagaagggaggtggagctcttcaggctccctgagaactgcagcagaggagactgctcgctcgagcaggaggtgggagagggcccacacaggaaacttcccctgcctccttgtcctcttcactaccggggaatcacagggcctggggtgaactctggcccacggcctttagtgctgatgtattaattcatttaagggacaccccgcttgacaggtgtgggaaactgatgtacagacagttttaagtgacttgcccagggccacacactagtgcacagcaaaccagaaccctggcatcctaacctggctgaacagtgagaggaggctggtcttgctggaaacatcaggggctgaaggagtgttatggggagctcacaggtcacccaggggggtgcctcaggctgggtgtggtcagcaacacagggatttgggagcaatgagagggcctgggtcctaacctgccgtagagacccaagcatccctgaggcctcagaacttctgctccggagtcgatggtcttccaaagccagcactgggggcctgcccgacccctcggcctgctctgtgtggcttgggctttggtttcattcctgaccaaaggccaggcccccctgtaattactatttgctgagagcctacagcccacagctctccgtgaataaagtcactttttcctaaaaagctcctggggctgtggcagcaacctagatctgctcccacaaagctgctcaaggccgagacaacagccccagaggcacagccaggccccacctcccttctcaacagcaccagaaaaacaggtgacgagaggggaagcccggccaagcccagcctgctgagcacagagatggaaacgacacattcctgaaacagtattttcactgctaaaaataaaaagctacaattaataccaggtgtgcattttactccactgtctttttgtttttgtttttatgtaaatcggctttcacttgcaccaaactcaaagcaccttccaaatctacgttttcaaactgctttcttactggcagaaaaaaagtctaagtagatgcatgcataataaggtatgaactcagcccaaatctgtgccactgagaagggtggtccctgcagttggcaggatctttccccagcctccacccccctgcaggcatctccagcatcccagggcttctccgggtctgctggacccgagaacattctgatggagaaggcgagcgggtgctgctggagggctggctgtctccatgccctcacctcatccacgaaccttggaaccagcctgaggggacactggcgtaagatggggactacctatagtaggaagctctgcagtctccagtaccagactgcaggatggtatttgtcaggaaagcctaatgagagtaatctccacccagaatctccttttaggttgtctcacaggacactcagatagaaagacctggtctctccaaatttccagtgtggacttaagacacgagaagaaacaggtaacacctggagacaggcaaagtggggcagtggacggggcgtagacttgggtggggtgtgagttcagacccagcggggtgactctggagaaggtaccctggcctccatctatcggggcgacagcaggatgtctgcttgttgcagggcaaccggagctctgggagaagggctggcatgggtgtggctggtattcaacacaggactctgggagaagggctggcatgggtgtggctggtcttcatcacagggacaggatgcaccctccacgcgggaggggcggtggcagggccatgcaacatggagaatcaccgtccaggagagacaaggcaaggcttcctcgatggagctgtaccccctgacctcatgagctccacacacttctgggacaaaacagcaggcccagaaaaagcttttcatcacccagggtgataaacccagtgatcaggatgccacgagtgtgtccaggagggcgcagggctgcaggttttggcatgtcctgttagttgagcaccaggaaggcaaagagcattgacaagaaaggaagggcctgtccacgccgcctgagcagcagcagactgatcgccgcacctggatgtaggctacggggtgcagcacagcccaggcagcaagcccagactcctgggtgctggcagcgctgagtggagcctcagccctacaggcacacagccctgcagggctcctgtgccatagggtggcaggcagaagctaccgcgaaaaggccaagggcctgacctgtccactggtccagcaagagagcgggaaacaccaaggggaagagctcagtaagcccagtgtggatgcctagccctggagactccaaacccccagcaagtgggtgcccacccagcacagacaaggtggacacaggtgcacctgggaagaatcctccctgtccctttttaataatagaattattctagcaaaatcagtgtcagcttcacacacgagtcaaggataaaaatacgtttgaccgtgctcagatttagaaaattccattttttactctaactagaagccaagaaggctcattggaaaatacaaaaattacactttcaggatataagaaagaaaccaaaggacctgcctttccctccctccaggatcactaaccagtatgagtcctgtggtctcgaagctgaaccgctttaactgaaacagacttgggttctaaaacatgcatgaactgaacgtccacggtctgactgtcttctgtaaaaggagggtgtggtgactgccgtggtgactgccaaggcgaccacagacagttgcccatccctgacccatagtccagtagggaaagacttcactgcagcctccatccctcacccccagccctggctggggattcctcagtctgcaaaaccttctgtatgcaaagcagtggagatgagggactgcgaggtactaacacagacacgacactaaaatggaattatcagcttcaatggattcgagtaggactcagaaacactcccgcttcataaggcaccaagaaaataggagctgatttgttctccactgaagagggagaaagaaacactggctttcatttcctcagcgcccttcccacagctcctggttaggagtccgggtccaatgcatccatcgagctctctctcttccaagggaaataaaaagctcttcatagtgtaggagaatgaagggaagagaattcgaacaatgaagcagattctggtaaacctcatattcctgtgtaaagcaggagtcctcatttctaagcatctagcctggcggcttctgtgaacctgtgagctcctctctgcgcagggcatcctgctggccggccgtgtcccggcgtccccatgctgtgcaggtgtagtgactgcagatagacagccgaccacaatgctgaccacgatgcagcggcccctgtgcccgggccacgggccctccagttcaggcagtggtgactcggcctgggctttattagaaaaggcaccctgaatacacagggctccgtagggaaggtgtctgtactgcggagggttcgggaacacaaacacgatttcccaggcagaatgtcaggaacggcaggtagctggcaggcaggctgcgatgggcccagggaaatgggcagagggctctgattcggatcacgtccagtgaaaccggcccttacagtctgccatctgcactgccagcccctacgctggcccaagaacccctgctttcagggaaaagagggtccgtggagggctgcaccactgaggtgtgctcaggaagggcttagggatggaccaggcgtcccgggcctggcacagagagtctgccgcttctcgcccttcaacagccagaccctgggaatgggtcaggtttcaaccctgcatccaaccctccaggacagagggcaccccaagtctatcctctggagctcctatcagggcaggtgctgagaccacggaggggcctctgatggccccttcctctgttttcagacaccaaagcctcttagggtccccattgcccccaacagagctaacccctgctacctgggtcaaagagctaactcaatgtcacagggaaggtgtctgtgctcctccctaccccacctgtcatcaaagctgattgctagggcctccccaccttcccccgtccccgagccgcctctgtccctcagcactgaactcctgcaggcactcatccttccggcctggtctccccaccccacgtggctggcaggtggcaaggcctacatttaggccagggactcaggtgccagagtctgtactctgagctgcaaacctctacatactgtcagaactctggagaggcaatatttgaagatagatggctgacaattttccagaactggtgggagacatgcatctacagacacagaaagcacaacgatgcatgaaaaagcagaatggaatcaagacaacttcaaagcgaaacagcagaccgctgagacagagttcagaagaccccgcaatatgggcaacgttatccaacaaaggaaatgcagtcacagaagccaggaccagtgagcctctgagaactaagagaaagccactgtcaagctagaatcgcattcacagggaagctattctgcaagaaagctcaggatataaacatataccaggctgaaaactaagaaagtttaaaaaactcaccaggaagcagtcaggggaggatcaacaacatggaggtgggcagagaaagggggagggaagaaaaggtgagcaaagaactgggggctacggagagaaatctaaacagacttcatctgaacaacacaggaagaagaagaaagaagaaggaagaggaggaggaggaggaggggaggacgaggagggagggagaagaacaaagaaggaagaaggaagaagtttacctaacttgtggggttgaagtgaaggaaaatttaaatagtagagaacggcaagaggtgaatggggaaggggtgctcagtgttaaagtgtctgtaacccacgtgttgtagaggtcagggacataaaatagggactttagacattttaagctcatgcagtaacgtttcaccttaactgccaggaataaagcacatcacctccaaagcagcggtcaggttggggcaggatccatcagaaagaattttaaggagaagaaagaaataatttgttggataacgaatatggctgttagttacacccagtggcttacgcctgcaatcccacactttgggaggctgaggcaggtggatcacttgagcccaggagttcaagaccagcctgtgaggcatagcaaaaccccatctctacaaaagctacaaaaaatagccaagtgtggtggtgcatgcctgtggttccagctactcaggaggctgaggcgggaagatggcctgagcgtgggaggcagaggctgcagtgagctgagattgcaccactgcactccagcctgggcaaaagagcaaaaacctgcctcaaaaaaaaagaaagtaattaaataaatgttttaaaatacggctgttatatacatgcacacatacgtgcacacacacacacacacacacacatgggtatggctggttgcctcccaaaagaggtgcaccattgcatctataaagtcttaccaaaaataaccaagcttgaatctgatcaaacctctagatctaactgccaatttataggaaatccaggcaacaaaggaacattttaaatgacatgacagggctaaaatcaagtaaaatttagaacctaggaaggaaaactctgtgggacaaacaatacagtgtcttcaacagataaatctcaaggactgaaaaaaaaaaaaaaggtaggaagaagaaacctagagattaactgaggacttcatgacaggtgccaatcacagtgtatgaacactgcttggacccagagactcctggtaccaaaagtcaaaccacaaactaaaaaagtgattttaaacaccatcagggatatatcaacattgggtaaaaatctgctaataataaagaatggttcatcttgtctaaatatgtacatcatcaatgcagtaaaagagtccctatcttttagagagctaggcactagaatgttattgatgaaatgacatggtgactggggtctgattctgaaagactgagaggctggggatgggagggaggcctaaacgcaagtactggagggactgccctggcctaagccacctgaccacgccccagggctcactccacctgctctccccaccgctgggtatgcctgtaattctctacaatagaaagttcaatttcaaaaaaaaaaaaatttctaaatatctatgggccaaagaagaagccataacagttaaaaagaataagaatgaaaaaaatacatacaaaatcttgtaagattctgtttactataattagaggaaacttggtagccttaaatacttattatgacaataataatacgaactgaaagacgagatatatctttaagaaattagaaaagcaacagtagaacaaatccaaagaaaacagatgaaagcagataatacataaatgaaatgaaatgtaatcattacatacactcatatacaccaaaataattttaaaaagtgattctctcaaaagaccaatacaagacaaacttctgttatgagtgatttagaaaataaaaagaataggcacaaattaaaaaacattaggagtttaatcacctagcctcagatatggcagagatttaaaaaataaaaaaatacaaaggaacaacttgaggccagtaagttttaaaacttacatgaagtagacacatttctagaaaaacattccaaagttgacaaaaaataaatagaaaacagaattaaccctataatcatgaactaaattgaattaatactttaaaatcttttcacaaaaatcattttaaaggcagcgacagccacgtttcaactaatggatcatgcaactttaaacaaactcttcaagagaatgcaaagggcaggcaggatcctgagccaatcctatgaggggagaataaatatccttttaaaagaactgggcaaagtataaaaaagacagaaaaattacagtcttggtcataaatacagtcacaaaaatctcaaataaactatgagcaagcttaatctaatagtctatagaaaagacagcagaccaatacacctggtgttttaacacaagaaaacacaagaaaaggccgggcgcggtggctcacgcctgtaatcccagcactttgggaggctgagacaggcggatcacgaggtcaggagatggagaccatcctggctaacacggtgaaaccccgtccctactaaaaatacaaaaaaaaaaaatagccgggtgcggtcgtgggtgcctgtagtcccagctactccggaggccgaggcaggagaatggcgtgaacccgggaggcggagcctgcagtgagccgagatcgcgccactgcactccagcctgggggacagagcgagactccgtcccaaaaaaaaaaaaaaaaaaaaaaaaagaaaacacaagaaaagcaacctatgtacaaaccacctataaatccaactcaccgttaattatgatcatcttcagaatgaaagtaagtatatgttaaaatccagctattcattataaaagctgttagcaaactagaaataaaagagcgcttctttaaccaaaaaagagttatctattaaaaggtcccagcaaatattgcttttaatggtgaatcctgaaaaagctgatgtaatgatacaggcacaaagggagggaacacaactcctgatccagactccaaggctacagatactgagctcctcccacccccaccacctgcaaagagaagaatgacagggaagtcaatagagctaataaggaaatgtaatacggtgttagataagatcaacatagaaatccaattccacttcaacatactgcaacaagcagaaaacctaacataagaaacaaaaaaaatacaaggcacctagaagtatttctaacaaaaaatgagaacgacctttatggataaaaattataaaatatattgaaagactttttttctttgtttgagacaggttctcactctgtcacccaggctggagtgcagtggcacgatcatggctcatcgcagtctccacctcctgggcgatcctcccaccttagcccctcaagtagctgagactacagaggcgcgccatcacgcatggctagtttacgtattattattttttaaagagggggtttcgccatgttgctcaggctggtcttgaactcctgagctcaagcaattcatttgccccagcctcccaaagtgctaggattacaggtgtgatcaggccactgtgcctggccctgaaagacatttttaaatggtctaaataaatggcaagatagctcgtattcaaggataggaagacttactattctaaagatagtgattctctccaaacggaactacaggtccagtgcaaggtagttcatgatcttaaaagctgaatataaaactacatggaagaagaactgagaagcagttgaggtggtcccaaagagggtagatgcaggtcctttgcagattactgtggaaaaaacagggtgttccacaaatgcagctgggacaaacacttatcctactattctacggggaacaaaaagatgggattcgtccctattcacaccacaggccaaaatggattccatgtggattaagactcaaatgtgaaagacaaaatgttgaaatttttagcagacactattggaaaatatccttggaatagaaaactcaagatgtgaaaagtgcttcttacgacaaaatatgacgttgttacatctgactacatttaaattaaaattttctgctcactagacagccttaaaaagtgaaaggctgaatctcagaggagctactttaacacagcaactgacaaaggacctgtatccgtaacatgtaagtaactcctataaagccgccagaaggagagaattccaaagaacagcagaaggtatgaatgggttggtcacagaagaccctgacagcaggggaaacaaaggatcaaacgctggaccatgttagtgagggcggaaaggcaaatcagacccctggagaccccactttacgcccaccgacccaactacgggtggagaggcagggagcgggggcgtgggagcagcagcagcatgaatgagacggggccttctagaacagtgggctttctcatagacagccgaatctcgctttcgtgacccagcaacaagccctctccttaggacagccacccttgaaaaattcctgcacgtctacacaaggagaatggtacaaggatattcattatagcagcattaactacaaaccgcccaaatatcaacagagcaacagataaacagtggaatattgagagtgtagaattgtatctggcatgaaagtgaacgaatcccagccatgtggaatgacgtaaatgaatcttagaaacaatgctgagttaaaaaaacacaaaaaacaaaaacaaaaataaacaagctgcagaaaacgacgtcagtatgatttcgattattaaaagctcggaaaagcaaatccaaaccgtatgctgactgaggaagcatacttacacggcaaaactagttttttaaagaaagtaactcagtgctaaaccctattctcagcgttgtgttttggggagtggtgaatggctttactacaaacgtgtacatttattacccggcctgtgagcacaacggcttggggctcccttggaggagaccggccctgcttaaaccagcacagggaaatgtcttgccccacttccaccaaaagtgactcgcttgtgacacaaggtcccctttatattatcataataaaggaggaaacgccagtttagaggacagagtgacggcacaaaatcctaccatcctgaattcctggtgacagaggacactcaacaggtgggataagaacatttatacaatgacctgcttgggatctgagcctggaacgcggctgagaccagaaccctctcgagtgaaaaccaaccagctcctgcggcaccttccacgggacaaggacgaaaaagcactattccttcgccggccaactcttaaaggggatttatggcatgaacctgatcacagaaaacacactccacaaacactgagggtcctttacacatgccatcctaaaagaaggtggatgctggcctgtcctgctttactggacagtatttgaaaggctggatgaagcaatcttaaacgttacaatacctgcagatcagaagcctgactgcagggtaaaatcacctagctttcatgcatcgaaaatcactttctcacaaaaagattcacttacattccattttaaatggatctattcaaaaatttaaacaaaaatgtctgacagaagaaaatatattatttctttcatcctatttttaatattataaacagaattgttgccctcacaatacaaaatcactaagcagtataaaagccagcttccagaatgctggaaagaattgggctctgcccttcctgagagccctgccccgtgcttctcctgggggccgaaagtcctggttgctaacggtgatggtccccagggtggtccgggcccctgcacacatcttgactgggtttagtcaaatgaggatgaagaaatccccagcactgagttttatcttgagataaaagaaacatcaaaggaatctgcatttgaaattgccattccgttagtttctcacctcacttggcttaacttgaatgatatggttgccagccaacaccagactccaattcttgggactttgtctgaagcaagggctgtggtttctaaacccaatgattcaaaagctgaagctgcagacacacctttaaatcccaggcagtgacttttccactttgctttcactgagctgtcagatgttcttaagccatataacatattccccagaatccagcatcttaaactgtcttcaaggactgctataactgatcatgcctttgctttcaaaaataagccccgaaaaaaaggacaaaaacaaacaatccagaggtagtggcaccacgcgccaccgaggagcttcctcgagagcagtcccgtgccctgcagacgctgaatttagacttcagcgtgaaggtacaaagggttccattctccttagctgactatttcatcaaaagcacagggtcactttttagaaaacatcccttaagtgaaaaatgctcttgaagactttgctctaatgtgaccgatgggaaggttgggaaaacgatgttctgtctcactaaaattttaatctgtaagcccaatgataagcatttttacaaagaaacagataaaagtgatgtgaactgggatgctttagatttctagagtattcttaggagccaaaatcatctctaaccttaattgtgagacttggttgaaagggtctttctacccacggcctcctggctgagctgggcgggcagggggcatttccctcttgacatttaaagaattgcttcctgtaaagaacacaggctagggcactgacccgactccctcaaccccattctaaaagcagtttaaaaaaaagaagaaaaaaggaaaaaagatataaatctctccaaaaacacagatcccacaagcagacagcagccatagaattctggaagccagtcgggggctggctgaccagagagctgaagccaggctggtctgaaggccagaatggcccagggaaggctgagctataaagagcatgtgacccctcatcccttctgccccccatacagggaccaaccccattcccccagaattccccaggcttggtgctatcaggctgagggcaggagcgccagcatgggcagtaaacaggggcagtgagagctgacatgccaaggggtgaggctgtgtgagccaggcctggactccagggaggagctgggagggtcctctctgggctaagagaacaggacaacaggcagtggcatccaggaccaccaggaagtgatcaggtccctgtctgccacctggccaggaagataagcagtcaacatgccccgcccagcttgttagagactcactcttagacgctggccagccaggatcaccaaacatttgggaaagactctaatttgaaaaacagaaaagcagaccaaaacaaaggccccctctagcctctgtacccacgtgggttccagtctgttgacttgttcacttctttactgtctgcccctccctgcaatcgcccaggaaaacgcaaagctggaggaggtgtggcatctgggttgctctctctggtcccgccagtacccagagctgtccccagaatatgagacggccacgatgctggaaggaaggacaagaatgaggaggaggagggcttagcacagctcatcagtcccataacagcaaagtaggggccagggaggggcgggcggggcacagccacaaggacagatgctgggtagccaggaggaatgctgaagggtgagccgtggcggatgctgaaaaagaacgcactcagcaacggccatgaggtttctttaaacccaacagcacaactcagcggtgcccgcgcccctcattccctgctcgctgaagactgctactcaagttcaaccactcactggaggattgagctctccacaagaaacttctggaccctacacaaacaagcctgctgctgttgctactgcatctggaattcactcgggttctggaggcccatctattgtctatccccaaaagcctgcatctgcatagtcacaccagcttgtgtttttccagctcggagagtggccggagccactacccaactccagcaacaaaactcctgatgtgcttacgctggaaaacccagcatcagggttcccaggagaaaaaccaaggggagacgcacaggacagcccacattcagcacacactgaaataaaagcatggaacacacactgcctgacagggacagagtgagccttcatctccagctccctggagcgcttgcagtgcacagggcagggcctgccctccatgagtacacagctggatgagggggacccgcaagaaagcagaaagctatgcaaagcatgtgcctaaccgcctgctagtccccatttcacagatgtggaaaactgaggcagggaggtagagaaatctgcctaggtcacatggttgggagtgaaaagctgagtctggctgacataaagttgacaggctcactctgggtgttagcttcttgtgcttgatgtgtgtgacacgttactataaactcaatggcttgaaacaacgtatgtttattatcttacagttccggaggccagagtctgacatggggtttacggagcgaaagtcagaaagccagcagggctgtgcttcttctgcaggctccaggggagaatctgctcctggccttctctagcttccggaggctgccatgtcccctggctcctggtcccttctctcctcaacaccagcacctgcatggccctgtcgacactctgtctgcatacctcctctgactccgatcctcttgatttcttccttaaagaaccctcgtgaagacaaagggcccaccctgatgatccaggacaacctcctcatctccagtgagtaacaaccccatctgcagagctcctttggccgggtaaggttacacagtcacaggggctgaggattagctgagggacatttcgggggttccattattctgtcaaccgcactctggctccttggccgagatcagactagaggggcaagaacagaattggggccaggtgaggaggcacctgcaacagccacatgggtgacacctgtggctcgccacgcgtggcaatgctggagctgtgagcagccgccaggctcagcacacgtgttgatagctttaaagaggtatattttacactctgcccttctcaaatgtacaatccaacaatcttttagtagatttaccaagattttagaacattttcacatttgactgggacccttccctctgcacacactttaatgggcagctgccagtgctggctgacaggccatgcatgggactggagagaaataggagtcaaggggactcttgggatcctgagcccggaggttgccctgagtaggagaggccgcgggagaagcaagtttgcaggggaagatcaggagcctgctttcaaacttgctgagtctgagaacgcccagctggggatcgacggcaagcaggctctaggatctggaaggcaggtgagatccaggcgggagcagacattcgagcggcagaatcaagatggtgttgtgatctatgatttgactggatgaggccaggatatcaccaagggaatgactcagtggaaacaaggagtgggccggagacaagccctggggcgcttggatgtgatgatgctggagagataagaaaaacccaccaaggcacctgaggactggtggccggggcgggggaaggtaccaggagcatgtggtgtggtaaggaggtgcttccaccaagtcaacactggtgagaggccatgggctgaggccgggcatggaagctggcaacagggagtcactggtgacacgaaaccaggggctggctgctgggagcccagagaagcagggtcgacgccccagaaacctgggctccctgcaggccaaagtgccctccctcatctcacctgaaatcaacagggagggcaccaaagaccgtcgccaacctcctcacatctggagtgggcaagggctcaggacggggctggctcaaggcgcagggagatcgagttctgcccacctggactccatctctcttctctggtcaacaacatgaatggcggcaacactaggagacatccccgcaggaaatgccacacctctctctaatctccagacagcagacaccccttccccactaaccaaaacagaaacaagacacaaaaacttcaaaacaagaaagtgtggactggcaaagctgtctgcaccagcgcctctgcaccgggctccctggaggacgcggtcatcagttccgcgcaggcactgggggtctgcgaatcttggttcataaaaaatcaccctgaataaataatgaacggtgcaacctctctggaaggcaatttgataatgtgtgttaaagtccccaagtaaatatttatgccattggctggactcataaaagttatgatatattcatagaatgcacccaaatttattttaaaataataggtacttttaacacattaaaccctaatttgtttaaaaaatcaaacatatatactcttcagcatatatatgtacatgtgcttacattgtatatagcttttacattttaattagggccatattatgcatgcttttcccctagtaatcactgtgagcactttccacatcaatgaatataaaaacgcacgtgtttatatatatacacacacacacatagatattcacacatactcacatatgtacatgtatatgtagtatttatgcggaagattccattcaagaacaaaaatgaaatgttctcacacatcttcccagagaaaaaaaaaaataaaagaaaaagtctccaaaaaaccttggcactaagagctgatgttctcatgttctgaccttaaagacaactggcgatgaggaggaagacgatgaggagggcgccctaccagccctgatcttgccctctcaggacacctggggacacaggtgctcactgtccacacctgctgcgctgcagaccactaacaaccaaaaccttctgaagaagagaaggctttgtttaactgagtttttaattttatgtgatgctgaatatttatggtatgaacatctgagcctttgctcttgaactgaatgtccttccaggaacacagcctccttctctgggtgaagctccacctgccagaccctccgccttcactctgccctgctgcactccttcctcctgtgggctacttgggcccctgggaacaggactgaccgggaagggtgtgtgtcctgccccttccctgtgccgggatgggagtctggtgagaagggggtgcacaggggttccacccgccatactcggcatctttctaggcaagtcagaatgtgcacaggaaggaagctctgactaagctacctcgaactattctcaacaatttctaaatgacacagtccctggtttgtcagaagagaagtaagtagcaaaagacaggtgactgcattcacgccactttcccttcccccagtgtaaccccaaaccccgagcccccttacagctctcctatagaaagggagcctccttggcagacattctcacaccctgggccatggcaggctgcgggcactgggcctaagggtgggctcaggaggacacacctccgcagggctccaaaggggacccgctggtggcagagcctgaacacagcacaggcggtagcagggtctccaggagccggcagcatcgctcccggaagctctccaaaagcaagaggcccgtcgactccccttcatggtggataatcaagcgaccagatcttcaaacccaactttccaaaacctagtggttaacctaaaattcctcgcattttaaatggaaatggtaatgaaactgaaatttgggggaagaaacttaatgtatctgttttctcatttttctcagtgatagaatcagtaaccattttaaggctaataacttgataaatgtcagtctaaatatattatttatatgttataaagagaatcaccaaaactcaaaataacactgcaagtaacaaaatcagaaggttggagaaaagagacggcagaaagtgtctgtgccgacgggctactctctcacatcgtctgaaggtgctggaacaggaaagcacagtttagggaaagcgtatgagctcataagagttcacacaataagaactaaaaagagagcacggccttccaaatcaccagaaggaaaagaaaccacacacaccagaccaaataaaaggtaagaaagcccatatccaagaagtcaaataggaaacaaaacaagaagcattcacaacagaaaacagggtcgggcacaacagctcacgcctgtaatcacggtgctttgggaggctaaggcgggagggggatcgtttgaggccagaagtttgagaccaacctggccaacatcataagaccccatctttccaaaaaattaaaaagtcagccagcagtggtgacacgtgcctgtggttccagctactcggaaggctgaggcaggagcactgcttgagcctgggaggtagaggctgcagtgagccatgatcatgccactgtactccagcctgggcgacagagtgaggccccagctcaaaaaacaaaaacagataaacagaatataaaattggatgaaaattttaggagaaatatgtccattttatcaacattcataaataacacagagtcacatgaaaattaccagattggataaaaaacaggactgaacaatcattatattaaaaacaaatccatactggtaccaaaacagagatatagatcaatggaacagaacagagccctcagaaataacaccgcatatctacaactatctgatctttgacaaacctgagaaaaacaagcaatggggaaaggattccctatttaataaatggtgctgggaaaactggctagccatatgtagaaagctgaaactggatcccttccttacatcttatataaaaattaattcaagatggattaaagacttaaacattagacctaaaaccataaaaaccctagaagaaaacctaggcaataccattcaggacataggcatgggcaaggacttcatgtctaaaacaccaaaagcaatggcaacaaaagccaaaattgacatatgggatctaattaaactaaagagcttctgcacagcaaaagaaactaccatcagagtgaacaggcaacctacaaaatgggagaaaattttcgcaacctactcatctgacaaagggctaatatccagaatctacaatgaactcaaacaaatttacaagaaaaaaacaaacaaccccatcaaaaagtgggcgaaggacatgaacagacacttctcaaaagaagacatttatgcagccaaaaaacacatgaaaaaatgctcaccatcaccggccatcagagaaatgcaaatcaaaaccacaatgagataccatctcaccccagttagaatggcaatcattaaaaagtcaggaaacaacaggtgctggagaggatgtggagaaataggaacacttttacactgttgctgggactgtaaactagttcaaccattgtggaaatcagtgtggcgattcctcagggatctagaactagaaataccatttgacccagccatcccattactgggtatatacccaaaggactataaatcatgctgctataaagacacatgcacacgtatgtttattgcggcactattcacaatagcaaagacttggaaccaacccaaaagtccaacaatgatagactggattaagaaaatgtggcacatatacaccatggaatactatgcagccataaaaaatgatgacttcatgtcctttgtagggacatggatgaaattggaaatcatcattctcagtaaactatcacaaggacaaaaaaccaaacacagcatgttctcactcataggtaggaattgaacattgagaacacgtggacacaggaaggggaacatcacacaccggggactgttgtggggtggggggaggagggagggatagcattaagagatatacctaatgtaaatgacgagttaatgggtgcagcacaccagcatggcacatgtatacatatgtaactaacctgcacattgtgcacatgtaccctaaaacttaaagtataataataataaaataaaataaaataaaataaataaaataaaaacaaatccagtgtaaggctcagattagacgggtaaaaagccccaaaaggcaaatagaaacaaattgaaatgtgcaatcgagatatcggtatcacaaagattgaatccaacactaaatatcaaacatatttgaccatttcctaagtataaagcatgcaatctacaaagatgacggaactgtctgaggcacacactgtgggtaccttcgagtaaaaacacagaacacacagaatgaagacacacatggtcagcactagatatgaacttgctcttgtacactcacggcagagcaaacacacaggaggtgtgcatacagaggatgggaatagtacaattcttacttcagccaacagataggcctcgaacctcttatcattaagccatgtatgccttttgctgcaagcctccatgaaacatttacaaaaaccaatgccacataaagaacacagtttccaaatacacacagtgtagactaaacactggaacacactgcaacagaaccagaaataaaaccaggagaaacaaaaatccaaccatgggaaaaatgagtctctttctcttaaacgcttcaaattctagtgaaagtggtaaaaatttataaagtaatgaacacatcacatatcgaaaattgtaggaattgcctaaaattgagctcagagaacaatgaatagctgcctacatgtaagtaactacaaaaggaacccaaacaaataaaaacattagactcaaaaagttagaaaaataactagaaaattaaagcatacactgtgcactgaaaaagaggaagaagataataaagatgaaagaaatctgacagattgcggatctaggcagaagcgataaagcctatggtggggacagtttgtgcttggtaggggaagacagtgacctcggagaagatggtgccagaagactcttaggaactggtcagcggcctttcatcatgaaaatcttcaacgacacacagagttagcgagaggaatataataaacacccacgtatccggctaccacaatgatcaaccttagtcattcagcttcatctacgaacatccatctttttttctttatttctaatcccatggaatgacacatctcaactttaaatggataacagatgggaaacgagccatatattttattaaaggtttctcacactaatattgtgaatttaaaagataattatagattcacaggaagttgccaagaaagtccagagaggttgcaggtacccttccgccaggtttcccccactggttccaccttctgtagccaaaaaaagccagggaccgaccttggtaccgtgttgtcatcatgaccaaggcgaggtactccctcaccacgaagacctccctcccaccagcccttggactcagctcattctgcgggcggtggcgtgtgacccgctgagtgaggcacagaggcctcaccgccctgtctctctttaccttccccgtttacaggcgccttaaatgattcctctacatgaaggagaaccctgtcagatggtattagtgttcttgcgaataccatttagaagaataaaagagaagcgaaggggatggagcggacatcggcccgttctctgacataaaccgctgaggaaagccaaggtctgtgcacaggagcgggggacaccatggtgccacctgacaccacatcaggggaggagatgggagcattctgggaaaccctctggaaaaaaaaatcacagctccaaccaacaaagctaagagcatctggttaccccacagggactactgaattgcaaagcaaaacaaaaaagacaggagtgtggcaggagcttcggagaccctgtgcccctccccaggggttaagagtggccagctgggaaggacggcccatgcccatctctgtgtcctcagcactcaccgcaaggcctggactcaactgtgtcacctcgagttgcgcctcaaagtgcgctgagagtgggacacacacacacacacacacacacacacacacacacacacacagccttcaactgaagaacagctacttccacatctgtccacattcttaagggtcccctaaatgtatgacaaactcaaaaatctcatttttcagccagtcatcgtggacgagagccatttttataatgcacacacaacttgaagtgattcttttctggtgaatatttctttcaaaaggtcctattaaatgacaagccgaaactattgaagctatcacgaactttgaggaaataaaactttccttaacaggtcacttaaaaggctttttttcttctgagtaataagctgtatcaacaacgcagcaagctttactcaaaaacgtattccaaatttgattcgaacagaaaataaagtccttccttgccagcattaaatccaaatgcggctgtaaacttgctgccataaggggctccaaagacccttcccacccaagggatgacaccctgtgccagcgcaaggccagaaacagatcagaaacgcctcccttcgcttccctggcttttacggcagcccgtgatgttattctcgtggaattccgtgtgcagagtccctgggtgctggccgtaccagccagggctgtatctggagggagcaagaccatctgtgtgcttctgttccacaatttaatgaaaacgcaagtgttagattttttccctgctccctatttcagaactatccttaaagctctttagaaaatccttttaatgtttctaatttgttctatatccccaggaagaaaaaaacatcttttggaaatatttgcaagctcaaattgagcaagagctgaaaataaaaacctggcatgcagttggtaagttggctttcaagaagtgcacaaatgtacttcctggaaactataaatagaaccaggccttaccccataccaaaaaaaaaaaaaaaaaaaatggtgaaatgtgctttaagttctcatacagaagcgcagccatgaaagacaagcatgacccccagaaataacagacagaaccatccgtctgagatgctgctacaatcacgttatggacaaagcattcctggaaaatctttctaagactctacaattccaatgcaaaagcaattgaatagaaacaataacaaaaaactaatgtttcaggactgagcacgaatttaaagtatttttgctttgtgatctcctttcgtcctcacagccccctgaagcaggtcccagcggggacctgggtatcacagacgggagatgcagccagtaagcattgtcacctggattcaaaactggccacacctcctggaacaccaccacctccctgaaaccactgcagcccatctctccagcctgctcacaccagcacaagttacacgttactcctgaaagctatccaaataccctaaacccaatggataaaaatatattgtctgaaaattaaaaatagtttcagtggtctaggaagcctacaaatcccactgcagttgctcttgccttctcagttacgtaagatcaagtttacataagaacgcatttcagaatttccttcttagcaacctccaaacgtttggttatgtgtttcacctaacagctgggccgaagtaggaaccactattacttaacagtaacagttgaaatatttaaaaatagaaaccattggagaagaagagagggcaccaaggacgaggcctgaaggaggtagcccctctctctggggcgagccggcctcttccaggcagcaacgtacattccgccggggctttctggagaccggcgtgggctgcagcatctttcaagggcgctgcgggtcactgggggtggaataatccagcaggcaggtggaaatgcagaaggcagggggctggttcagacttctgtccagaaaaatcacctgggcagcttgataaaaagtgacttacgcctcccagcctcagttcctgaaccagtaactactgtgtgatgtccccaggggcattaaatgccaatgaacacacggtacgtagctgagtgacagatgggtggccttggtaaggggacctgtggccatcagtgtcctcatcattgctgtaattaggagcaaccacgagtcccactttgagcaggaccttgctgctggctgtggaggctgtgcgctcacactctctgcccagcaaagatcccggagccagtaactctcttgccagcaggaacactttacaaagtaggatttggtagaagatgcatgccagcactaagcaaacattgtttaaaaaaaaaaaaaagggaaaagaaacaaagtctactttgtggaccttgcacggaggagatccactgcccgggagagttcatgtccatgtatctttctgctatgaatgcccagcgcaggcccctcccacgttcagcgcaggctcgccaacgcctaccactcagtgttccaaactgggtgcctttgaaagcactgcacagatccatactaatcctcatcccagcgcagggtctgctccacccacattccccatgaattcatgcaactccatcagcagtgcttaaagccaaaaatcctgaggtcaccctcgactcttctgtttcctgcacagcccatctgcaggctaaggaaatcccatctacgtcagatatctctagaatttgtaccattttctacattcccactccacctacccggactgagccccatccactgcctgggttgctcccagaccctggtgggtctccctgctcctccgatgcctgtcccacgtggccactgcattctctgtggcatacgtcacgtggtgtcgcttctctgctcagaacctccaggagcctccatgtcactcaaagccatgcctaattgattaacccggccttttatgtctcccgcaccgcccactccctcttctcctgaccaggtcttcggcctgcaaatgtctgctcaccttctaaggaggcctgccctcaccagcgggtgtaaaatcgcagcccctccactcccgagccctgctctgccttccctgctctactgtttactcattgcctttactagtttcctctcttcctcccagggtaacatgagtaccatgaaataggggtctctgtgtcaatcataaatacatgtattccatatgccaagggcaggggatggcattagaaggcccaatcaatatgaatgagtgaatgaatgaatgagttgaacgcagaaatccaccctcctgaatccccagtccttgactgctcactctcctccacagcgattctcgcctctcacatgttctaatattgtaggtaatttacaatcaataagctggaattaatgagcatatttagaatccagcacccaattactagagaattcaaaatcttctcacacatatattaaagattcataaaaattgaccacaaagcaagtctcagtaaaattcaacagctgggtaatttctaaccataatggagtaaattagaaatgaataacaaaaaagatgacttggaaaattcagactttcgggaaacaaaaaacacttctaaatatttcattttttcaaataaaaaaggaaccaaaaagcaaatttcaaaataactctcttgagaaacaccaagactttatgaagtgttaatgtaatatgctttacaaattaaataatacaaattagaacttatccaaagcagccccatttgaaccccaagggaagcacagcacagaaccctgaatgcctccatccgaaaggaagaagggctaaaaattaacaagtgaaatgttcaacctaaaagaacaagcatatccgaataaatgcagagaaaggagaacagctattaaaacaggaattaataaaacagagaacacacccacaagagcagatccacgaaggcagaagtcggtctgcgggagagtaaagcatagctggactcccaccacctgcagggtgcccccaccccagggggggatgagaaacacctggatggaggggtggagcctggctgggctcaagagcaggagagggaagccaggaaggcggggaaggcaggtcggcaggggagggcaggcccgcccaggaaggcccacgcagggctgggtgctgtagaactgaaagaagtgccagccccttcctcaggcgcctgactaaaccgccttcaatttcttcccctcgcccgtggccacgtactgctacccaagggacacctccagtcctccctcacctggtcagacacctggctctgatggcccctcggagcccctcattggaaacacagagggcctgagtttggttctgcatcacgtgtgacagtgtgtgcatcttgctgtgaggtccagaaatggaaaccttccttaaaagatgggcaggttcctctggtaggggacatggtgttggtacggcgaaaacatgacattagggtcaaatgtggctgctgagaaggaactccctttcagctgcaccgcgacaccctaacacagacaagggtcggcaaagagccatctccctcgtcctggcggcacaggcttccagatgccactgaggggctccgcaggccctctggatacattttacagtccacagccttaaagcacacaaagctggtaataaaagaaaaaagataaaaagccctttaaccagaaatgatgtcatgatgcaaaaattcattcctggataatacttttggccaccagtgacactccgaatacacaaaccaaaccaaattctcagtggaaaaaaaaaatcctttcttccaaccaatcatcacttagaactgtggaatcctccctgagagatactcagtgagatttctctgtattctgtatcaacacggttgaggggcactgctgggactgccacatagctttctctctccctctaaagtagagaaacaaccagtcaccagctccaccccatccagatttgctgtggatgtgtggacggttttagaagcacccagaggatatttctcagacagcacccccaattctccacgacgccccaaccaataaccgtctgctttcttaccacccatgttccttgctaagggcagacagtaagctcttcagaaatctttgggtcgacagcaacaacaacaatgtaacatgtaatggggggggtgataaatgtagataacccaaacaatctaatgtccacccaggatggagaaactttctatctttctgcctcaggcactgcggacagggaaagaaccagttggaaagtgaggccggcaggctcacgggtggggctggcaggcagcagtgtcctgggccgcgtggggaggcacggtcccacctgccagccacagggtggcatttcagagccacagggcatttctggtcaaaaataacagagtgaacacaatcacgttgtcaggatccctccaagattctgctgaaacagtgtgtggattgtttagaaagacacaccaacacaacacacacacaggagatgagagagcagccacaaaatgctggaagtcagaaaggatctgggtgaataaggtatcagagacagcaaagctgacccatcagccagggtgggccaagggaggggcagaccagtctcggtcacacagccctccggggcacaggggctggtgggaccaggactggaggtgaaggagaatgaaatatctgctcagggaatgcagggccccaaccaccgcttaccccacgtggctggcagagcccagggactactaccctctggagagggagatggaacagcactgaaaactgcggaccagtggaagctggccagctacacgtgaggtgtcctggtcttcctgccccagcatgggggcagggcaggcagcattgggccctcccagtgaggtcacaggggctaagcagcctgctggacaccatgccaagtgggaccgggcagcccccagcggccagcaccctgcatgcccctgcaggtcccgccagcctcagtgccctctgctacagatggcagataccgtgctcaccagaaaggccaggaagactgtcatcacagaaggcagagcctggacagacagacaagcaccttggggaaatgcagacagagagaagggaagacaggccctccaaagacaagcggaaggagcgggaggcagccctggagttccaggacaggagggcatgcctcgggtgcggaggaacatagtctctgcccggtgaaatgagcaagcaagcctcagagggctaacaccattaaaagccagaagggccctctgaaggcaaatgtgactgactcagcagcttcacgagagtcatcgccctgcagatcaggtccagcggactgcaggtccagcagctgccactgcagggtggcccgggccctctgctaggtctcccagctgcttccatccaccaggcatcttctcaagacacattttcaacgcaattcaagccctcctgttgttatgcttcccagcatcagctgggctgggtttcacttgagacagttgctcctagggacattgccacaaagggatgggaaggtggaagggacggtggttgagctgcaggaagggcagagccacgaacctggggccaggcacaccagagggcaccaggaagcaagagtgcaagagaacacagacccctcctgtgtgccagacgctacgccagacacttgcccttgctgcctgcgccctggcccaggaccaagcagccccgggacaccaggtgaggagcagcctgctggaggccatgtggccaaagggagacaggaagactgtgctgcccccatgtctgccaggctcccaggccttggagcaactcagctgagcccaggacctgatccttcactggcctctgtcaatactgagccggaacgggatggcaggagggagctgtcactgtgagagttaggaggaaagtgaatggggtgcaaatacaggctgtgtacgccacgtgaaaggtggtgttcttggccccgcagtgtttccagagaaacctgatgttactgctcatgggagttcacagatctgaggggaaggagagcagaaatcagaagtgacttgtctccaggtggcaaaaagcaaacagcatcagagaaaaacagaacgatctgaaggtttaggggcggatagggatgagatattgggaaggactggagaagggggcatgggtatgaacagaccttgaaaaataacaccttttgaaattcttaagaggtaatatgccttcagccatcgaaggggaattggaacttgaggattactcgacaccacatctagtgaacaaggtagtgaccaagcaggagggcgcagcttctggtccaaaactattctctactataaagtaacaagggctgggcacagtcgttcacacctgtaatcccagcactttgggaggctgaggtaggcagatcacttgaggtcaggagttcgagaccagcctggccaatgtggtgaaacctcgtctctactaaaaatacaaaaactagccgggcgtggtggcgggcgcctgtaatcccagctattcaggaggctgaggcaggagaatcgcttgaacctgggaggcagaggtggcagtgagccgagatcctgccactgcactccagccctgcactccagtcaacacagtgagactctatgtctcaaaaaataaataaaaataaaaataaaatgaataaagtaatggggccaattcgcctaattgccaaaagtgactcttaaagcatttctaaattgctcataattgtacacgacacacacatggcctccaggagtaacgctatattgcagtcagcttctaaagccatgtggggggcagactcctgcgtctggcctttgagtcatggctattcataccggccctcaggttaacttgatggagggcagtcaacaaactctcaacattagtttgaactaagagaatcaaaccatgggaattcttttcagatttttcaaatgttgacgaaaaaggccaaactctgtaaaatagttgaagaggtttattttaagccaaatacgagtgaccatggcccaggacacagcctcaggaagtctgtgcctgaggttgtcacgttacaggttggctttatgcgttttagggagacagaaattacaggcaacacatgtaaggtatatattggtttggcccagaacatcttgaagaagtagggtgaggacctcacagatcctaggcagactgaaaggttttctgactgaagagttgatgtcagcataaaaaaatgtttgagttaagataagcggagattctcgttatgtggatgaggcctccaggaagcaggcttcagagagaatagatggtaaatgtctcctatgggactttaaaaggtgacttgtagttaaatctctcctggatcaggaaaaagagacctggaaagggcatgggattctctccagaatgcaaatttcccccccaagaggcagttttctatagccactcaaaataggtggaaggaatatattctggggtaaaatacttttatttcctgcagggcctgctctctgtcgcctgctgctatcccagagtcagggtggaaccgggaatcttactgctgtgtctgttttatcagtcgtgagatcgctgttttgatgttaacgctggtcagctgggcctgaacgccaaaaggagggggcgtctaaggaggcctgtccaaccccccattcccatcagggcctgaactcatttttcaagtttctttgggaccccttggtcaagaagggggtccattcattgggttgggggacttagaattttatttttggtttacacaaacagttttactttgatgtctttacattctacacttcattttacctctaaaaattaaaacaaagcaagcaagcaaaaaaaaaaaaaaaaaaaaaagcaaagcaggtgacatgttccgtggcggacatgaccgtcctggccaatccttgcccgtggctggcaagctgccgagtccgtgggccggagggcattgattcctcaaagacacttccctgatcggaggaaaataacccaagcagtcacggcaggcgccgccaggacgaggccgccacggcctctcttcttcctgccactcctgcccagtccttccgtgggggccactcgaggaaccaccagagatggccgtgggtccttcactggaccctatccaaaccccagaaatgccagctttatgatgaaaactcacaaaggggcaccacgcaggaatattacaaccaaggactttgttaccacgggctctgtgtatgaaggtaattaacagcttccggtgccaataaagggagactttcgaagcttcccctgaggtcacacgtccttgcagatttgtaccagattccactttcttctcaccaaacgaaacaatgcaacaaccgccacaaaacacatctaggaggcagcatgagctccaggcaccagccaacctcaaatacttcctgttccaaaatgtaagagcagtgtctggaaatacagctcctttgacagtgtgctggtcaaacaccccttagatgtgggaatccaacgctgaagccaaacgtgaattttgcgttattttggagagtttctctacagtttctagttaatcccctttaaggttccagagttttcttttaaaaatggtgcttttgaaacataaccttaaaaagagcctccctaactctgacagatacacgtttcccaggacacaggtacagagggtgatgaaaccgccacccctatgcctcaggaaaccgtggaacgtgcttctctttagtccagcatcccggtcttaacatcggcctctacttccccttttggccgatggaagggcatcgcattttctgaggatgtctttctccccagtagcacagccctcagggcagtcatgtgtcctgccctgtaatgtatatgctgagcgaccctgggacagcggccacgggatctgaggctctggctttccttctgtaggagcagtggggggcacaggagccagggcactcggtcacggtggagagcagcgccatgagggccgtaagccctcagcatgccgtctgtttaacagtaagtccttcatccacacttcctgttgctactgactttttttgtttgcctccggtttgctcccggatgcctgaggtaggtgtcctccccgaagcacccctctcctcaaccgaggctgctgagcacctgctcccggatgcctgaggtaggcgtcctccccaaagcgcccctgtcctcaaccgaggttgctgagcacctgctcccggatgcctgaggtaggtgtcctccccgaagcgcccctgtcctcaaccgaggctgctgagcacctgctcccggatgcctgaggtaggcgtcctccccgaagcgcccctgtcctcaaccgaggttgctgagcacctgctcccggatgcctgaggtaggtgtcctccccgaagcgcccctctcctcaatcgaggctgctgagcacctgctcccggatgcctgaggtaggcgtcctccccgaagcgcccctgtcctcaatcgaggctgctgagcacctgctcccggatgcctgaggtaggcgtcctccccgaagcacccctctcctcaatcgaggctgctgagcgcctgcaaggcctggctggaagccagctcgacctccagccttggaacccaacacccaccactttagtgatttttttctacaataaacatacattgcttttataatcaggaaggggaggagttttagctacaatgaatctgaaacaaatgactgagtagtaatagtttttaagttccccgtaattcagcccttgggcatagttgggtttataatcctgtatgacattttgctggtctctcctggctgactaattccataccttctcctctgtcctcaaactgcaacatctccccagcctaactcagtcaatggctctgtttgctcactccatgggaaaacacaaggctctggcagagaaccgggggtcacgagctcccgcccccaccccaccctgccaccatgtctccgcctgggatctgcctcggtgtcaagtctcctccaagggtggcccttcccctcaccaagccaagggtggcccttccctcaccaagccaagggtggcccttcccctcaccaagccaagggtggcccttcccctcaccaagccaagggtggcccttcccctcaccaagccaagggtggcccttcccctcaccaagccaagggtggcccttccctcaccaagccaagggtggcccttcccctcaccaagccaaggtggcccttccctctccaagccaagggcggcccttcccctcaccaagccaagggtggcccttccctcaccaagccaagggtggcccttccctcaccaagccaagggtggcccttcccctcaccaagccaagggtggcccttccctcaccaagccaagggtggcccttcccctcagcaagccaagggtggcccttccctcaccaagccaagggtggcccttcccctcagcaagcagacaacaactcccaggaagggggaagagcaaagccacgtccacaactgtgacattccacttattcaaaacgcaaagaaataggaggcaaagatggaataatactaacaacatgtctgttatatcttagtggtaggcaaatggttatgtgttttcttttatgatagagctactttacaattaaaatttttaaaacattttaaaaaagaaagagaacaaagtctacagataaaaagttatgagggaagttgaagaaatcaaagttgatctaagacaaatggcattttggctttttcctcctccagtacagctgacaatatcccaaacccaaaaaccaaaatccaaaatgcctccaaatccaaaactttttcacggtgacactcaaaggcaatgctcattggggcatttctgattttgaatttttacacttaggatgctcaaccagtaagaataatgcaaatattccaaaatccgaaaaaaaaaaaaacaaacccaaaatccaaaacacttctgcttccaagcattacagataagagatactcaacctgtatagactttcccaaagcacatgatatgctcacctgacgtttctaaaatctcaagatggcacacgaatacatggtatgaataatgcttttctgttggaagtgggaatttattaggactaagtgtattgaaaaagaaccataatcagaaaaagacctgtgttgaacataacggcattcacacgagggaatggtcaggaaacaggacagatcaacagtggggagggctgcccgggcgcccttcctgctccaagtacacactcatctgttcaaagggagcgagctctcacagtgactgctggagtcattcctgacaattgagtgtgtgtgtgtatcagtctgtttccacaccttcaaacatcaaaatgtctaaagaatagttaagattaaattcaatcattaggaaatgtataacagcaattgaggactgacataacatatacctaaaaatgtttatactcccataccataaaaatgtggctttaaagacattttcctatcaattttccagttatcacctaacctgagattaatatttctttgcagtatttttcagtgggttgaaatgaccaaaatgcagtttgaaagaacacgcttcacattagaggcttctaaggcacaggccactgtgcaggctcaatgatggatgtcatacaggactgctgcacatgcatgcatgctttctctgcccactgttcctgggcatcgctgctacgttatttaaaattaccctgcaaacactcccaccacgcccaccaacccatgcctgaatatgcaataaatgccaggagacacggcactctctctgactcagaccaatgggaacctgatgacaagggaggtaaatggccagcgtcatggggcagccttcccaacatgccacttctcaagtccggcggctcaccccaaaggaagagaatgagggtgacaggctgcaggagaggtccaggccttgaacggggatataaaggctacatcacacacattcctcagtactagtcaacgggacactgagatgacatttattgaggaactactaaaaagctgacacatatctttcatctttatgagaactctgtagagaggcattatcatccccggctaagaaatgagaaaacaaaactgagctattcagcaactcgcctaagctcccacgcaaacaggcagcagaggcgggccccaggtgccctctgtgggaggctgaagccccggcctgtcctcacaccaggcagggatcccatggcaggtctcgacaggcagggtgcgcttcccaagccagaatattaatttgaagcccaccttttttggttcacttggaaactatgcatatttaccatcttttcccagcccatcaagctatcagaaaatcctcttaccctcgtgccacgcctggttaagcacaagcaagttgtctcaaaaatgccccagccacagaattcagtgtttacacgaaaacaacaccggcaaagtgaacttgagagaaagtgaaaaccaaaactgtcgacataagccaaaattttaaaattgtgcatcttcatctggtacttaaagctccccaccgctcccccaggctccagtgtgctggggtaaaaaataaactgcttgatcagtaataatgcagagtaaaatcaaggtgtaaaaaacagacagaaaggagccccccgaacaccccccaagaggccaggggaccgtaccccacagacacagagagccttcccggagcagggcaaagacacctccagaactccgggtttggaaaatgacagaaaacctggccgacttggaagaatcacaaggcaaagaaggaaatctcttcttggaaacgttcagcctggcttcaagctggcttcaacttcctttcggggtgatgagtgggtctaactggggcaccggagggcacaggcggcagcaaaggctgactgtcaaggaaggtgcagcagagccaaaaccagagacccaggcctcgggacgcagtccctgcaaggcccagccacactgccctgcaggacgcatgtggaacggaacactggttccctcagccccacgccatcaggaggttcaggttttattctcggagaggctgcatggctgggaagaatggtaccctcacaaggagtttaaaccctggaggattctatgtggaaacgggttttacagacaaagaaaagggggaaaaagtctgtttccatggcctatagacttggagtaccttaaaatgttacctatggggctgggcgcggtggctcacgcctgtaattccagcactttgggaggccgaggcaggcagattacttgagctcaggagttcaagaccagcctggccaacatggtaaaaccccgtctctactaaaaatgcaaaattagccaggtgtggtggcacacacctgtaatcccagctacttggggagactgaggcaggagaatcgcttgaacccgggaggtggaggttgcagtgagccaagattacgccactccactccagcctgggcgacagagtgagattccgtctccaaatagacaaatgcataaataactaaaaattacctatggaatgaaatatttctgatcaccaccgatacttttttttgttaaagagctgaaaggtacttggaagacagatgatgccactgactcatttaaccaacaaaagctggtggcaatggaaaaggcgcggtctgtccacggtcacgtggccagtgggacccagccccgcccactgcaagctcagaggtctttcctacaggccctcacggggatcagggccaggggttacacctaagccaggcagttggtgcctttgggaagaacacatcctttagcaccagagagaaaaaaaacaacaaaaaatcagcatttctctaccatttacatggcacggagccatttcatttccaaaaaggatggcctcttttaccaccaggaagagcacccaaattcagtgaacctgataccccacacctcccccctcgccctctctgcactcctccaataaggcagagcgtctgaacacctctttggctcagcgcagggccggccggacagggcaggggtgggcggacttacccgtgctgggcatgtggttcacgcgggcaggattcagcagctccactggctggtctcggccagaaagtccatctggagaacagagaaggcactggcttcagaaactgcgcgcatttcagccaacatactttatgctgggagtctgcagggagtaactccccaaacaatgaaatgcatgtgtccttcctacttttacagggggacactttcagcttcatcatagattatttgtatttgccaatgtagaataatcaaaatagcctcctactgagatatggcaaacgcccgtttctggcctaagagccactggcttagcaatttgggtttacttctgttcagcaaccacattatacccactcgtgctgatcagaagtcggctcttctgcagaccacaagcattaagataacaaaaagagaagagcagctcttcctcttctcagatagtgacaaacggtctggacgctcacagaaacacagcacagggagccctcggaacccgccaggtgtgcagacagggaaggaggcaagctgaggccactctagctgcaaataggcatggaggagaacgcttcaccaggtgttctcaaggtatagagtcctttcttttaaatccatttttagactgtattatggagcggtttccatctattcagactcactgcaaagatgagactggaacccacccaccacctaaacctggcacaggctggatttagaccgcctgggatttttctatattctcccaagcagaaaggaaagaaaactctggcaagatttccaggaatcacacttttcttttaaaattagcttctgacaagtggtgtaaaatgccctgcaataatatgcatatcattacagacttgcacgcggaggtcattttccttactaagcgaaggagagcaccagtttcgcagggcagccatggaactctgtagatacaagttttaaaacaggacaaaaacgactaacatcaggtcaaatgactgcaaaaaaaaaaaaacccatttttttatccaaaatagataattcctagcattgccaacccgtgcatgtccttggagatgttcaatattcaagaacggaaacaagggtcccaggagattggagggcatgctcttgaagttagaactgggaaagtgtgaggccaacatggacctgcaggagctcagcaggtgaggctgctcttgggcaatgcagagatcaaacgtgggtgccagaaataaaaatcaaaatgaagacaacaacaaaaaaccacggggacctctccaaccaaccagcagctcctcccaagtctcggcaactcttaaggtttgaaaacagaagtaaagacagtaagacactgggcatattcggaggcaaaacagttctgcttccctgggtcaggagaaagaccggcaggtcatagttacaccttagaagcaaccaccagacctgagcaatcgccccaagtcttcacacattccagggctttctcaaagaacatggccaccttaggagatggcctggatgctgaattgtaaacatgatgccatgtctcaagagaaccttcactgcaactcagaaagagaccccagatagtggtggaaagtacttttcaagcctttttttcccctaaaaataaatatatttgtattcatttttataataaataaaaataaataaatgctcattgtagacaaaaaataaaaaattcgaaaaggtgcctgtatgtatgtatgtttatatgtgtgtgtgtatttaacccaaatcccactataaatactttcagaaacagcagaaggcccttttgaagatctcaatgtagctgcagttttccaatgggaaggggtcaagaggagggggcttggggggaccaccctggtcagggttctgcaacagttcctacgagccaatgcctgtcccccagaactgcctcccctgtagtcagctcaacgcccaaccttagcttccacctcagcaaaagccctagaaccagaaagtttggaaaccaagaagcccccagtggtgagcagcagcggtggggccagagtcccagctcacatgaagccctttcttgagtttggaagtgaactgcttatgcctgagcccaaaaggcggatccctccagcaccgagttcatacatgaggcctaattacaagttacttttactacactgaagcaggaagacacatcagatctcagtgcaaccgatttgacttgtaagtcacgatacgtggtgttcctgtatccacaagcatcactcgtgtgtttcagatcaaggtgcagcttagtgggtcttggctcacctacatttctgggcactgggctggtccgcgtcccacctacccttcaagaagacatttattgcatgcttgcactagctggcacaccaaggagaatgccgttcgataacagcatgtggattccctgcgtaaaccagaccttgaccttaacatgtccaatcctgtatactggcgggtggggtggtttctgacaccagccaactggcaccaactgggcgtccaatgatccagttccactctgacaataactgcccagagctagcacacacgccacaggggctcaggtccacaaggctgcccccatttcagacacaagtcctgggcctcctggacttctaaagatcggctataaatcaggagttcccacaagcccctctcaggttctgtaatttgctagaagggctcacaaaactcagaaaaacactttaccatgttgatgggtttattgtaaaagatgcaaataaacagtaacatgaaggcagggtctggaggggtcctgagtgcaggagcctctgtgtcagtaccactggggtcagcaggtgcggctgaacatgctgctcctctcgtctctgcgtcctggtgactggccccatcccgaggctatccaggggtcctgccctaagtcacttcattagcataaactcagaagcacataagaagctcctccttaggaataacgaaaggctcgctggacactcaggaagctcctgggatcctaagagctccctgccaggaacgaggacaaagaccagataaggcttattcttccaccacacagagatgctgcttgttctcgttgtgtgccactgggcctggctagtctcataacaacctgtacattcaaacccccaacactgccatgttcacatctttgtagaatgacatggaaatgctcgaagggaaagctgttctgaggcggcactgggttaataggaagtgcctgcctctcgcggaacagggcagccatgtggaactatcagaaaacagcaggagtgtctcaagcacaggcggccttggaggcggcggcacagacatgggtctcagtgccggacgctaaccccacatgtggaggccccgtgagccccagccagctggaagcacggccacagtctctttaagacaagatcccggcctgagccgtccttggtcgtccacctggacagcatgacagatgccgcatccctcattatgaaaggctggggctcagggcagcagccatgatcgagaagccaaacactaaaggcgttttgccagaggtggctggtggaacacaatcctgggggtaaagcagtggcggtgagtgcactttgcaggcgcaggggccaccaggcctgggaaagacagctttggaacggacctaaacaaagcgtggccagtggggcaaagaacgtctgtcaccagggtgaaatagacaagctgcggtacacagccagctggaacgcatgacggcatccgtgaatgtgcacagaatagattcttaacgctgtgttttttcagatatcatattccagagtgagttaaaatgaaattagtgatgagaggtggaatttccatatttatctgcctctgggctgaaatttctcaggctgaggagaaagcggtgctaagaacccagcgtttacaagcaggaaaataatgaagatgggaagcaaagtaccacttcctcatcacacgcctgctgcaagcaggttcccccttatctgtctccgcttgagaatctatttttggaaaccctgctggacagggacgatcgtactgagtgtcctcaaacagcatttaatcagcgctggggctgcagaccagatgcacactgagagggaggccgaggagcacgggtacctcgtgtcctcaccagcacatgatgtgccccagtgtgctcaatgcacccacagtcaactgcagtgaccacatcactcttgccaggagtccctttcgcgccgacaggacccagcctgaactgagcattgtttgagactcggagtccgcccatgggaggaacaggactaagacagacagtgcttttgcttttcagaatccaccttgcatcagacgggtaggtatgtctaaccagaaacccggccttctggagccaaaggaacctcactttcacccggagggcccaggccccccacttcacacttggggaaatggcctcaagggctgtgcagtttcctaggatcacggagtgagcaccagccggaatccagttctgtctcaattaaaccagcggcttgtctgaagctggaccttgagcaaacaggtacccaccaagaccagtgccctccaccaagggtttcacatcacaataccgacacacaagaaaggaggtttcttgagccaataaagaaagtacatgaaagccccacgcacaggctcctgaactgggaggggaagggagtggggagaaagtgtggtttccacccttgggacctgcctgggaacacctagtcctgcccaggttggggtgaaagggtgtctcttgaaggtttcatttgtctttcccagatgaccaatgacactgaccatcttcttacatgtttattggctttttcactggctgttttggattcatgtctttttgacctgttttttgcccccagttgggttgtctttttcttattgattcagaggaattctttacaaattctgaacattaatcctctgtcaattaaatgctgcagatatcctctcaaaggtcctatttctcaatctttcaaagcttctgcttttatgtcaggttcaagaaactcttctcttcctggaggctgcagagatattttaacatatttttaccctgaaactttgcagtgttcccttttatatgtaagtctctcatctactggcactgatgtttgtatacgctatgagacaggggtttggggtatgttttcctatgataacagccaaatgtcccctcagtgttattaagaggtcttatctttcaccatggatgggcaacattagttcccttataagccaaatctcaatcctgttggccaacttgtttttggttttgccaataatcacactgtcttaaccaccataactgtacaataactcttaatattggcaaggcaaaaaaccctacttttttcttccagatcatcttgggcaaaattggccttttactccgccacataaattttaaaattaacttgacaagttccaccaaaagaaaagaaaagagaaaaagaaagaaagagaaggaaggaaggaaggaaggaaggagaaaaaaagaaagaaagaaagaaggagaaagagaaagaaagaaagaaagagaaagaaagaaaagagaaagaaagagagagagagaaagagggagagaaagagagaggacgagagaggaaggaggggaagggagggagggagggagggagggagggaaacgaacagtgcctgggattgcactgcatctgtcattttgagagaagataatctttacagtactgcatctttcaatccatgaacatgggctattacctcctttcatttctctcagaaatgtttcagaattttcagtgttgcggtcttgaacatctttagatttattactaggtatttgatatttgatttccattatcaatttctgtttgcttgcatatggaaacacaattaatttttacttattggttctgtatcgtagaatattaatttcaatcatttttctgtagttatcgtgtattttctacatatagaatcaggtcacgtacaaataatgacagttgtttccaccttccagacctcacaccttttcttcttctttattctgctggctcagtcctacagtacagtaactaaagagaaatggtgataaaagacactttggtcttgtttctgatcttacgaaggatatttcaatgttttactggaaagtgtattgcttgctgcaggtgtccaacaggtaactatcagattaaggaagttcccatctactcctagtttgccaagacatatttttaaatcacatgtttgcttaactgtattaaacttttctgcatcaattcagcttattaaataatttccccttccatctgataacgtagtaaacttttttttctcatgtcaaactaactttgcattcctgtgacaaaccagcgtggtcaggcccagggggtttttgggaacaggaaggcagcaagagctccacacaagctacacctaaactcttttccacgcttgattctgaagacttggagacctcagtcccacatttcaccttagcacctcacttcaatatttcgttatgagcataaaatgagaattggataaattaacattcctttttttttttttttgagacattgtctcgctctgttgcccaggctggactgcagtggctggatctcagctcactgcaagctccgcctcccaggttcacgccattctcctgcctcagcctcccgaataggtgagactacaggcacccgccaccaagcccagctagtattttgtatttttagtagagacggggtttcaccatgttagccaggatggtctcgatctcctgaccttgtgatccgcctgcctcggcctcccaaagtgctgggattacaggcgtgagccaccgctcccggctggataaattaacattctaaagtgtgtttggtggggggttgctgacatagacaaaaacaatgaaaccgctgtgactcaagagtagtataggtcacacctcactgtgcacaccccactgtgctaacagagctgcttttcagacacgggaacggaagcttagggctactgggaaacagtaacgacacagtcttcattgcagccaatctccccatcctttcatatttttcaaacaaaggtgttgttttagaacagctgtgagtttatagaaaaattaaagctagtagagacttatcctatactctgcaccctccatgccctacaactaacatcttccattcctgtactctgcaccctccatgccctacaactaacaccttccatcaggatgctgtgcttaggtgtcatgacagaaaaagcccggacttgattcagatttcctccgtttttccctggtgcccattttctgtcctagcgcccatccagggtcctgcctctcttggctgcaacagtatctcagaccttccttgtttttgaccaccttgacagctttaagcaatcctgcttgggtattttatagaatgtgcttcaactggggtttgtcccagggcctcactgggactccagggactgagctgcgtgaacacctaagcaagggctgacgtcagaccagagaagccccgataccttcaaaccgaacttcatgggcaacggcagagttcccatggtttaaagaaagagcttagccttaaagcaaagacaaaagaaaccacttggttctcgtgtctggggcaaaaggacttgtcttttgcctgaataaggagggacggaaaactccttctgctgggaggattggccatgaggaaaacagcctcttggcctgcaccaaactggcaggtgtctgtgagaaagcgctgcgcgagggcccatgtggcccaccaagacctgcacctcctggagggcgtggtgcggtgcacactcacatgcaaaccttccctccacacggcgtgtgagtcaatgtggaatgaagtgggtatctatttgggtttggggccatcatgccatcccctcaggcctctaacctgtgtgaccagaggtagtagaattttactggcactctgatgcccttgttcaattaaattataaaaggaagttcagtgggctgaaatgtcatggcttggaaacaaaatgatctacaaggtcagccaaatactcaaattccccctaggtccttcccctgacctgaacccccagaggggtctccatctgccacctcaagcaggacctgcacctgcgctggcctcctcccagctcagcctcctgctttgctgagtgaccccagcagcccatcctccctccactgtgcggcccacaccctggcactacccctgggcctggcagatactaggcataggcttgatgctccataaacttgtgcccacccaaccggccctccctgggagctctgcttatagcctcgagcatcccaggccactagattctgcttttccccactgcgcaggttactgaaaattaccaaagttccataacagtgcttgcatctgcccattaatagaaattaaactttaatgagtaagtgctgtgaattcctcaggcatgtccaacatagtttatgtgcatttattagagaaaatgaaaatggaaaaagattctttccctaagcaatatttttccttcagggtaatcaggcagtcttaaaatgtcaaggataacctaagaagtattcctgttgtctctccactaagaatcaaaactagctgtagctgccggcttacaggaagtacgggtttggcagaacctgctaaaggacactggattggctatgatcagtcaagccctgaaacagaaaatcccaggacaaaggactcagtgaggcggagagtgggcaggggaaatttcagatatgcccaccagtcccgatgttttggtctggatttgaacaactggctgtaaaaagacagtttttaagacaaccagtaaaaattaaacatcgtttgggtataagatgatatgtaggaatcatgattccttctgctgagtgtgataatggggttggatctgttagaaacacacattcaagtatttaagggatggtgctgtggcctctgagatcggttttaaattctccagaaaataaaggtgtggagagatgaagtggtcacgatggagagcctcagggatttcctggcgggaggtggctgtgggcactcgctctatgcactggtctctttcctttcatatatctttgaaacttttcataacaatttttcaagagatgccaggaataaagacgagcctgcccccaccttctattcaatatgtctttcctgagcatctgctgggtgatctacctaacttgttccttcacgaatatcccaacagtcttcagttcatccccagcccctatgtgttcaagcagacacacacgtctggttcacagctcagcgagcaggccctgagcgtctgggaacgtgagagtgagcaacgcagaggcctggccccggcccagcagaaccggcaacccacactggctgcctgcgtccagtcccgccatggggtctgcctggtgccagcacctgcccagacacagggcagaggagactgcaggggggtgtccagctgctctcacgtgccaggccaggcttgctaacacctgtggcttagtcgggtgatagggacaaaacgtgcaaactgagcccgctggacacgcagactcagcaggcaggcagagcccggtggggaggcaaacgcgggcaggagtgagccacgggggaaagggaacagcaggttactcggggattttcccagggaaaatgtggcagtggaaacacagcacctcgccccttcccctcccccgtcggagaaaccatccatgcacccaggaggcgtggcagccggagaagcaccggggttgctgcaggccacaggacgcgaggagcagtgtcaggaatcagtgtggaaaaggggctgcccgggggctgaatggggctgtcctgttgccacaggtcctggcaccgagcatagagccaggtgtgtgggcgggggccggccaggcgctggctgagcaggtgatggccacggcgccggcaggagtgaaagcaagccgctcttcctgctccgcagggccctgctctgtgctctaagggccggagaacagcgtttcctggagggagtgtctcagggcctctcctagacggttctgcagggcctggcatggccaggctgcttcctccctaagtaagacaacacggagagacagctctcagctacccctacctaccaagtggcacaggccagctgaagcgttcataagtgatttagcaaatcaggagaaaatgtcctcgcctgcctttgaaaacagcaccatctctgctcctgagaggatgtccactgcccagtggcgagggcacatgtgggtgcgtcactgcacagctgtgctgtacagcgctgggagcgtgcgaggaggatcacctggcatgcaccgtgtgcagtttcaccagagccagtgggaggagtcacacacaacagacgtcaaataggaacgctgcaaaacacacaaatagcatctccacagctaatgtaaaatagttttctggataggttcccttcagttaatgatgaaaggtgatgcagctatcggcaatggctggagactagctctgcggtctgctcgtggataaccgcgctccctcgctgccgggccacccgcacagccgggcaaaccaaaaggcccactttttcatgctgtacccaccacttctgtttccccgcaggcatcctactttctaaactaacaccttttcactcccgagaattctaacaaatattatacaattcctacccgcatctaccctccacctggacgtagaacccgtgtgggaggcagtcctgcagggtttggggtggaatatcccccctgtcgagtggagacgaggctgacatgaggagtgaataaacgaacacagataaagaacgaggcacacagtacgtgcggggcgagagactccctttgctcctcccgcttcacctttgcttcagtgccgcagccggggcccgtgccctccacgccagggcatctgagccgaacaagctgctcaccaaacgtgactcagcaacgaaaaccactatacagacgaaccattctcccagaatattttccacactgctgaacatcacaaactcgctaaaggtgcttgtggttaggtggcaggaagctggaaaataggtgcatgttaataagtagctcacgaaaaatgagtcactaatttagaacaataaactcaaagtggccatttgcggaaagtctaggcaggcacattaactgcgcggctgggagcatcaaagcagagatccctccctggagcgaggtggagaacggagggcgctgaccacagtggaccacaccctctcctcctctcaccaaaccagacctgaaagcaccgctcattctctgtgcagaaaaaggatcctttgatgccaagtttaaggcagcatttcggaagtgaccaatctgtggtcagtggccagtgagatggggagagagtgaggctggggctcccccagcgcccataacactcggtgatgttctgtgcgagtcaggctgaccctgccagcagctacccaagtgacaggccggtggcttcacccagcaaaagtctgctccaaggtgcttcagccaacacgccccttgggttgaaagacttactcctcttgcacttttttttttttttgagatggagtctcgctctgtcacccaggctgaagtgcagtggcgtgatctcggctcactgcaacctccgcctcccgggttcaagcaattctcctgcctcagcctcccgaatagctgggactacaggcgccggccaccacgcctggctaatttttttgtatttttagtagggatggggtttcaccgtgttagccaggatggtgtcaatctcctgacctcatgatccgcagcctcaacctcccaaagtgctgggattacaggcatgagctgcagagcccggccacctctagcgctttttaggacaatatttgcctcaattcactgaaaatgtatttcattttctaaactattgttgccatatcttgctagaactaaacataacatcctgcttacattctaaatgagaaacaataacagctaagtaactcctagcaggagctgacgatggtcaggcacttatctctgggtttcattcacagaagtagtactcatggttctcaccagagaaataactggcacagatactgttattgtccccattttaaagaagccagggagatgataaagaccatcctgatcaaggttgggaccaactttcaaaagcaaactgacccccactctgctgttctgcctctccacacggactcattcaagcctcaaggtcaacatcccatcactggctcattcattcaagttttcctgaactagcgattaagtgatggccacaattttggggacacagtgttgtaagtccctgcaccccaaacttccactgctgaagaggtgatgacacgtaaattagaagaccgtgtgggatcacgtgctggaataacaatcacgcaggcggaacacggcagggactgttcttttagacaaagtgacctgagagggccctgtgaggtggtggcatttgagccgacacctgaaggacatgtgggatcaacgatcccaacgaggtacacacgaggtggagggaacagcaagggcaaggcctgggaggggaacaagcctgggggttcccacggggcagacagaggagacacggctgcaggtccgaaggccatggtaaggaccttccattccgacttcagccaccatgcggagtgtcgcccagggcggggaggggctgcggaaggcgggggaggcggagagagagctgggagagatggggaaagggatccatcaggactctgcgatggacttggcgtgggtgtgccacactcacccaggtagggaagacagagagacttgagtggggagaagcaagccggaaatccaaaatgcagatttgatggaacctgctgattttaagagagccaatcaccattttgaagagcaaacagtacgtctaaacctcctttgaatcattactttgtgactttctcaggaaaaaaaaaatccaaaatgttcagaatttgtgtcaatggttcaaaattcaagttctccatattctacaacaacatgtatttcagcagcatcctttactctacccgaaatctcactatccaaataccacgccatcctgggaggggctctaatcttctaaaatatttattcattcctttagctgagctattaaagaaaaaaaaaaaacaaggagctgaatattaagtgacacacactgcactcaaaactcttgtgtcaggaaagaatgtgcacaaaatatacataagcagtgaagactcgtttaatgtgtcagctggctgctccacactggttctgccgtctctcaccccgcgacagctgtgctccttcctgctgtgacgcgtcatccaaggggaagctctgcttccgggcctcccgcctctggaaggaggccgtgcacagccctcccgcctctggaaggaggcccagcgcagcatcctccgtgatggccaccgcggcctctcccatcggaattgcagggaataccccgctccacatctcctatgaggatgcgtggatgtcctctggttaaacaaagcaccctgcttttattccatgactctgacaagcactatcaggagacacgtgtggtccagacatcaccttaggtgctgagaacccagctgatgaagacacagagtcggcccccaggggtccgagaggagaggtccaggtgataacatcactgtgtcttcagtacccggtctctaaccctgcaggtggctccccagagatcccggggccacctggccagaaccagtggggaagaacaaggaattgaaggctgtgaaaatgtgacatgagattcagatagtccagggccccgcacggcccagctccaggcagtcagctccacgtgccttcctgccactggggctgccactggctggagcctccagcagcttgtcttggggcagacacagtgggtacaaaatcaagcactggttcacacagcaggccattctcctgaagtatccagaagctgctatgggttcagcgtgcactggcagtggtgacacaggcatcgggcctcctttagaggaacgtcttggcctctccaaggagaaggggccagaagaggcacttcctccctgggacctcgacagaaaggacggttttcagtggcctgactgtggactgctgtgttccagccagaagcccgctgccagaggccacagcgaaggggcacgacagtggactggctcatgggcctccccagcagaagagctgccagagatgggactcgggggcggttttccctcacccttggcgggatcctcccctctgcagacccggggaacctgcccacgtgtgttcacgtgcccccgccacacgcctggttcacctcgagacctgcatcaacttaccggtgcagccagcacgtctggaaagagactcgtcagctggcacctggccctgtgggcgccgtcagctcccttagaggatgacgtggggtggaaagggcctttccacatgagtggtttccatgtcctcaactttaaacgatttcaagacgttttactctccttaattttggtactaccgaataatatacaccacgtagttttattttcatatctaaaatgttttcaaacaaaattttatttctaaaaagtgaagatgggggagacacacagatgccaccacagctagcgtcgtgggtgatctgggtaaagatttccattcccagccaggcacagtggttcacgcctgtaatcccaacactttgggaggaatgaggcgggaatattgcttgaggtcaggaattcaagaccagcctcagtaacataatgagaccctgtccctatcaacaatacaaaaaatcagctgggtgtggtggcgtgtgactgtagtcccagctacttgggaggctgaggcacgaggatctctcgagcaagatcacaccactgcactacagcctgggtgacagagcaagacctgcctccaaaaataaaaataaaaaataaaaacaaagagttccattctccacacactggccccagctgtaaccacacagtacctgcagtcctagctcctgcttgagatgccccaatctacctccttgtattctagaacacgctctcccactgcacaaggctcattattcaatggtacaaatgtacattcaagataatcacatcattattatttaattcaatagtactccagcacactcctccctccaacaaaaccagcttttctggatcctctaagaagcaggtgtaccatgtgcagaaatcactattacatttctgttatgcacagaatgaatataccctacacatcacaacctcccctacaccaagactaacttaatcttatcactattcctttttatacaacagaagcttcagtttctaaatatacagtgatttctttgtattgcattctattttaatcttctaaaaatagagccaccaccaggagaagcgacttgctgttggatgttcactacgctaatgtcactggcaggatgtggatttctgccccttccagactttccagcttgtggtttccacatgacgactgtcatggtggttccaggattctggccgggagtgtgggagcaggatcgcccagcatcaaagccaggatccactcccaggagcctgtgatgccacatgagccagctgatcagtgtgggcctcaccgtcaacagccatcgaatgggtgccaggatgctctccaaccttgcaggactgagaggactggactaagcacccacaaacgtactcacaagccgcagtgccacagatagcctatgccatggacatggcccacgccaccatggacacagcccacgtcaccatggacacagcccacgttgtgggagcaagtcctctgactttcccctccttcagcagattggctgagagcatttctcaggttttagcagaaagttaaagagaaaaatcaaaaggcacgagggaaagagcagaacaaaaaggaagctgttgcctccaagagctctcatgtcccacggaagttccttcttgaggatgggaagatggtctgtgcccgccacctcctccccttgcttctccgccaaaggacaaacactgcaccaaaccagagggcagtcaataggttaaaatgttttcttaaacgattttccaaggttttaaatgcttcatagctctaagaacagagttatccaaaattttaaaaatataatcccttatcttctgtttaataaagttatttttgaattttgaagaagcagaaatccgatcatttctctcctccctccctgacgcacacacccttaagacccagcctgttctccgccaggaacgcaccacctgcgcttcgccggccaccggttttgcaacggagagcccgctggccacggcggcccgcactgcacacttcctagcaggcttcctgtgtagctggcagtgtgcctggcagagcagaggcacaacacacattcccatcacacttcatacgcggcattaagctcatgacatattttcatcttctcctaagatattagagtctcgggaacaaatccacttcctatcactcaacgtgcaactcagatgataaatcttgtaccactgcgttagcgtggtaaaaatcagaatcatacggcaaagaaaacacagaaattacatcaaaacaaaacaaagatgcagctttcgtaatctaaagcaaatttctttggttttatacccataaagtcccacacttgggcatgaaggcaatcttgaattaaaacgaacacccctgtatgctgttatgaccgatgtcacatctaatattcagacaactagaaagaagggctagccttttaactcaactacaagaaaagaggaactggaaaacagcagtggctgaatgtgtactccttgctttgatgttctgaattaacacgcgcctgtagtaaaagccaattttacactttgaaaagcacagagcctcctcatgtccacaacacagagctacagaacacagcaagtcaaccagaactttaggttcccaaaccttactgcactgactcgataaggatccctcgcttcccactgtaagaacaaagaaacagttatgaagatagaataaaatctcgccctaatattgtaggcagagttgaattcaagagaagaccccaattaccagaaaggaaagaaagcaaacggccctctgagcaggtgcactaagacccagctgcctgttcctggggcccaagagtcatcagaactggagacaggcaccagggagccagtgggcggctgcatatctgggtgggcaggagaggtggccatgagcgtggcttggacagggaactggaactgagaccctgtgtccgggcagaactcttggaggactgtctggtctatgaaaagagaactagaaaaccccacccaccaggcctgggaagcaatagagggttgctaggaagaggcttcagtgagaatctaagaccctaaacctgggtccctgtggatgtggcctccagattcatattctttgagtagttctggaatctcaagtctagaaataagggtaaaactagtctagaacctgggaaaccctgtagccccaggaagacaaagaaaaatagctccttagggctacacccacaatccacagcacacaaaacacacaaagaaggatgagaggaagggagggaggaaagtcccctgctgaagagtttaccatgcaaatttaacatcacaaatgatagatggaaacaacccaccatgtgggaatcggcaagaacaacaaaaccgagaaatgactccaaaatgtccacaaatattaaaacaatgtggaaaagacaacaagctgcgctaaaaaaaaaaaaaagttaaatgaagaagagaaactatcatgaaggaaaaaaacctggaaatgggagatgagaagtttttaaaaagaattaagtgaattttctataattgagaagaacagattagatctagttaaagataaaaacagcaaattagatataaagataaaactagatctagataactaaccagaatgcagcacaaagataggaaaagataaaggagagaagcaaggataaaagaataagatggtccaacatagacctagtatgagttcctaaagaatggaaaaaatgtacaaatgcagtattaaaacagataacgaatgagaatattccagaattcagacataacagtccttagatttaagaagcatgctaagtctctattaggataaataagtgtgaatcgacatctagacacagtgcaataaaacatttaaacactaaacatggaaaaagatcttaaaagcaccaaggtaggaaagttagatgatctaagaacattgaattgagaggcaatgtttcaacagcaacaaaagtagccaaaagataatgaaatgtcttcaaacatgctgaaagacacagcaacctgcaattctacacctatctaaactatcattcgggtaaaagggaaaacaaaaacattttcagataaacaaaacttgagtacttaccattcagaaaccattgctgaactaacaagggattatgtcagaaggaagaaaatcatatcccaggtgaaagagtaagatgacagaagcaatggtaaggcaaaaacactagtaaatcatgtaagtacacattaataactactgaatattcaattaatacaaaggttcatacagataccgagactatgtgtaatcttgttttctcactgtgtgtgtgtgtgtgtgtgtgtgtgtgtgtttcaaagtcactgtttaaaacacctggttggtttcctcttaagaacaacatagaccttaaaattaaagggcttccctttttcctttgacagctaagaaactcagagccaattatgcagggtttatgacctgcatctccgggctctacttctctttgagagaccgtcattttttctttgctctgagtcctttgtctttattcttacacagccttcactaatgaaataagaattaagtacagctgtccctgaaattgtacgcacaggcaccaaaacacttgacacgccaacatgccacagccttggcttcttctcattataaggaggaagaggaggccactgaaatatggtctagtgtgagtaactctgcacaactctgctgaaacaaagttcagtaccactaaaagcagggtacgagctcagcaatcctactctgaaacacaaaaagctcccaagagcatgactgacagcaatcactgccaggcacatgggccattcttcctgtgctgcactcaacatcacacgtgcatgtcggagagcccgtctttggaaacagctacacacttgggcaaaagcaattctttgtgagaaataatcagcaaaagattgcttatcctttctacactcagaaattagttaagagtaaccagctcttggaaaaggataaaccactctatgcaaatactcctgcaaaggttctcgattaatgcaaatattatgtttgtcttttattttaatgcaaacagcatctgttctgcacagtccatgccatcactttgtagtctgtgtggagcatctcaagtgtgttccagctgcgtttcagagtttgaaacattctcagagaggcagagccacagaaagcggttcactgaagaaaacagcaaacaagttcagtggggctccttctaggaggcttctttctcttttaaggcaggagagaaacaaatccaagaatgaattcccaaatttacttctgcagaggtctggctttaagtgtgggatttttcttttttaatagttttgactaaggaaaaaattaggtttgctttttctgtgaattctgtcgcaggggaaagagattcagaacaacacatgggggaaaggacaggctggtcggggccaggctgccatccagagcactgacccagcgccgaggcgggttccagcccctcccagaaggccaggacttcaccccagcagcatcctcctctttcatagaaggtgttggccatctagaaggctccctgccaacactggcttcctcagatcgctccactgatactgttctgtgtctgcccctaagaggggcatacccttgtctgtttttgtgtccatgaccctgaagcaatgactagttcagcagcagaagggactggatgggcagatgactggatgaataaatcaagctacctatggggaaacagataatgtggagaaacactgacttgtcacccttcagatttcaaatatagtcaacttccaaatctctacccaagcaagagtacctggaaacagtttgaccttaacatgctaataatactaattttaccattccatttgttagaatgcaggtatactgctaatcggatccactagaccaagaatccacgtgggatagcctaagaagacagaagaacctgggtattttcagatgtccctcaacagaaacacctattctcacataaacttgctgttaaaactctaaaatatccatgtagacaaataactctgggtaaataacagaataagcattcctataaaccctttaataattatcttagttattaatttcatttcaaattgcctgattttccatatatactgctaatcatcttatagaagaattttgtttttgaccaaaaaaactctgaatatcgatatttaataaacatgactgcttcaaaaaacacaagtgcaaaaaaaaaaagaaaaaaggtgaaataggccatgtggtccagccttagcagagagaaaaatcacaaaagctggacaaatataaacacatcttcttgatgacactactaagttaaaaaaaaacagtgaagaattacaggaccagacaaaggctggggggtgaagatggcatttggggctgattttcccctgttggtatttgcagagccccacccccagccatctaagaatctttagtacttttgaccgcctcttgcagatattagggttaggaggagaactccagggactgacaggcaggagagaaggagggaaatgtgggttgggatctggaagcaacccctagggaaaaaaagagactccacaataaatggaccctcaacaattgcagctctgcttctaatgactctgtaatccttgaaatagaactgaagtgatgactcattgctagggcccccaagcaccaggcagaaacaaacttcagtctactaatgaggatgatgtcatcatcctaggcctcaaactgtctcaacagattttgcaaataatattttcaacacacacacttacacattcacatatcaggcagaggaaaagacaacccaacaaaaaaaacccaacagaacaacaaacaatagaaaaagaccctcaggtgctccagataatagaattctgagaaagagactttgttacttatttgctgcaataccaggacccataaacaatagtttcaaagtaggaatatcaatagtgttctagtaacgataaaagagttgaatgcaatttaagatcctgcggcagttttagaaatagattttaaagaaatgatgatttctatgtttaagaagatgagttggaaacttgaaaagagaattctagaactgaaaaatgcaaaaagtgaaattaaggactccatcatttaacagattagacacagctagagtgaatttgtgagtaggaaggtgggccagaaggacatttccagaatgatctcaaaagtcaagggcaggaagttggagaaacagaaggcaccgagacagaatgtgcaggcagacacaggaaaggagacactgaacgggtcaaaagcacgtctgaaaggaccctggccaagaactaccccaaatggctaaaagacaccagggaaaattgctgaaaacaaaaacggccgtggagggggaggggggattacctacaaagaacagcagttaggatgactggtgatttctcaacggaaacacgtaaaccagaaaacagtaatatctttcacagtgcagaaggactgcttagaagtactagaagatggtaactgtcaaactagaatcctctaaccagcacgggcattcttcaaagagtcattttccaacaaagactgatcatcttacaccagaagacattctcacacctgatctcagagggaagactggaaatgaacacccatataaagaacaatgaaaagggtttacacgtgtggatatatggaaatgaatattgacaaataataaagtatgccacagaagagacaggacaaaggagtaagggcacagtgaaatggcagatgggcacacaaacattctaggcaatcatgttcaatgtaaacaaactaaaggctctactccgaagtgaagactgccagactgcatagaagaacataaactaaaaaaattcccaaacacatgcttttcacaaggaaatatctaaaacatacagctatgcaaagtatggaaagaaaacagttggaaaaatatgtaccttgcaaataacagccgaaggaaggctggcatagcaatattaacgtcagacaaagtagactttaacacaggtactgattcctgactttgacagcgtatcaccccatttttttgaatataatgcaactaaagtaaaaatcaacaacaaaaaagaactaggaaaaccttaaaatacacttggccagatgcagtggctcacgcctgtaatccccaacactttgggaggctgaggtgggctgatcaattgagctcaggagttcaagaccagcctgggcaacaaggtgaaaccctgtctctaccaagaatacacaaaattagccaggcgtggtagaactgtggtcacagctactcaggtggctgaggtgggggactgcttgagcctggaaggtggaggctgcagtgagctgagatcacaccactgcactccagcctgagtgacagagcaagaccccgtctcaaaaacaaaacaacaacaaaacaacaacaaccaaaaaaacacttataaattacctatatgccaaagggaaattgggtaataaaaatagcacacattaaattttctgggaagcagcgaaagccatgcatagaggaaaatggccttaaaatcctcatattcgggttccacttcaaaggcttagaaacaaacggaaattaaactcataaaagtgaaaggaagtaataagaacagaacttactgaaacagaaaagagatatagaccgaagtgacaaaaccaaaacctggttgtttaaaaagactaatgaagaggaaagatctctgctgacaatgttgaagaaaaaaggagtttcttctcagcccagagcctgtggtatggcgtgagccccagtccctagatcacagcctgcaagtaggaaatatggccttgtggggcaggagaggaagagagaagtgacacagtgaaacgtcctttgtcacacagagggcatctgacagccagctaaggagaagaggatctaagggtgaagctcctgccagagcccaggaaggaaggctgaagactcaaggagccagatgacaccgctcccttgccttccacccccaacgctgtgattgatttcctaactgcatgccaggccgccacctctataagctgagcaattccttttggtgaagttcagctgaaagacagaggttggggtgtcccatccaacggaagcccctctgcggaccgcgtgtccagactctgcaggcgccctgtgacgactctcttgcacacacgcacacacacacgctcatgcaaaagcatcgcatggtgggtaagaccgtggactctgaacccagacgtgcaattcaaaccagactccctcactcactagctgtcagatcttaggcaagttttatatgtcccagtttcttcatcataaaatgggaaggacaacgcttggatctcagggtgctgatacgagtattaactaagtggtacaaataacgggtctggagcagggtctgtttattgtccaataaacatgctaagtttctattatccttcatcgtggtacagaatgccccaaaccggcctgctggcctcatctctcttcccgccagcaatcccaacactgtagcctcaagtgtctctatcaaatgcctatcaggccactcactcctgggagtaccgcttctctgtggccctgctgtgtggcctgtggcctgtggcctccggctctgctcctgcagcctgcaaggttggatgtgaggggatgtgaggtccccctgctgcagtgttctcatgcctggcctccccctgggcacgccttccacctggggcccgagcgctgcctctctttcccatggagggcaggaaggcggctcacattgcattgtgcaaatggctctgtctttgctgggatggggactcacaccttgaacctgagaaggaggcacggaagcctatcctgtcagcggccaccaagaaaacccagcttcctacgtggaagatgacaaggccagggcactggggtggagacggaagccagcctgggagcggctggagcggcagtctccgctccccacaggtacatgcacctaaactcgatgcggcactaaggtttcaggtggacgttctggatgttttgtttgtttctgtagagacaggatcttgctacattgcccaggctgggcttaagcctcagcctcctgagatggggtggccggggtggtgttaaagataagactgagcccagctggcccattctgtaaaggcaaacagaaaatcaagaaacgtgcaggtgagacaggtactgccgaggcctaaatgcactttaggaactaaattcaacagaatgtacacgagcccaggtaacacgctagagatgagactaaggagggcgtacagaaggcaccaagtccagaactccaccccagcagctgccgtgtgctgagatggagcgtggtcacagccagccaggctctgcacagacggaagcaaaccgtggcaggcctgggctctgggaggtgggcaggccctggggaccctgttaggtgcatccatggggcatcctaggacatgacaaaacacgcttcaacagttgccaaaaatgggcatcttactagcctgccagccagcatgtagacttcccaggctgggagcctcaggtccacagaggaggagccttctggttcccccacaacccacgggctagagacaaggctggacaaggggtctccctgctgaagaaaagcagaagtcagcgtcctaagagggcctggtgagatggtggcccaggcccacggggaggaaggggcagcagtgggctggtccactcttagaaggcgaggtttccaactcaaaccaccccagaaccttccctcgctccttaacagtggcaggagcccggcagggacaccccccacccggcccagccaggaggttctgctgccagcctgcccagggcaactgagagtctcgaaaagcctatgtcggagggtcctcgggttgcctggcgccatgaaagcactgccttcgtgagcccccggcccctacaggttggcctcttccctgaaggccccagacacagaggccctaggtgggaatccagcagggtggcatctgcccccttgtcgctccaagggaaagccctgagggaccctcccaaccacgccagcgccgcctgcagtgacgccgggccacgctcaccccaaggcccaagaaggagccacggtccactgagacccacgacaaggtatccacgtggctttttataagctagtatttcctcctgtggtgtctccttgggggaatcctaaatttctgtgatgtgagataaaattttagtgggattacagaaaccttggcttagtatcagagaccacaataacacactttagaaacagagtagcaatttggttctctgcggaatcgtaagtggaagggatgtattttccttgagattttaaaaataattaggaggaagagataaaagagaagcttttgtgaaagcagagatagaaatttaattagaaacagacgaggatcttctcaaatcacccttgccttgtttgcccaggtccgagatgaggtaatgccattagcaggcaagactgatctctactctgagggggccagagcctggctctgacactcttggccaaatgtccccatcctcagcctggctccattttctgggcaagagtgtgggaccaacgagacctgggctagtgcaggggtgggcaggcaccacaagcgggacacccccaagggtgcacacggctgaaggcgcaacgggcacagggcattctgtgggccacgctcgcagcccaagaacacagacgaggaggcctgtgctcaggcactaaggacacggagggactgttctgggatccacccagcagctcttggaaaagctggtgccctggtgagcaggagagcgtgaggctctaaggagtggatccctcactggaaggtcacggcaccactgagacagcctggaagcttctgtgcttcacgaaagatctacgcgtgaagcccccgggaagccaagccccaggaagggcccattatgccgatgaagacacgagagaatgaaggatgtggacactgccccaaacactcgggaccaagagaagatcccagaacctgctgcggcggtgacacaggcacatacacaccactgcaattactgctagaaaatatgaaaaacactaccctccttcatgtctgctgtgtcggtgccctagcctctgccccagaggtcagaatggctccaagggcacggggccactgtgcaactgcacatcagccatcccgaagcccgccctgaggacccccgcccagcccagccccctacacatcagctgtctcgaagcccaccctgaggacccccgcccatcccagccccttgcacatcagccgccccgaagcccgcccagtcccctgcctggagatcaccccttctcttcacaacaggcagcaggtgaacagcttccccctcggagctgccccatgggcctcactgcacaggtgtggaggcgtccacgtctacaccaccaggaacccccaggcagggcagctcttggcactgatgcccaacgggtattgctaggcccgcacggagctgctgtcaaggacaggggcaagggcagggaagtgaggctctacacacagcagcatcttcatgccttgcctgagagtatgttctagaaggacacgggagagaagaataaacagggtcaggacagtcaggaaaggcctccaagttggaggtgttaaccacatctgaaggggttcctgagagacacgggggcaccgacggggggacagagcccagtgctgctgtcctgggcatgcagagcaagccgcctgcctggccccagctgtccgactcggctgagcctcgcctcctgctgctcgatctaagctggctgcccagtgacgccactctgccccttctctgcagaggggaagctccgtgaaggcagagccctgtctggccactgctcccctcagtctgaaaggaagggtacgtgggcacctctgagagccagtggcttactcagggcacacaggacctttggggtgggggccatcctcgagcgggggctcaatgactgaaaacaaaagggggaagacacagccctggaaaggagggggctgactttcccaggccaggcggggagctcgtggggagacgggctctggcctcagcctaaggtcacaccccaaaggccatcccagacaccggagttcctgccgctcggggactcccagcaggcacaggcttcacctctttctgctcgggccgccccagcctccactgcggaggagcagatgcgcctgccaggttccattcagcttcggtttgcaaatggaagcacaggcatttccaaatgcagctcacatttgtgagtgtggcaaaagagcgaaagaccgtgggggcaggaaactggattttgtttggttggtttctaaatgtctgttaagaatgtgctaatgtaagactacacatgaaggtcgctgggcagatgcagcggtttatcttggaaaaagaagtgtggctgcccacggctctgacaggacagccaaccacatgcgaccagagggagatggcttgggtgagccgaggccctcctgatcctaagtggccaacagggtgctttgagtgatgctccctagggctcgcagcctgaacctgcagaggttgaggaagctgatgcaacagtcgaagaatagatcagccttcctgggtagaagccaaggtctctagaagccccgtcctgtctgcagcatttcttggggggaggctcttctgaaagccatgccttgcggcaggtcccagggtgtaaacactgtgcaggggggacacctggcccactgctgccccgtcggagggtcctgccccttccttcctactcggtgttccggggacctgaaggcccccatatgctgctggaggtgtggcaatgggctttcttttttccatgagctggaagctgcctctcagaactgtccagcttcagagaaccctgaagatggactctcctgcccctccccctgcagagcagggcaggcccaatgcgggctgaagtggacaggggtgcagagcctgacaggggctggagagtgggggatgggggccaaagagccaggggccagccctggggctctcccacctcccttgaaccactgtgaacccgccccaggggaggacttgctgctccaggtcacccttaacccccaagtgacaagcagggctcccacatgtgtgccaaccccaggatgggtccagcacactcaggaaaaatcacagcctctgacagtactccagaggcatcacagatgaagtcataaaaccctccccttcaaacgtgtgacttctcagcaaacaccgccacagactttcgtatcaggaagtcaatcttagcccagcaatgggtgtggtttcaaaataaatcactcctccagagaagccaaggcctcccactcagaaacagcacttccaaaatcaaagaaaaaccccactgttagtggcctcccagcaccacccctctgtgctttctgggcactgcatgtgggacaggtgaagagccctcctggggggaggtgcggtggggcgggaacccaggccctccctttgcccctgactctcctgctccgcagagccttgaggcacaaaggacagagcaggaacacgaggtgatgccaatgctcaccaggccacagcgccggcaccaacacaggcaccccacaaagacacagccaccaggctgggtgcaggctcaaggtcagccagctctgcaggatcccaaacaacagtgtcagagacaccaggcttcttggaacttccaaacaccattttaaggttatgcatgagctcaagcattctgctaggtcctgggggtgaatgggaatgcgggaaccatgccatgggctggctggtgctgagtgggcagtgccccgatcaggctggagtactgacctcctgggcctggtgggatgaggtgaggccaaagcgagctgcctgtccatcctcatacaccaaccgtatggcaggagcgtggcctgccttgcccagctccccctctaaggacagggagggggacacagagcccctaagcctgcgcagaggctgctgtggcatccagaggggctgccagccagtgaaggctgctgagaccagaggtgaaccataaggccaaggggccaggccagccggagcccaccacactgccatagcccctcgccggcatcccagcacagtgcccgaggcagggagcccacactccaggcaggcctacttcctgtagcagagccgctaggtgggaaacgtgcccctgattctccataggccgggaccctggtcccaggagcccacactgagattctgactgtcctcaatgccctgcactgcaagccactggcttggcctgcccagccctccatgacctccgcacagccatcctgcctgcagcacagattcacagcccacctgcccaggggggcctggccctgtgctggccatgctacccccacctattccagaggtgcctccggggctgctgaggacaaatgaggctaacaattacataccagctgtcccgaggcaagagtccacgatttcatgacacacacctttgctccctctgggaaattataagccactggccaagaaatcatcatggcttccacacacccaaaggcaagcgctgcagctcacagctcacatcccaccctctctccctctgtctccacattctacatctgcctcttgggaccctcccaatgtcaccatttccaggtagcccaaaggggactgtgagcttgtaaagtggaagaggctcttccttcacttagccagcactgacggtgtctacaaggcacccgcttggcctctatagctcctgggactcctgctccaccccacacccaggtgctgtggccttccccaggggacaccaggtcattagtttcgtctcccccagccctaaccactggaggtcccctaagccacaggggacaaggcagggctactggtaatctctcaggacaccaccctgggcatcctgggcacagtggctgtgcacagctggtgctcacagctgtgcagagggagagtaagtgcccacatggtctccgcggcagctgtacactgcatggggggtgccgcttgaccacctagcactcctgtggcactggacacattacttgacctctgatgttgccatctatgacctgggagatggtgggacctaccaccgtccaggatctagggcagtgcccggcccacagaaagttcccatccactgcacctataattacacttcgtaaacactaatccgtgaccatggacacgcataccacacccgtccatatcacaccagacagacggcctctgatacagaccctcccgaggaagccgatggagtctgaagagcaccagtggccaacagttcccagcggagcaccagggcccatggcaccactcagcagttgcccagggtccccagatacaacggtggacagcaaggactccccaaacccttgaggacgtgctgaaggcagcaaaaatctacaactgttcccggaagggcttggcacagctatagagagttgtacacacaagaaactagccacaaaccggaaacgttaaaccacagctccgtgacacttcctcaccaggaggcggagccctgagccaaggcagacctggagggctccacagaagaggcctgtgccaggggccctgcgcccttctacacggcaatggggactcaaatcacagggacgaggcccctcacgaagagctctgccctggggcaggtcctctgcatcccctcgcaggcttctccctccgtcaaggacagagactgctccagccagctggttagtttccacccaaagccagccgcttgccattgttcccagcttctgagttcttacatggtaattctgcacattccaaacagtctttcaaataccgtctcgtctaagaatgagtgcactttcctaaaaagacaaatatcaagcacttaaaacacacacaccaagctacaggctatacttgaattccaggcataaatctgaatttctctaactgttgtccaaattaggtcaaagagttaccagaataatcagaaaatgttttgagaggggtttaaattcacttggttgtaattttttttatttgctcaattcatcccattctcgctgctgagctttctccttaggaagttggaatgggtgctggaggaagtgaacttggtcctcagcaaactgggaatgccaacagcgctggccactcccagactcgggctggtggccaggacggtggccctggcgggccaggccccactgacagccctaggcaggcctgtcctggaaggagcagggcccattccacactgtgaagagtgacccaagagatcagagattagacttgggtctagatttttctcaggataaagtgtgattttgaaaagacgctgagtaaataagccacatgtcaaggataaagatattcatcatgaaagtaaacaaatttctctctgagttctaacttaccacaaaaaggaatcaacatacttcttccctgctggcttttaccaagcatttccacagtacaatcggtttggtgctcatgaccacctggagggacagaagaacctgccctgtgactagatggcctgcaggccaaggaagacagggtaatcccaggtgaccacccatttcctgtcagggacacagcccctcaggagggctggacagagaaaagggaacaggactccccaggaaaccgcagagatccaggtgtgagaactgaacttctcttagccttttcatcagttgtcaaccaagaacagggtcagacaggcaagcttttgtgcagaagcctaccaggggaccttagggcaccaggtggatggtgccaggctccctacccccacaaaatggaaagaaacaaagaaatggcgacatagaagaatggaattgagctggcttttaaagaaagactaatcgcactggcaagaaatctcaaggacccatcacttccatagctgagcttccagcggcttgattctaggagctaccattggaaacgttcaattagaagaccctcttactgtgcacactaagacctaatttaccagcagatggaagccatccaagcacccccatcattcagacgtacatacattcattatctacatacattcatacatctacacaattcacacacccacattcacacacccacacacattcacacacccacacacattcacacacccacatacattcacacatctacacacattcacacacccacacattcacacacccacacacattcacacacccacacacattcacacacccacacacattcacacacccacatacattcacacatctacatacacgtgcatgcatgcatgcacctagcaaatattgtacattgtctgtgtgcccaaggaagggtggggtctgacttcctggcactggccaggtaactcctgcaggtgtcacctcaacaccttttagctgagtgccaaactccattccagtctgcaggaattctctgcaagctccattcttcagaaccccagttttccccactgaatgagaagcatgaggccctgctggcctcctggaggaggagggtccttattcatgccccagtgggctggccactgcgagcccgtgcgctttcctaaaaagacaaatatcaagtactggtcacctcgtggccgggactgccgggtcaccgtgtgttcagaggctgagtttctacacagaaggtttctaagggaagatgactcaagtcatttcaacttaaagacacagcaaatcttccaagttgctcgaaaagggaaaaagtacaaactgtccacacacaacagtataattacaaggccagcaatgatgggtttggttcttacgacccaaggctggctcggatctcatcccagcactttgttaattgcacattatcatgtgtcagggcttcatagacaagagcagcgagtggacctgacttatctccccgccccccaaaatgatgtccttacacaaaacacaacaggcaactctgagagagagtcaactgcacgcaggtggcccttgaggtcccagagcctactctctggatgagctcaggatgtcaccagcctttcaggagcctgatgactcccacggcagcaggtaaggacccagagtcctggaggctgccccatcagctctgtctcgggctgcactggagcagctgtgtggaccctgtggcctgtccacatccgtatgtgtaaaaatgaatggatgacggaaacagaaaagcgccgttggtgacaccttggagagggaaattctgagcaagccgaaagaactcgctgtggcctcaatgggatgctcattagctgccccccgatgtattcaactggaaaggagaaagagcagagctggcaacatgcagaaaaacaggaaatttcatggtgagacacagtgaagcaggcgatagagaaaaggaagactttaaaatgagatagaatgaggcgatagagaaaaagaggcctttaaaaatgagaatccagaataagctgaaatagtccgggggctaaaaaacctagacatttataacctaatcaggaatattataatgctttcaagtctcctcggaactggaccactcccttgttccaaacaaagatgtgctacttgcattcagcatttgtataatttcttacatgcactaacagggaactatctgacatttctgaaatcattaaaccatctacttaatggaaaggagtaagacgacctgttgacggatacgacagatgtgagcgttactgtgagcagcacgtgcagacttaagtggctcttagttcaaaccaaaatatgcacagacctccaaaaaaccccagatacagagtaaattatacactggtaggctagcttttggcaaggaaaatacagtgtccgttcctcattcagaaacatggcaaatatgtgcattaatattaaatatatcctaattagttacaaatctctgaaaatacttacaactcaaaggaccgggtttatctgatagacacacaaccttcacttttctcattaatttggagctgaaggaaatgcaagattcagaatttaaaaccagtaaaaaggttggggcttagtatgttttttggtgttttttgagacagggtcttgctccggttgcccaggctggaatgcagtggtgtgatcacggctcactgcagcctcgacttcctgggctcaggtgatcctcccatctcacactcctgagtagctggaatcataggtgcatgccaccatgcctggctaatttttatacttttagtagagtaggggtttgagaaggggttttgccatgttgcccagactggtcttgaacttctgagctcaagcaatccattcaccttggtctcccaaagtgttgggattacaggtgtgagccactgtgctcggtcggcttagtgtgttttttgtttacacattctaagttttcagtgctgttgtgtttggaataatgaggaatactcaattcacatgaaagcaacagttcatcttggtgattgtgtttaggactatgagagccgattctgccggcatcctccctagagctctccatcccccgatgtggatctccggattatcgggtagacactgtcgtcatccccatgttacagacacaaagcctgggtggctgaggccggcacagctgctgagtgagagtccagttctggaccccgaagacaggttgcccttcatccttccaagacgtggcctctctcctcaggatgtgtgtcccacattcagagtccctgatggctccacgtcccataattaacctctcaacagggaagatgtccacctggaagttacacagagcttcgaaatttcctggaacttgtgtttcgagtgggggaaaagccactacaatgctgccatactcaacaagaccaatacaagtctcagcagacatcacaacctggcgccagattccaacaaactctgcacagtaatgacaaaaaagcacagtttcaaaaaaaatcaacaaagaaacccagctctctctgtgaaaccttccatttacttggccactttcccacggacattcaattaaaaacaactgtgggaaaagcgaatctagccattagacactgcagaagctggctgggcaataaaatctgcctctctcctaacagcccagagaagccttttagcatttacattcaacagaagccaaaagccaggagccccaagagggggcccacatcatcgttccaatccaatccgagttcaataaatgtctctgataggacaccaaaacacaggcagcaaaagaaaaaaatagccaaacaggataccagcaaaataaaaatcttctgagcttcaaaagacaccatccagaaaggcaacctacagaatggaaaagaatatttgcaaaccatatatctgatcaaggagctgtatctagaatataaagggccagacaactcaaacaataaaaaggcaaataatctaattttaaaatgagcaaaggatttaaacagacatttctccaaagatgcacaatggcccatgagcatgtgaaaagatgactgtcatcactagttgttaacctcaggaaaatgtaaatcaaaatcacaataagatgtcactttctatccacaaggatggccaggatcaaaaagatacaagaccaccctgactgtcaaacccagcatcggaacctctcgcagccaaccatctgcactcacccccaatgcacccctgcgctgctgctgtgggtgccccaggcgatgccctctgactctggcagagcagggcaggcaactgtaggggacaagagcagcagaggggctcacctctgtacctccctagacccttagacaggcatctaccctggccctctcgtcccaagctgtccctatattcctgcaacggcttcttccctccctagcgacctggccagagagttgcccacgatgagcggcagagtcagagaccagacctgcaggtctgagggctgagcacaggaaggataaatgataccccacacagggtctacatcctcattcccggaacctagaaatacaccaccttagatgctcaaacggactttacacatgtgattaaggatactgagatgagggattatcagataaattccggggacaggaattatacaaggtgacaaggtgtcttgtcacagcagagcaaggaagcaatcaaagactgcaagggttatgtccaaaagactcaagggccaactccacagggcctcgtggatcaaggaggacaaggtgaacatcaatgagagtaacagcagcaaaggcctaaaaggcatggagcacacttaaacccacaagctcacaattacacacaaaaacaaacgacaaaactcaccagtgaccttcagatgatgtaaagcaacgagctcattcctctgaaagatggtaaataaagaaagcctttcctgtgtgagccgaagagctgatgagggcacttcctctctgcagaagtcttttacctgattcaggagtgagtgtcttggattatcactctgcagcccccaggaaggaaggaatgaagctagacagccaccttcaggacccgctcatcacccagcagaacgcccacgcccccatgccacagtcttgccaactagccccggtccggcgcaggctccagctgcaaccgccaggtcaccagaaagagagggaggaggaacttgctcaacacgccacatggacacaggcagtgagagctctgccgtggccacacaacaggacaagccaagctccccaacaaatagactggagagcaagagggaggaaacggctgtgtccatcacaagtgacagtggcccattagaacccacgaaccttacttaacacttatttgaacaacagccacatacaaaaagaaaagagactgaaaactttttgagacaatggggattttaaatgactgattatttgatggattcacgtgttgatgtgttaaagctgtgacaatggtattagggtcgcatgttcggaagacacctgcatgacggtagaactgctttggaacaatacagtgaggcaggcctggccctgctcagccatcgctgaagatggggacagcagcctagtccgctccttattgtcttttcactttcgtaaatgtttgaaattttccgtaataaaaaatgaaagatagccagtgaaggtgctagatttggacgggggtatcactctgttctgttttgctgtttattatttgttgcaaacataaacctgggctcacaattgtggaaggttacaccctcccagctcattcagagagaaatttcagagccaggggacctcatggccactaagtttccacgattccctggaagagtcacatataaacacacttgtgatcattaccaaacgacaggacaagcccagtgcaccccggcgtcccctcccagttttaaggacgaatcatgtatgggcccccgcaagagatgggaatgagccagggcgccgctggtctctaagccacgagccacagccatgactaactaggaaactaggacaacagctaccattcaacagctaattcaacaacaatacaagtaaccttcacggtaaaaacgagaacctcatttgcctacctcgaaaataaccaaagcaaagcaagccagtgaagctggggggccctgggaaccctactttcccagatggccctccacggcggggctctctcagcccagcacagtgcagagctgtcaccgtgactcaacggagggcaagcctcatccccaaagctgctccagaaaagaaaaggctcagaagtcccaggtggatggcccttccctaggcctggcctggcccccacgctcctcccagctgtccttctgaccctgggccactcccccttctgctgctcctcttggtttgaaggaggggaggggcatggtgacatctctttttaattaaggctttcttacaagtaatctttgcaaagagccctgtcctggagtgattttgtgtgagagggaagaacagatcagcggaggggcttccaaccataaacattcccagagctgcgaatatgtgcccctggccacaggattacacgtaggaagccagcacacgctacgctatcattaccatctcacccatctcccgtggctgacggggatcgggggaagaaagggtgggggccggccggaagccccgtgggccgaagccaccccaggccctcagcccagaccaccaggccgcgcaggctggcctcctgaggctgtccctggcaagccgccccacgctggagccaggctgccggcaaagcgctgctcactgccgctttcttcacatgtggtttgattgacgcaaatcaagaggcaagcaaatgattcataactgtccaagcacagggctcacccagaaacggcaggagcccagacttgctgattcaccaagaaacggctttgtgtaccggaggcgctgttggtcgggacgctatcatgtatgcacacggagctctgcaaatgtgatggcagtggcgatgtcatggcccacggagtgacagcagaccctaaccccaccaacaggcagcaatgcagggccgccacgagggggacacacatggaagaacagcagccaccgcccctgcctgcacggtctgtgtgtgtgcgggtggcacacctgggttcggtactgccaccctgcgactccaggtccagcctcagagtgaggctgggggcctctgcagtgcctggtcccactccccacccctcaggctgccaggcacacccatgatgcaagaaggcaagatagaacgccaggacccctgccttccaggagctcacagggaggggaagacacccaggggagccccagatagctcctcatggtgccacgtgccaccctgaaggtatggggcggagaagatgaagctcctctgtcgcctgcctcatttgggaaagcttcccagaggaggagaggccttaaaaggatgggcgggaaggcaccaggcggtggtggacaggctccgcccaagcagatggccagcatgctctgagccagcgcaggccagggacctctggggctgggactgccctggggccaggcaaagaaccagtgttcctccactgccagggaggactgcgcagggacctgactcacggcagacaccgacccccacgccagcaagttcactctggtggcaacgcagagaacctgaagatggcagacaagttagagcagctgcaccagtcttacagaggcagggagaggccccgaaccagagagcgggtgcggacccttggcaagtatgccttggaagtgttgaggggagaaggcgtcaagtcgtggtcccgccaacagagaggcctgtctaactgactcagcagcccctctgcctccagctccctgtgtctggaccccaggccacaggacgggggcaggagtgggacaggcacccgggttctgcatgtatggcctgtgccaccttcaaagcagccctgacggacctcccaactaggccagagattgctccattggtcatcagtgctgttcctgaaacggcttcaccagtcatggggacctaagtccctctagctggagatgagacaccgatacaccgcagacaccatctgctctccagacacaggccacttcctggacattgcctgctgcctggacactgcccgctgcctggacactgcctgctgccggaacactgcctgctgcctggacactacccgctgtctgctgcctggacactgctcgctgcccagacaaaggccggctgcagaggccagcagagcagcagagccaggcgaggcaagacggcagagggaggccagggggaatgacaacaggctccagggtgaagccaccaccaagtgatcaggtctgtgtatgagttcattcttcttgcaacactgtctgtcaccgtgccacaaaatcccccaaccctgaccccctaacacacacccctctagcccttggggaacaccattcgagagtcagctgtggagcctcccctgctctgtgcagcccctttccactgccgcgccctcctgggcctgcatttgcccctgctggtggcacctgggactctgcacggcactaatattttgcaattctcttaaccattcttgaaagcagggacggggtcctgctcaccttggtgtacccagcacctggtatagtggggtcccgaggttagcagaaggatcagtaaaagaagaaaacatgtatttggaggacaaccatgctcccagagccgagcccggtgagctcagcttctgaagctccccagaaatagcagatgccctcttgttcccggtctgtccagtaaggcctttccaaaggcacaagggtgagaggtggggagaggaggagcaccaagctcattaccagaagggaagctggggaaacgacagggaagcccagaagtgcagacccaggtggacaggccctgggccaccaccctgggagtacgggccggtcagcaggaaggaacatgtttatggtctctgcgctgttggtgccagtcacgccatggtggcccatcgctgatcatcacacgttctgtactccggagcaggaaccagggtctcagggcacttccacaagctcaccggacatgtgcccactctcaccgcacgcatccccggaaccagtgaggccagttctagctgcctaaaagggccacacagccgcccagcctggtgtagccacaaggaccctggcttgataatgtctgctttggaaagacacttccagaacgcccaacagcgcttagcaaactcacacagaaaacacctgcgttccacagcaactccacccgggccgggacccaggcctgaagcagttcctactactcaggttctcagatctgccggaaacaaataactgagaatactctccgctcagcaggccccagtcatacgccccagtcacacaccccagccacacactccagccacacacgccagccacacactcggctccccgtctctcctgagcaggccagccacacaccccagccacacaccccagccacacaccctagcaacacactccagccacacgctccagctacacactccagccgcacactcggctccccgctggtggaggccacctggaggctcagggtgtcttgagaaatgaacaggtgctcaccattggctggaaagggttgagttttcaaattatcccaccattagagaaaaaaagaaaaaaaaaaaaacagactggtaacaaagcatcaagccaagtgggggtgacttcaccctgaggaccctccagtggcagtcttccaagaagaggtgcccaccaaccagtattttctacaaggccacagaaagcatttgtttaaaaaaaaaattgacaatctaattggtaaagaaaaggataatttttaaaatgtaaaaacatattttgggccaggacaagggctcacgcctataatctcagcattctgggaggctgaggcaggcagattgcttgagcccaggagttcgagaccagcttggccaacatggcaagacaccatctctactaaaagacaaaaattagccgggcatggtgatgagcagctgtagtcccagctactcagaaggccgcagcaggatcgcctgagcccaggagacagaggctgcagtgaggcgagatcatgccactgtactccagcctgggtgacagagggagactgtctcaataaaaacaaaaaacatgttttgtaccacatgtcagtcaaaataagtggccgaaggctgtggtttgctttaattcaccttctaaggtggctctggaccttccttcaggaaacggctttcctgcccatcagtgtggctctcttcctctttaaacatgaggaccattggggccggggccgggaagaccacactcctgaagccaggtgcagtagtgtggacatgtagtcccagctactcaggagggcgcctggagcccaagagctcgaggccagcctgggcaatagtgtcagaccctatctcttccaaacaaacaaataaaaagactatgctgccggcaggactgaaaaaccagaaagaaagaaaagtggggctggtgtggggccacaccctgccccaggcggggaaagtggttggaggtaatggggcagcagggcccacaggccggagggctcccctcctgattccagggcatcagcaaactcaaatttcataatggcttttgcttgcaaaagcaaagtgcctgatttgctgtttctcccaggagactctgggctgctaagaaggcaaagcctgaggtctgtgcctgaccaggagatgctcacgtctctgagctgaaaacagtgactgaacaaatgactcattagagggatcaatgaacaaactggcaccaggcactaaattcacacttgatcccctcagccttataataaactcatgaggcagttctactacatccatcttacagacgagaaaatcaaggttcaaagaaactaagtaatgctcccaatatctaggcagaaaagctggggttcaggcccgtctctctgcctctgaagtctgtcctctctccaacgtcccagcagaaaacctctccctagagaggacactgtcggggtgaggagcagaagggcaggggtgggagcagcccagggtggagtgagctgggacagctccagcagcagcagaagccagaaatctcacacagcccccacagtgcctcccacaaatgaaggtctcctgagagcaggggacctggggacaagaaccagccacaccaggccaggcccgcagggggcatgggatgggggcgactgagtgaggagtgtcccctaccctcaccacgagagtccaggtggaaaccgcgccctcaggatgaatggccagctctcaccgggcttctccacgccttccccaggacccttccctaatgtttccaaagtggccacaaaccatgagtggcctgtctgacgtttccctccccgaattctaggatcaataactgtggtccacagaaagtgcggatcccacctctcgggagcatctcatcccttccactcctgcggaagaggacagcaccccccaaccccaaagtgcctgtgtttcctagcaccctgggattccagctcgtcagctaagaactggccatgctgatgaaatctccttatgccacttgagacatgtgctggttcttgtggcatcaaccctgaaaaacatgttggtcaaagaaaaaaaaaggcatctggaaatttctaccttatattctctcgtttttaacaatgccagcaacccaagagtgggggcaaagctgatgtgcgagtgcctcgtactcccgagacgctgtgttaaagaaggaaagaaggccacaagccctgaaagcacattttgccccaaactccacttcacgttacatgcacgaagaacattagaggaatacagagctgtttctgggaagccagctccactgtatgaaacattgagtcagcatgactcagccgtgccgactggtccctccgatgggcgagccaggggcacagaaggcaggcaggtgacccgggcactgcacgcctccccacctggtcccaaatgctgaagcctccaagcaacttaaaaagggtaaggaaaacattgtgggagcaggtgcattgtggcctctgccaggaggctcgggggcctctctcccgcgtgaggaagacaccaggcacaacaaagatgcgacgcaacatcctggaactgtctgctgttaacaggggatggcaaactccatccaagtcttgtccccatgcacacacgtgtgtaaaccatgtacaccactccacaatgtacacaccactctacaatgaacacaccactctacacacaatgtacacaccactctacaatgtacacaccactctccacacaatgtacacacctctacaatgtacacaccactctccacacaatgtacacaccactctacaatgtacacaccactctccacacaatgtacacaccactctacaatgtacacaccactctacaatgaacacaccactctacacacaatgtacacaccactctcaatgtacacaccactctcaatgtacataccactctacaatgtacacaccactcttaatgtacacacgactctcaatgtacacaccactctacacacaatgtacacaccactctcaatgtacacaccactctacaatgaacacaccactctacacacaatgtacacaccactctcaatgtacacacccctctacaatgaacacaccactctacacacaatgtacacaccactctccacacaatgtacacaccactctacacacaatgaacacaccactctacaatgaacacaccactctacacacaatgtacacaccactctgcaaacaatgtacacaccactctacaatgaacacaccactctacacaccatgtacatgccactctacaatttacccaccactctacacacaatgtatacaccactctacaatgaacacaccactctacacaccactctacaatgtacacaccactctacaatgtacacaccatgctacaatgaacacaccactctacactgaacacaccactctacacacaatgtacacaccactctacaatgtacacaccactctccacacaatgtacacaccactctacacacaatgtacacaccactctacaatgtacacaccactctgcaaacaatgtacacaccactctgcaatgtacacactactctacacgcagtgtacaccccactctacaatgaacacaccactctacacacaatgtacacgccactctacaatttacccaccactctacacacaatatatacaccactctacaatgtacacaccactctcaatgtacacaccactctacaatgaacacaccactctacacacaatgtacacaccactctcaatgtacataccactctacaatgaacacaccacactacacacaatgtacacaccactctgcaaacaatgtacacaccactctacaatgaacacaccactctacacgcagtgtacacaccactctacaatgaacacaccactctacacaccatgtacatgccactctacaatttacccaccactctacacacaatgtatacaccactctacaatgaacaccccactctacacaccactctacaatgtacacaccatgctacaatgaacacaccactctacactgaacacaccactctacacacaatgtacacaccactctacaatgtacacacctctctacacaatgtacacaccactctacaatgtacacaccactctacacacaatgtacacaccactctacaatgtacacaccactctacacacaatgtacacaccactctacaatgtacacaccactctccacacaatgtacacaccactctacaatgcacacaccactctccacacaatgtacacaccactctacaatgtacacaccactctacaatgtacacagcactctcaatgtacataccactctcaatgtacacaccactctacacacaatgaacataccactctacaatgtacacaccactctcaatgtacacaccactctcaatgtacacaccactctacacacaatgaacacaccactctacaatgtacacaccactctgcaaacaatgtacacaccactcgacaatgtacacaccactctacaaacaatgtacaccccactctacaatgtacacaccactctacaatgtacacaccactctgcaaacaatgtacacaccactctacaatgaacacagcactctacacacaatgtacacaccactctacaatgtacacacccctctacacacaatgtacacaccactctacacacaatgtacacaccactctacaatgtacataccactctacaatgtacacaccactctccatgtacataccactctacaatgaacacaccactctacacacaatgtacacaccactctgcaaacaatgtacacaccactctacaatgtacacaccactctcaatgtacgtaccactctacaatgtacataccactctacacacaatgtacacaccactctacaaacaatgtacacaccactccacaaacaaaacatgtgatgttccaggattcgctcgcccacagtcagccacgcatgcaggagcaatgctgaggctgagggtgcagagggagcttgacagtcagtggaagaatgcgctctacaagaggacaccacgggcctggcccgcagaggactatgagggcaggggctggcgagtcaagctggctggaaaggcctctctgaggaactgaggcttaagctaaaaaaactctgcatgacgctgggtctctgagatccggaggaaggggctcccggcagcagaagtgcccagggtgcgggcctgaggtacaggagctgcggggctcctcaaacagcagaaagcctggtctcatggctaccgccccccatgagcaggatcagtgccgacgaggctgcagcgagtgtcgggctggccaccgcgaggggcctgggacgccactgccggcagaggctagaaggggcctgaccacacctgggcgtttccaccataagaacacaaaagccctgcgagcagagaagagagcactgcagtacagaaatcaggaaggcagagttgtaagcactgattgcatttgttttaatgtgacttatttagtcgtaagtttagctaatttcgttttcataacggctgtgtttggcaacccacttccgcgagcggtaacagcagtgccggccaccacgggcggtcatggaattggagaggatcaggcggccttgatggcgttttggtggaagcactgtcacaaagggatgatgggcaggctgtcgggagttaggagaagaaaagcaaaatacatttgctagcttctggcttgaatgcctgggctgactggaggggccatgtagtgccggggagaagtggagagcagttccaacattgctgggggacagtagtgctgcctcgggatctacagcggtgaggccccgaagcgccaagggcgtcggcgcaggggcccccagccagtcacagttcccgcttctgcaccccagggcctctgaaaactgtgaagtccatgctgcggtctccacgcccagtggctttccacgtctctccacatgacactcacctgctgcccatcacaggccgcagacacactgagaggagcccaagtggtgtctgaagcaggactctccaccaggacagtgccggtcctgagcccagctacagggagccgaccacagcggagccgaggacaccgatggcaggactggctgcgcttctgatgaatgtggtttgggatgctgggtgagggacagagggagcgggccagggagtgggcagagtgagccaacgcatgggggcagccctgagccactgtgctgacccagtgatggccaacagcatgctccatcacggggaccctccgcggggcctcggggagcatcgcagagctgcctccctgaggaatgggggcaggtgcattgtggccctcgtagtcaggggtgaccctgagagcagcttccacacacgccaggtgacatgcatgaaagcccatcaggtgcccctgggcatccggtgccaacagaggcagaggcaggtgaaaggcaagatgcccctgcatgaagatggtcccagcacacacagagcaggccaccacagtagggactgggtgggaggtggggcctccaggatctgcagggggaaaggcaccagacggtgagcgcccacgccccagagccagaggcccttccactctccagtgtcctggagaccagtgtcccggttcaaaagtaaatacacaagcagccctcccacaggaagctgaggagagtctgggctgcagactggggagacccaggatcgggaaacttttgtttcattgtgttttttaatgtaagtaattagggtatatttagaggctcagaaaggaagccagagacaagtgacaaaacttacaaggaaaatgagaggatattcacaatgaaaggagagatgggatcaaaagcatgaaggaagcccagagacaagtcgtctaaatgcatccatcagtctaccaagccatcaaataaaatacatcccaccccacacctagacaatctacagtctaccttcatggcaacctggaaggccaggttcaaagttcaaagttcaaagactgcagatggtacagagaaagcgttacacagtgagaaaacaggcagctggatgagcacagagccacggtggagggggacagagccacgctaaggaggaacacagccatgctgggggtgggaggggcagatccctgctgggagtggagaacgcgccgcggctgggcccccaagttcgcggctgtgcagcgtggccagaatgctgagccggtgctcttccctggcatcctgcacttcctgggtaaggaaggagaagccttacagcaaggggttccaccgaggctggggcttcgctagtgtgcggggaggcagaggagcagtgccggctgccagcaagtgtctccgccgcgggacctgtcatcccagctggtggggagaaaacgaagctgggtaaaaggggctgagagaaagctggccaaaggttgggcttttgaagtactagaaacttcctcttctggggacgtggcagacaagtcatcttacaggctcttgtgctgtggaaaccccaggttctgcataagacataccttctgtcacactgctgggctcaccagcagtaaggaaaccctccaacaagccagaaatatataattaagggaaacaaaagcaactcgagctgacaggagagttgagggcagcgggtggaggactgcatgggggtcaggaccgaggtgagcccagagctgcagcgttcaggatgcaggggctggagtccagggcagctcccaggaaatgcacgtggcatgcctatcagaagaacggcctcctcactcccatccctctatttccaaacagtaagaccagcgagacatacgctcccaagcaaacacaagccaacacagaaagaagtgaaaaaaggcagcaaacacatcaaaagacagtcaagttcttcagttactcatatcatgagaaatggtacgattactgtttctgaaactttcaaagaatctcttaatgctttattcactatcattttccccatgtatgttttgattaaataaaaagtttatgaaaatacttgaaaaattttaagtaatgaatcagaggaagcaacagaattgtcaaaattaatcattttaggaaaagaacaaagtagactttcaaaaataataagtgtaattgatgcattttaaaaaaaagaaaaccctcaatgaatgatttaagcaataaatgccatgcaaaaataaaaaggagattcggtgagtgagaagatcctgacgaagaaatcagctgagcagagggaatcaaaatacaaaaatgaaggagagcccaaatcctgtattttgtattctgaaagtaaaagtccaaggagagttgaaaacccataagagccacctgaggaggtgtgacagctgactctgcaggactgggaaggaagggaaggaagggaaggaaggaagactatggagcaatatttaaaggggcactagctgcggatttccaggactgataaaacacacaaactcacagacacaaaggcaaacatatgccaagacaacagggtgctccacacccaaacacaccctgacaaaactgggagcatcaaggacaaaagaagatgtgacgagcagccagtgagacacagacagacaaggaaggagcggctgctatgctgaggtaggccggccaaggatgagaagaatacaccaaacgtgatgaaaggagaaaaagaaaactcacctccaagttttgcctaacagtcactcaggcatgttggtgaaatagagacattttcagatcagacacacatacacacgcaaggactgtatcaccaacaggtctactaaagctactcctaaggggtatgtgttcataaagaaaagagaaagtgaccccagcaggagagtgtctgatgcaagcaggaaggacaagtgcacagggagttggacactggcctgggcagggaatgtcctggggacctctcggacaatacgaggcatttgatcacgtctataccaggatggggcatgcgtcacacttcgtgagcccacagtgatccatcagcatgaactgcagccgtgcctggatttcctgttttccctgtggtcctcctgttctgagaccccacccaggaccccactgtccttcctttatcctcctgactcctgaggctccttcggctgcgacggtttctcagacttgccttgtttttaatgaccttgacagtttaaagtacttgattgggtgtttgctagaatgtcccttaatcagaatttgtttgatgtcatgaccagatggggttgtatgtttttgggaggaaggtcacagagaccaagtggcacctccttacatcatctcaaaggtgtactgttgacacgaccttttaaaaacttgggatggaaatgaaaatgctaagtgtcaaaacttgttgtatgcacccaatgcctacttcaagggaactgtgtagcttataacagaaggaaggctaagaactaatgggagctgcacatccaacctcgggagagagagaacactgggtgcagccagccacagaaagtaccaggaagataagagcaggcatttaaaacacagaaagctgacttacaactaagggaatccacaaagccagagtgactcaaaacgattaatacagattaatcaagaagaagactaagtcatgttgtaaatgaaaacgggtacacagagacaaatccagcaaagatgtaaacaccagaagcaaatctatgacaataaaattgaaaacgtagattaagtaggactcctaaaaactttcttttaaatccatatgacaggaattaaaagttcaggttatcagtaaccattaaagatgttaaatcagtagttaaaacatcaaaccaccaaggaaatatgaaccccaaatagtctgaggttaatttttacaaactttcaaggaataattaattctaatcttaaataaactatccctgtaagttaaaaaaaaaaaagaccttaaaaaaggaaaattaccgtccactccaattcaagaacagagatgaagaatcctgaagcgctagcaaagtatgaaaatgacaagatttatcacaaacaagctgaatccactggaagagataagggaagtttaacagaaaattagaacagaaaactatacgatcatcacaacagacggagtaaaagcatttggctaatggaacacagctatccatgaacttaacttgaaaaagggaatctaaaataacctatgtcaaacatcatacttaaattgggaaaaatgttaaaaatcttctctttaatgtcaaggacgacagaaggaagtccagtatttctgctcttactcaaaactgaactggaattcccagctagcacagtaagacaaggaaaataaacacaggaattggagaggaagacactaaactagcatcgttactttaacagtctttgtcttagaaaccctgaagaatttacagaaaaaaatttttagaaattataagattttaataagatgattggatataaaaataaaatataaaaatcaactgcaattccaaaaactagcaagggaaaacttaattaaaaaaaaaacgtattgtctgcaacagaaaaacaaaacaactacaatctaccaaagaataaagaataaatctaacttgacacgtacaagacctttatagagaaaattataaaaatctattgaaaaaagacagtaaagaagacctgatggagggaaagagaagccacacacacaaatatactgtcaggatgccaaccctgccttcaaattcatccatagagtcaatgcaattccaatcaagtttcaggctaggctttttaaaggaacttgtctctagacaagtcacagcttaggaggagctgggacaattgcagggagggggctgagacaggggagtgcggctgcagcgcctgtcaaggagacagtgccctgctggccccaggacaggctctggagcagctgagcacagggagggtccaaaacagattgaacttggaggatgagctggccgcacagctatcccagagaaagggtgtaaagtgtcaaacattatggttctcaaaatgagaaaagaaaatgaaactgatccccaccctgcaccccacacaaaaaccaaaggcttaagtatgaaagacaaaacgtcaaaggccttaagagaaaatatacaaggttatctttatggccttgaggtagggaaggttttttggtggttgttttgtttttaaatgaaatacgaaaaagcactaaccacaaaagaaaaggtctgtgttttgtcttagtcgaggtgtcatttaagaactgtttttgcatataacttttcttatgttacaatatgtgtgtgtgtttccagatcaaggaagtcgagtaaaacacttctaagtaacattttttccttcttcactcactaaacctttactgaactccaactaagtgcccagcaccaggccaataaagaataaaaagacaggaggagcagaggtcttttcttctggaaatccaggctggggagagagcacacatcacagggcaggagcagcagcccctcagccactgtgttgggcacgcagggcccctcccagccacctggctcatctgatgtgggagcccacggagagcagagagcaccccccaaagtccccgcctgatggggcaccagagctctgcccgctgcctgatcctgcccaaactctgagaatgcccctggttataaccctccgtttccctactgtacacactggtgcacaaatctgcataaaccctcacttcataatcatccttcaaattacacctaaccttatcctcttgatggttcaccacttcctaaattttaaaacagcatcgtgatctttactcaccatttttgagttaaggaaaacaaatgagagaataaaattaacaaagttctatcaactacagaaaagatcttattttctaatccaattacggcaaataaaaaaggcatcaagagttaatataaatgtacactccattgaaatggcttaatcaaaagacacaacattaaccaggaaaaattcactcaagtcttgtcattcaaacttaaaatatatcaacatttttactaaatttattttttttcaaatgtgcactaacattttccatgttatcagactttactcttacctagttccctgtcagctgagctaattccttaactataaagaaacagagcaccctaaggccaggctgtggggacacccagaaccaacggcacgtgacatgaagcaccagcgacatggggacaccagcaccaatggcgtgaggatgtccagcaccaatgagtggcccattttatgtggctgaaggacaccttctgtgtggactagggagaatatggtaaaactggagaccctaggagtcttccatatcaccccaagagagttttggagagaaaggggatttagagtgtcaatctttagaaaaatcaaacaggcagggcaagctcctgaaatgggagtaggcacacacacacacacacacaggcacgtgcgcacaagcagtcacgtacacacatgtacgcacacacaaccacacatgcgcgcacgcatgcattcagttcgcacgcgcatgcacacacacgcacgcacacactcacatacgcactcacgtacgcacacacgcgcacgcactcacacacacaccacacacgctcccgtgtttagtgtgtttctagggcactatggggagggccggggttctatacagggcctggcccacctgaaagtccatgtgaaaggcagcctccagggctcctatcaagtgggtggcttcgctcattcactcaggaatttttcgtggcacagtaaggcaaggggtggggatttttctttaaaagctttatccaatcatgactaatggaataagtgagccaggcctcaagaaaaccgaggacaaaaggaaagagccgttcagaaggcagcgcctgcctccacctgctggtgcgtgcccgggacagggaggacggcaggttttaccaagcactttcaaacagaaatccaagttcccaacaaagaaaaccccaaatacaatagtccctggggtccttgttcagcccccttttgactgggacgctgccgtcgagtgccagggggtgttatgacaaaactgaaaagcatggcgggtaagaacgttccaaggcatggctcgcctgccagggctggcccgggctggccagggccaagtgcacacggggatgggccttgccaggccagctgcgacaccacaggcttgctgaaaatagccggtgtttgtttacatggcctgggctgagagcctgatcgccctcaaagaggggtcccctgggtggcggggggcctgagggcacacaggaagagctgcagtgggattttcaaagaaacgtcatcatctagagaccctggagctctggaaagcaggaaggccgctaggtcgcccctctggaactttggttttcatgggtgtcaatgcgcagcaacccacggtagggcccgaagccagcctgctgctcaggcctggagaatgaaaacagctttaaaagacaacctacaattaacacagggacaattatcttcctaatttaggttaatttctacttacagccctagctggcaggtcgggggaagggcaatatctatgtaagagcttcttatttggttcttctaagtccacacagatatcataaagaagatttccagtgtccaccatcgccttctagaaaaggggcctaagctcaagagtcccagctagctgggccttctccccgggagccgccgattacatttgcatgaaaatagaacctttgtttgcaagagttcccgctccagtggatccctcctttgtctgcagcacagcaactgatggggcaggatgctggtgtgtgcacacagcccagctcaggacagccacgccaggggctgcgcgcacggcccagctcggcccagctcagcccagctcagggcggccacaccaggggctgcgcgcacagcccagctcaggacggccacgccaggggctgtgcttgcccatcgtggcaaggcaggcaaggggacggccaggatggtaggtggggccccaagtgttccggtgttttgtcagtgtggctggggactcccagccgggcaggtgctgcaatgcgctggctcccagagcacctgcagaagcagtcccaggggaccctgaggtcaccttcacctggtacggcagaagacaagatgccctcactcactgctctctgcgttcgaggataaacccctttctagcactggctgtttgttagatgtgtgacagaaagaccctggagagcttctgcactgagatgggcagtggaggctgagccccgctgtccatctggagcacagagccaaacaaatctgaagggctggcagtgaccccaccactccagcgagaaaccagtacccctgtgggcatacttggcagggcccagaaaatacagacccaccaacccacatctaaaatgcatctctttacttccagaaaagcaagtcaatatatcctatctgggaactcgagccaagtaatgggtcaggtcaaataaggcatgatccagtgtcatgaactagcagactaaggcgggaggctgggtcgagaggatactgtttcttttttgtttctttgtttggaaggggggtgatggaagttcattaccagaagccaaggaggctctctttcaccaggtctctcacgtggacctagaccgtccttttaatacccaaacagaaattacaagagactaaaagctgggtggaaacaggtatgcaacagcactaagagcaaaaccttgctcaggcctttcagtgggaaaaagaacatttccgatttgaagttatcactcaataaatagcaagctccattagatacagttttacttaaaaaaataacagctgaatgtccctatagacatgaaatgagaccacccacctggccttcaggttcaggtgtgaggccagcggccagctcccaggtagcccagaatcccttggaaatgactttccttcccaggtacctgctccagctgggtcagtcctcacaaggcgtttcccaaagggcatcccgtgaggaatttgtgtccatgggatacaaattccctgaaataataaactggacaagtctcttctcgacagatcccagctggcttctctactcgggagcttcccagagcttgaatgtagcagttgccttctgaatttctctgagcttcccccaaaggggtttgaccagggcctgtcccctgccctcggtttttatggtgaataactgcaaacaccttgcaaaaccgcagggtcccagaaaaccctatttgagaagggccctaccctccacaatcaaagggggatacaatctaccccagcaggggcggaacattaacaagggcggagagcagcaaaggagcgtgggagaaaggtcacattcttgctaccatgaggtagttaaggggtcaagagccaggcagaagctgagagcaggagcccgaggcccacctgcttatggacacagggatccccagaccaacgcacagggcacctccaggcttcctgcagtggctacgcacagggcatctctgggctctctccagctgatgcgcttctagctgctgtgcctggccacgtggttttcctgttttgggtccactgcaccctatactgggaggctaacctgtatcacctggacatacagtttacgtgctcccaaaatacctgcactcagcggatggcataaaaacctgacggcgagaacgccagcctccttcctccttacaaaacctttctagtgggaaaacatttaacaagtatttgctaagcacctgttagggccctagaactctaaaagtaacaggaggactttaaatcatccacttgcaatttactaacttgccatttgttaatttaacagagacatttctagagagaactgggccacacaaatacccgcccatcgtctcccagcccaccctctgctgcctatgggaggaagagcagctcattctcacaggttgggcagaaagctcatggatgctccgtgcagtgcagggtcgctgaggcgtcacatttacgctaaaacagaagtgccccatgatccacctctatcaactcccagtgactcagacaaggaccgcaatcaccaggcaggggcagccccttctgaacctgggcacagaacactcagggaagctgttcgccgtgaggacgtggacactgggagctcctgatgggccttggcagaggcctgactgatcagatctgcactttggaaaggttctgaaagctgtggataggctgatagggagtctggagcctacctggctcccagggcagagatgaaaaaaaagagaaagagactgcaaggaggtcgcgccactgtgtttcagaaactaagtccccgttgaaggtggaaaggagggaagagctctgttagacctaggcttctgagtaggtggggctctctctttctgggaagggacaacagtagtgggaacagctggggcacacacagatgtatttgtgggcaccccagaattcctcatggctgaggctcaggatagcaagcagagctggctccagaacagggagttggaaggaaggggagcaggtgggcctgcctcggaggcctcggaggcagcacagcccacccaggccaggagctcagcgtctcagcttcctcatctgtaaaatggggcgatgccactcctccctcagggtcatgtgagcaccatccaggtcaggactgtgcgctctcaggacaggacagagggccacagaagctaggcctctgctctgactaagggggtgggtgtgtgggaggcccgggagagactgtccaacggcttcgggacaacgcccgtctgataagacttttagtgctagggaacagctgctaagggttttttaataatgtgaaaagatgattataggccgggcgcggtggctcacgcctgtaatcccagcactttgggaggccgaggcgggcggatcacgaggtcaggagatcgagaccatcccggctataacggtgaaaccccgtctctactaaaaatacaaaaaattagccaggcgtagtggcgggcgcctgtagtcccagctacttgggaggctgaggcaggagaatggcgtgaacccgggaggcggagcttgcagtgagccgagatcgcgcccctgcactccagcctgggtgacagagcaagactccgtctcaaaaaaaaaaaaaaaaaaaaaaaaaaagatgattatagtaaactggcaagggtgaaaagcaaaagagcagatttttattcatccaaaagctggttacataaaaaccaacgagaatgagacaagatgggagccggaaggaaacacatgaaaatgttcacagctgaacccagggtgacaggactaggagtcagagactctctccttcatacgcctttgtcctttctaaaacttcccagagcaaacaggtcctcccttatcattagaaaggagaacaatgcaccctggtttgttaaaggagaaagctcttggcattctcactttgtaatttgctgtttcctttcaagctcagcctctgggaggcttttcattctgttttgtgtctcgtttaccattcccgttcagtttcattttatttcttaaatggacatcctcaccaaaaccaccaccaccaacaaaatcactaccaatgacttttgcacaaacagaccaaagaagtgggccacctgtgtgagttctagggcagctgtctctccaaaccacatcacaagtgcccccagagcccttcattgtctttctcagcctcttcactgctctgtcaccaactcacacttcatttgcaacagcttcttacagggtgctgaaggaagagccagtaattagagctaccaggcaatgggcgcatctacagagggactcttcatcttcacagaagcagcagagagctgaggatgctatcacgcccattttacatgaggacactgaggcacaaagaggctcagggatggtccaaagttaatccagcaagaaaaggggagcaccaaactggagcctgcacaggctgacctggagccgtgtccttgagcactctgcttgttcaatcagaaagccaccactctcaaagcacacacacacacgcacatatgcaggtatgcacacatgcacgcacacagaggatgtgcttagctgtatgtgtgccctgggcgtggacaccagcactctgcccagaaggaggccaatacccgcctggaccagggtctctgcagacagtggcacagggcggtcatggccagtcctgcagcgccctggcccagctggttttctggtttttccccatttcactggctacaatggctcctttttcagatgcaggcagccagctgagtgctgacactctaattctaaaggtcaccccgtgacatttcctgcagcctcaactaccttccaaggcctcagcagatcagggtcacaatgctggccggcatttaagagaaactgcgctgttttcttttttaggacttcgcatttatctaatcatttctggatctttttccttgaaaataagtcactaaataacaaaccgaggcagcactgcttaaatgtgtccccagacagggatgaaatggggtgcctgtccactgtcgggccccggagctgtgcttcagtcaggtcaagggagcatgggaaccaggactttcacctccgcccgggagattcttcggggcagatatatttagaaagcgtggattaatgattaatgattaaactcactcaccaggtctgtcaaaagtggacagtcctggagccatttgccctaatttccctcaacattcaatatttgattgtccccgccaaagaagtgatcagctctccagatggctccaaaagatgttcgtggggctgcagggaacaaataaaactcccatttctgtttgttttcatgtaaaaaaaaaaaaaaaaaaaaaggaattaagtcttatgctgcttcctacaagggctggcctatgcatccttgggtcaggggcacgggtggctccccagaagcctctggaccccatgtgctgctctttgtaagctctgacagaagtggagactgaagacaaggcaatcacaaaggtgcctgagcccccaaccttcccacgagcagccagcgctcacccaaaccttggccgcaggatgaggcaggcccacagctctgtcagacagcaacccagggtctctgaagtggacttcgctccagaaagggtcccatgctgtcccagagagcagcgatccgtgccaccaacctgtgggcaagccacaaaggtccccgctagaagatgggacccagagctttgcattgccatttaactcagacactggtgtgacagcatagggttgagacggggttgcagaggtcaagtccagactctgcggctccctggctgcccggctatgagctactgtggagcggtgctgtgctgcggtttccttaacggagggaatccaaagcaggacatgagaacgcctgtgcatcacctgtggtcactgctggctaatgaggcctggggatgccaggccccaatggtagcgcccatcacagtgccaaggacttgcctcgggattgcaccacgctgtcaccatgagccccatcccctcagcaccctctgggctcagccccacctgacacagggctgtgccacaacgaaggccacaaatgcaaaaagaaaatcttagaaagactatgtttatcactttagaacttttgagaaaattgagaccttgaaagtgaaagtgaactttcaaaacagaaaggtaaatagtgttcttagaattcaagcggcaacatgtgcctcttccacagggcccccaagtcaaatcattattcccggtgccgcggctgctaagtgcctctgtccctacatggccaccactactgatgctgagatgagaagacaccaaaaaaaggcaggaattagcacaatattgaagagatacctgtgtgtcatgggtctttagggttgctaaaatatttcacaggataaaaaaaattaatggactaaaacataaacaagaaattccaaaccaaataattctcctcaccaaacatttgctgacagcaagctcagggaacagcagaggcccgtctcggtattccggaagcagccagacctaagatcaaatccaggcttgacgacagactgggctggtgccctggacaagcggtggcttccagaagctgggggagcccctgggcatcacgtggagatgagagaagatgcttccagaacctgacacacagtagggatccggaatcgccagagctcttgcacctcagagggaaacagggtatcctgaagttcaagtgcatgcacaccgtggatactctagggtcccagcaaccccagctattacaatcacactgtcactgggtgaacgctgtgcactctacaggggcctcctcatttagtcatcatagccactggggatgcaggtgcccctgcagcctcattccacccacatccggtgcacagcacacacaggatcagcagtgataggaacagcctgccactctttacagagccgtgagactgtggctaaatcatttatccagcacccaacaacgtggaaatcatgacactccacctacaggggctaggctagaaaggcatttaatcaaacattttagaatgattttcatttaattatctctcggagacttaactgtgtcatatgatgaacaacattatttcctcctaaatgtactgaatccggaagcaacccttcatggccatagcctatttttttttttttttttttttttttgagatgcagtcactctgtcgcccaggctggagtgcggtggcgccatctcggctcactgcaagctccgcctcccgggttcatgccattctcctgcctcagcctcccgagtagctgggactacaggtgcccgccaccacgcccagctaattttttgtatttttagtagagacggggtttcatgttagccaggatggtctcgatctcctgacctcgtgatccgcctgccttggcctcccaaagtgctgggattacaggcataagctattgcacccggcctgtcatagcctaccttattccaaatatccaaaacctggaactgggggcagcctgccaccatgaatatcctctcaatgtcaacacatccactgccaacatcagagtgaaaatgcctcatgattggtccatcctgtacaataggtttatttgttttgtttcaaatgccaagtagagatatttaagtacagggacagagcgtggtgcaatgatcaggacggaggtgcctaacaatcccaataaaatgctgacatgggctaatctcaagcagatattctgatcccctcgcacaaccacggcactggggtgccgaaaccagaagagacatgcacacgaggcagggcgagtggtgtttattacagctgtacaactgtacaacgggagggcagcgacacgtgcttatttgtattaatgtttaacagactaagggccaacatttgcttactggctaagtgattttcaataggatgcactgaaacaaaagccaattccttgagtgagaagcgtcatgggtagaatcacggagcaaggtcctgcccacctgcactggtggcctcccagcagctctcatagaccctggacccagcacagtccagctggggcccagggactggcacagctgttccgctctgctcccggcatgtcacaggggaggcacacaccagacgaaccaaaccagcaacagagcggagagcctgcagggacgcagctggggactaagcagatgggagaccggcagtcctggggctcgggagacaggggagacagagaaggaagaggggtcccatcagaggactccctgcagtgctccatgaatttctcccgaattccatccgtaagtgcctttcaatccatgccactgagggcatttctgctccttgtgactaagtgaactcctctagggcgtccctctctctaacacagaacttctcttccagtctcctcaacaaccttgggaaggagcataaattcagcaacacactgatgctggcccaggctgtgcgctgtgaacctactcccattccagtacaagcatcccctctttttaccccaactgggaaattcaaacagatgaagcctcatccattcaaatcactgataaaggatgatcctcaaactctcagtctagagccttcctgagagtgcgctgtaggtagctactggccacatgtggttacttaaattgaaatttaatttaatttaatttgaaatccagttcctcggccacaccatccatgtgttgatgtggctgctgacaagctcaacagtcaggcatgaccagtggctgccccgatgggcattgctgctatggaccatttccgccatcgcagaaagtcctggagtggaggaccaaggaggcctcttctttataaagccctctttgtatcccagtgtcttttcctctttttccaaatgagcaggaaaaaaaaaaaattcccaactgaacttgactctgctccacccatgtggatgaagccaggctgagcttccctgcagaacaggaatgaagacacagaagtggaaatagcacacctttgtttcccggagaaccccaggagctgtaaaaacacccgaactcccctctccggttcttacagaatttttccgactgctctttccttctttatcctcttccataattgcacgctgcgtgatgggagggagaagtgaaagagaagggaaagaagctcgttttcctcattccgtacatcgtgtccacgcagtgccaggaagggctgcagagaggaacgtcttcggggtccatgtgggacccctccctagggcaagggcccttagctctgggcttctcttttcctggggctgcccgtccagaaggacaagccctgccccctcctccgggctccaagagcactgctcattcctcctgctgctgctgctcagccgggtccctcagccccggcggggagcaaggccttcctgcagcaacccctcaggccaagcatagccagcacccctcatgcccctcatggagccagccgggcaccacccccttactcagcggcagaaggccccttctggaagggggtatctccctcttcccagcctctggttctaaagtcggtctcccatcccagccacgacgaggggcgatggtggggcgtatgcagcgtgggaactgaccctgccgtgaacattcctcctgcctgctgagtcctcgatctgctctcaaagtaacagctccagggcgagagcagcagcccacagccagtgatgccaggcgaggccagtgatgccaggcgaggctcccacactggcccacatttctaaattctgctggtgctttctttctttttttttttttttatttttctctcttgaaacagggtctcccctctgtcacccaggctggagtgcagcggtatgacatggctcactgcagcctcgacctcctagctcgaaggatcctcccacctcagcttcctgaacagctgggactacagacgcataccaccatgcccagctaatgtttttaatcttttctgtagagaggaggtgttcctatgttgtccagattggtctcaaacttctggcctcaagcaatcctcctgcctcagcctcccaaagtgctgggattacaagtgagagccactgtaggcctatttctttctttatgaaaaaaagtaagagtaaattgtgatcaaatactacaatgctactgcggtgtgattcctgaatggtaaaaaccttaccatgctttgtttctccatcagatgccttgctcctcactactgccaaggagattacgcctaagactgatggtacaagtcttttctttaaaacaaacaaacaaaaaaacacaacaacaacaaaaaaaacaggcagggggtgggggattcagagtcctttactgtgaggtcaagaataattcctagccatggaaaataatctctaatgatgctataaacagacagctcaccaaatcaatcagaaaacattctcagtatcattctcagtctgtcaagaacagaaaacctaactcctgcaggctttactgtgaaatgcttagaactctgtcctgattggagaacatggccccttgtgatggacaggcaggcggcggccaaagcccagaacccagcattagccaaaggaggcatcaagctgaagtctcgggtgagttcatttcaaagtcaagggcaaggccaccctggcagcaaattcttctggctactcaaattcgaatattgcagaactagcactagagttgccaagctataaaacacgagcagagagaggaggcccttccacaggaatccagattagcaaaaccccttgctctcttcatcaaaactcagataagttagctgaaaacctggggacggaacagcttcccccaggaaggagaatccacgtggggccatgaccaagcactccaaacactgcagcgggcgctgcccctcttccagcgacacagtgggagcagcccagccatccagtgactttttgtggacatggcccagcccctcaaccctcgagccaggacccagtccaagagcacagcaccctccactctccctgggcctgagcatggcaccaatgtgcttcacgcagagcgtttcgtgggcgcacccctgcaggaagaaccatcgctgctcaaggcagtcatctaagaactgctcactcttgagaagggcaggtcatcttactcctccccaaaagagtctctcaagttaggctctcacccataggagggacttgctgggcgtgcggggaatggcattgtggtgacagccccaagcagggggccacacaggctcaggcccggagcaccttggcagggagaggaaaggtgtgggcactgcctgggcactctgcatgctgggctgggcgtcacccctgccacctcgggagtcctcaaaccccccccgggtgggagaggtcatcacctccgcgtactgaacagaagcccagctcagggttcagggtgggcccctggattcaaagtggcaacagagcctgactccagcctcagggcgtgaggcacctggccctggcctgttcccatcccacacccggctgctcaggcctggggacaggagggcacagggacaggcctggaggacaaggtccctggaatccccgacagcttgacaatgtgaaataagtttcgcttcctttttatctacgctcccggattgacttgtcctcctctgatgcctggttcctctgccatcaagacccgccgtctggtgtgaagggaaacgtccctcacccttctgcagtcgccaccgagcactcgtggtgtggcccacagggcatcctgcgagagcgtcacaagcaccccacgaacaagacacggcagcgtgcttcctcgatctccccgctcctttctcgggacagcctgtggcttgttctcccttaagaatcctctcatcaatgttacgttgtcagctttctctgttttctttctttcttttttttttttaattcacaattgaggaaaccaacaggttgagctgctgcctcaagtaaaaaattcaagtcagccctgatgctgtccatgttttttgtaaaacttgctcacttgtaaacaacgtcgggcagcaactgcaggcctcacccctcactcttcaaaagcgactgcgacagctgcatcccccgtgctcaactgcagggcgcggcactcgcctatgctctcatgaagccccgtgccaagggcttctccgggaccccagatacccaccagaccctacaggcctgccccgtggccctgggaatgcttggcaccaaggtcccacttcccacctcagtcaagcacctgcctcccaggcctcaccagtcttcatctcagcccgccaggtcctctcgagcccctggagtgccctgtgagccacagcttataaagcagataggaccagctctgcatcagacccctgtgtgcaggcccagctccccgacccgtaagcagttgacctcagaccagctgcttaacctctctgagtcagctttcttacctataaatgaggataaaagcaggatattcacaaagcccagagctagaatgcctcaagcagtgtgagctcggggaagaagtccacacaggacacaaagcccagagctgggaaggcctcaagcagtgtgagctcgggggaaggagtccacacaggagcagtacctgttgcaatatttttattacatgctgggaagattaaatgagataagccgtgtaaacaccaggcacatagaaagcatgaaatgataccaggtggtggcatggtgttactttcattattaataatttgaaaaagcagattaacagctcaggccctgctgaactcagagcccccatgaggatagaggctataacgtaacagacatgaaacgtcctgaaagctccacgtgcaaagtgagttgcttatgcctgcgtaaacttcttgttcttcaaaagatatgctgtttttaaaagggactgactggtgaaaaaacctcacacacaaggcagtgcccctttgccaggtcctgtaaacactaccgtgtcctgccctcggctcctggggtcaggagctctcaacgaaggtgtgacccttgtgcccagcgtgcagactccaggggtaactgcttgcttctgaatctccttaatggagcttaggaatgacacgctatggacgctgactgtccaagcagaaacaaggcccccttgggggctttctaaagttagtaaatacatgtatatataatatatatacacacacataggagaacgcgaatgactgggcacccagggtctctgtggggagccacatggcccagcagagaacacagttagcatcacagagtccagccgtcccctccccacgtcaataggacagtcccgcgctttcttccagccggcctggggcatgtcaggaggcagggcctgtactgcaggctctgtgttcttagacagcctttgcagggggcagaggtgcccactgccacatgggcacacacaggaggctcaccacgtttcttcaaatgcagatgacaaagcagcttgagtaacacaaatacggccacactcatctgaggattgctgctgtgttttctaactgcatggccatgaccaagcagtcggttttcatccaggttggtagtcaggtttctgaaagcgatggcagtcgcctcagggctgacacggggagtctgcttggcacaccttcaccctcgttacattttctggacaatggtagggaacattccttactccgctggcctgtcagcttggctaagcctggtgcaagtggctcgctgtgggtccgcggctccattacgggggagtctgggtcatctgtgagcccaacagcgccctgcaggcacagacagccctggcttctgcctctttctttgtggaagccactctgtcaggcctgggatggaggggcaagaggctttcaaatttttccttattgttgtatattttttaaaaaactatttattttaatggtgaaataagttctaaaagtttctggacttgtaggtaaatgaataagaactgagtgtggtttttaatcatgttcacattattggtgacggtgcggcttagtttcatttagtgactaaattctagccatccctagactgatggccacgaaacgtgtatttcgagttgaaatacatttatttaacacacatgcacacacaattacacgtgcacacaggaagctttagcaagtacttctctgaccccattccctaaacacgactgggaacgaggctgccgctgcccacacgggccctgaatctgacagcattcaaggagaccacggaggaaccgtgacaaagagctggtagccaccggcatttcagatgaatgcagcaccctgggcaagcacagtgtctgcgtctcccccacgctgaaatgattcctagtgtcctagactgcctggcttcacatgagaaacactctgcttaagtaactacttcatcactcaaggtcccaaagaatgctgcccacctcggtcagccttgcttctagaaaccgaggattctgggtttggaggcaccccagctcttccctgggaagtcattttcctgaatagatctgacttccacttattttcctatcatttcccatcttttcatacatttagaaggcaaaaaaagttcatctttctagtgattccaggagctccctggcccatccacaggtgggtgagctcccacccaggtccagcaagtcagtgactacaacagaggacacagccttccagtggacacgaggacctcagaggccacctggccaggccccatccacggatgtgtccctgcccaggtgccagcaaggactgactaatacctgacccagggccaagctatcctgtgtcccatactcggcccgtagagccatcaaatcatctgggccccgacacacttgtttcgtacctttcccggtcatgatacaaaacataagctggaaagggtgctcttcacctaaacaaggtcaaacacaggcactacatcaggcaccccatgttccccctatatgccccccacactgcccaggtgatggcagaacccaggtcctcgggcgcagagcatccagggcccagggcccacagggttttacatggtgaaaaggggtagggggtgaatgctaaggggcgaaggcaggaccccaccccagccaacaaccgggagaccctggcctggtttcccacacacccccgaggagccagacaggatcgagagaaccttctggaaggagctgcagggatgcatgggggcgttcaggaatgtccaaggagggcctgagcctcccgtgtgcacctccccaagggcgcctgcaccctgggcccagggtaacccagaagcagcaggagccgcaggaccataggggccaccggcagggtgggtgatgccatccttcccactctcgccctccggccttcattcagcactctggtgagcccagaggcccgagtcgtccggatggcccatctcaggccacaccctccagctctgtgcctgccgtccatcctgggtgcccacgaggggtctggaaaccctgacagggagggagaagagagccctgggcacaaagcccagggcctggggcaggctccgtgccccaatggtcatcctcagatgagtgggggctgtgctcaggaccctcaggggaccatgggctactttcagaaacaagagggtgttctgtttagaagcagagagccgaggagccggaggccccaacacaagagcggctctccgtgatgcccagaggcggccactgggccccaggagagaggggcttgaaggatgggtaccccaagctgtcaaaagaccaagtggctacaaaagggaacccccctcccaccactaatcagggacctgccagagatacgagggcccagtggtcactaaggcccatctctgcagctccgtcctctcacctagataaagtgagtgtctgcttcctggacctcgcagactcaccagggaccctaaacttggttttccaaatagccaaacgacaactcctgctcaagaaaacgcatgcaagagaagccctcctcactcagatgacgttctcatgaccgcacttggtctaagcaaatgctgctgggatgattttcttcaagttctcttttagaacaagcaaaatggaatgaggatgtcggagtgtttcgtgctttctttccagagggtttcccagcctgaaacgccaccccacagccactgtggatttggggactgtcacacacgtctccacgcaccccgagccacatcacgttttgccactatctcagaattcctgatctccacctgaaaacggaacacaaggcccggcagcaacagccagcaaagtgtccccatcccccccaaagtgagcggccacacagcaatgagtggccacacagcaacgagctgcgaggagccaaggatggcccatcccacccccaacggtgagagccgggcccatcacaagccctctctgggccttgtcactcacccttcctacaccccatcactcaccctccctgggccccagcttcctcatctgtgagatgggggtggtcagcgtgcaggaagccctccttgacgatgagctatcagcttagggacaagagagctagagacccgggggggagtccactgccttggggacacgagggagccagggtcactttcttcctcatcaagctggccccctggtgacacgggacaagaggataacctgcttggtactcagcaacaggctttcctaataagaattccacacttccatgaggctgtaatcaacttgggagtgaggagttccttagcttcctgttttcagagagtcttcttagcaaagtgaggaatctgcagatctctctgaaagatcagctaccaaaggaaaataacaataatgaagatatcgttggtggaatacataacctccatccacagccagatactgcttccggaaccacacttcgtatccaggtgagctcgttttttgtatttcaaaagcacaaagatctatgttcatggtgtagtccaggcagagtgtggttaacaggcctccgggtgtcccccccttccagcccagtgcaggggttcagccgctgcagaaactccgaatctgctaacgtgaagtgccaagactgctgtccgccagcgccctcactcccccagggcctgtacctgtagcaggaggctcacgttccgagtcctcattgctcccagacccaagggcaaggctgtcacaggcgaaagacgggttccccttcctctacacccaagccctcggaagcacgctgcaggcccctggaggtgccacagtgctcccagctcccccagaggctgagttcaaacattctaaacggattcttgataacaagccgccggctcgctggaagacactgagcagttacataacagcacagaaaatcccttacaagtttcttaaaaaagagttaatcgtactgacttggtgctttaccttcagcccagactttcgcttaatcccggaaactgctccaaaggcgtttttctcagggcgttcggcgccgtaactcaggagaaacccaagtcctgctctcccggcggcctcgctggggaagaattcagccgctccaccctgacatctggtttctatttcatatccatgttgtcacattacataacaagcagatgatacgagagatcaccacagtgtttcggctcgagagtcacaaagaacgcccagaacactgtttatattgggggccatgaacgttcaccaaaccagacttagtgcagaggctgcacccttccaggctgaaacccagcacctacagcaaatgcccaaggaagcaagaagcgggaccccgccttctcagccacctctcactaacactcagctccactcctgcttccttcctctcactccacatccgagttagagggaaatacgatttatctctggcctgcatttacttctcctgcacctggcgggaggctctggccttgcaggcgtgcaggagcccctgccagtgagggccagcgaggggcccagggagaagatggaggtcaagtcatagggcctccaccgcaggcagagctccgccagcaagtatcctgggagctggggggcctcaagggaggcaatccccccacacaccatccccttccccttcgctcatctggggaagctgtgaggactggtgttgataaaacattccaaccacacactcagaccatggatgtggccgtgccagcagggaggccagcagcccctagcagaagggtgttctggaagctgccccctcccatgctgctgcctggtcccatggggcatgaagggagggtggccagggtggcccgagccagcatcaggcacaaggcccaaggagtttctccagagcagcctgtcctcttcggtccagaaaaagtcagattccacagcagggttagccgtccagttagggaacccactaaggggctctgtgcgtagaggtgctcagaatcaaaccactaaaccccaggaccccctgctgggggaatggtccgtggcagtcattcagccttggagtgaaccgttctgcccaagtgcaagtgagaacacaatacttcttattatatacagaattgccaaagccaacgtgattagtagaaaaaccgacatgtcagtgacttgggggtctggtttgccccagatgtgggtggaaaccccaggcgtccctcaagcctggtccagagctccacagacagcagatacacaaactctgagtgacagcattggtgtttagcagattctggattttgctcccccccgaaccaagtatagagaatgtttcacagagtagcttcaacagaaaatggccacagtgtgtctgtgagagagtgtgatgttcccggggggatggctggggccaagggaaggcccctcccatgagccctgcctccatgagactgcgtagggcaggactgccaggcagaaagaacacagcacaggcacaagggcagacccaggctggcagggctaaatggcttcaggagctcccccctctgccccccagggagtaaaggcaatgatgcaaatatgataagcaaacagaggtcccaaaacacagaaagggccaggaccctgatgccaaccaagcagacccaaaactgggtctgggagcacagggcagggtcgctgagtgcagaggggcctcactcaatgtccaacacttccctccaaaacagacatgctggtgagaggcttcaacccttccactggcctgacacctggatctctgctgccctgtgccaggttagccacgtccaacaccaccacggccaccggccatttaagaaaacgaaccctgacgttaacctgcttgagccctaatactaagcaagagcagcgccacaattccaaaactgcagagagcgccttttaaacattctgctgagatctgcgcggtcgcggtctgacaggcaggccttcttggctacctgtggtttcattccagcattaacaggcacctaaaaggcctgtgagcttttgtggggtcaagcagcatcagctccactttacaaccccgcagagtgaggtgttagctctgcagctccagggcagagccttgcagccttagggccagggggacggcctggccccttccgagctctcagcagcctgaactccacgtgtcccctgctgtgtcactggcatgctggtcttgcatggcactgagatgtgtggcacaagcaggcaccaagcccggagacacccgacgctcaccgttagactgggtagcatttgtcaagcgccgagcaaacagtggatgaagtgtcctcagccggcgtcagctgttctgatccgcagaacacataactcctggcactcctttccaagcatccgggaaatgtagaatccaagtgttacaccatccagttgaagatgacagatttacgatataaaacggcacccgcgactgaggactttgtaggaatggaggccgctgtcattatttcatgggtgagggggagagggacactgtgacccatgacaggaaaggacagctcagcccctccaaaaccacacacaggggactccgtttctcacaaaacttcaagtttctgttctacgcaaacattacaacacattttaaactacattctgacacgaagctcccgtgctttttaatggcaggtgttacaatgatcatggaacagtgatggggcggtgcttcctcacggtgacatggcagggagaagtctggaccggagccagcagggtccttgacctaagaggccttgggcagcccacggggcagctctgagcaatctcctgtgaaaggaagagctcagaacgggttcctctaaaggttccttccagagcaggggttctgtggttccctggggccctagactaacatgaggaaggggaaacagagaagaatgcccactaaaagccttacccaaaaattgaaagccaagaaaaatcacaccagatcatctcagtttagacttgaggaacctcggcgctgacatcactgtcaccatcacaaaacactggccaccaaggtgccacctaccacactgcaacctggaaggaggggcgggcaggggcacccctgggcagggcaggacaccaggccagccagccacccacgctacagaggaaatgcagcccctcccaactaagagaaccctggtaccatcaccacagccttggtgccagggctcctagcacctgacagggaagatgagaaggacattggctgccgccaagaggcctgctgcccacccccaactgcacggtggtggtgctgccagcaccaccatccatgctggcccaggagcccacacgcagggcacgcacgcacgtagttccacattaggccctttcttcctcaattgttggaaagaaggccaaagccagatgatggtgaaattcacgaggaaaatgtccccgactgtcctccattctaaagcaaacgctaagaatgggctgctgggcttcagcagaagccaagtcacctttcctctatgcgtccaatgaaacgaaaacatccacacttgtctttataaaaacggaaaactgcatctggaacaaggtctgtggcgtttcttccagcgtgtcccatggacatgaagttggtcttcctatgggtcctccaaggcacacccctcgactgcaccacagcactgagggcagaatgtggtggtggcccagctgccgtggcgccggcagactagcctggtacacggagaggggagcctgctgactgtgggtaggccacgttcccccagtgtcttcatctgcagagggagaccgggagcctctgaagaccgctccagctctgcactgtgggggcggccggccagcaggcaggcaatgctctcaggccccacgctcctctcactggctgccgacgggaggcagacgaggtgccgggggcagcctgcagagcaaggagtcaaggtggccagcctggggcagggtgttcccccagccagggagcttcactcaggcttgggctctgtcccgtgcctccccgggggcgttccgaggtggcggaggaggaagctgcagcccgttatccaccgcccagtctctccctctcaccagcacacagatgttctcagcggcagagcctggcttctgcctgaattcatttcatatttttaaatatgctcttaatggaaagcaacaaaagtacttaacaaaatgcgctgatgtaaatgtccctgcagcagccagggactaattttagaaggggctttgaggagaaacccaagggacactcacttgctggaaacggcctcctccccaaagagtgtgaggatctggattagaaccaagtatccccaggctgcccaggagcccgctcctccaattgggggctggccatcccaccgagcactgataccgcaggctggactcttcctaacctcacgagaggtgatgaccggaatcatcccagttttccatggcacttcgcaaacacagctggtcaggcccttagcacctcctgaccccccgatctcccagactctctgctggaagttaaggacacagagaaagtttcttatgaaaataagcgcctcaaaagaaagccaacgtacagcactggtgacagaaaggaagattcagaaaagccttcacgcctggcaatatggcacacgcacttttagagacgtctaattatactcagggctgagttggctgaagagtgaggaatatactccaaagacaggaattcaaggcagggcaaatagaacatgaaagccagcctggagcccagggcctgtcctggggcagccacctgcactgcctcttaccactgcaccgtccctgtgagtgtgcgtggggaggggctgtagttcccttggcaggggaagccagaagacaggcctgcaagggacacatccgggcctgggcttggtgctggctagaaggggtcaaatcgagagaggactcccctcagaactcataatcccagacccctcgcaatggtttggggagaattcagacaacccatgaggcctgatgagcatccctagcacctgcaaacacaggcatgtcccaggtggcacctcccagcaccaggcagaaaccttctctagaggaacacgctatgaacctcaaaaaaacatccaagaaggacggacataaagtcacaatcaagaaccatgggtagcgggagtaagtcccggaaagacctcagttgtaggaaaatcaggcactgacccaaaacacatacgaaggacactcgacaaaacaagagaggtcatccagggtcaggctggagctagaggcctccagatcctgtcacttagtgactgtacaaacctggtggcttcctcaacctccctgtgccttagcttcccatttgccaaaaagggggattagaagagcccacactctccctggagcaaggctaaggaagaaaggagacagatgtctcagctgttattattaataactatcagaagtgtcacatggatctgaatgatccaaatggaacttgtagaaacaaaactgtcatcattaaaatttaaaactaaatgagtgagttaactaatcaagtattaatagacagagctgaagagagaattagtgaacagtaaaatagcacggaagaaataaaccaggatgcaacacataaaggtaaagagatagaaagctggagacgttagaggactggaaggacagaggaagatatgctaacacacatctgtaaaccaaaaataaaattctaagctcccaaccatctgaatggacccctcctctcaagccaagggcattccaacattaacctgaaaagctagttcaggtcgtgatggggacgggcattcagatgtgcctcatgataccctcctcccttttggaattgctgatagaacagactctttaagtctgatgagaaacatttcagtctattctctctgaagcctgctacccggaggcttcgtcggcatggtaaatccttggtctccacaaacccttatcataatccagacattcctttgtgttgataataactctttcaaccaactgccaatcagaacattttaaaatctacctataatctgaaagcctcacacttcgagttgtcccgcgtttctggactggaccaatgttcatcttccacatactgacagacgcctcatgtctccctaaaaatgtatgaaaccaagctgttccccgaccaccttgggcacatgttgtcagcacctcttgaggctgtgtcacaggcacgtccttaagcttggctaaacaaactttttaaattgagtgagacctgtctcagatacttttggtttacacacctgtaatcagaatcccagaaagaaagaagagagatgatgggagagcaacgggcaatgccgatgcacgagcgctagagaaacattcaaaatgaaacccagcatgcccaaccacatgctaaaacacgcctcaaagcccctacgcttcagagagcacgacagacaccatcaacccggcagaccaggtgacagtgagaaagtccagaaacagaagtacagacggaactccagggcaggataaaggtgcccatctcaaccactgggacaaacagggatgttttaataaacagtactggagacaattgggttgctgtctgggaaaagataacattaaatccaaacctaacaccatacacaagggtaaactccaaacgaattggggatgcaaatgtaaaaaacgaaaccgtacaagcactcaaagaaaacatcttctggaagtcaaggaaggctttctaaccaggactgaaaatccagatgcaatttaaaaaaaacagtaagtttgatacatggaggaaaaaccttttacagggtgaaagcagcatgagaaagaatgtcaaaatacagtggacaaactgtgagcagttacttgcaatacacatgaaagacaaaggccaaaatctcttccatcagtagaactcttacaaactgtgtgaacagagaccaaaagcctaacagaaaagccaaaagcaaagacagaaaaacggcccttacaaactgaaatatccttcatctaccaaatcagcaagtaagtaatacactccactccaaagccccgtgggaataggctcgctcagacactactggcggaaatgcaaactgatataagtttcctataggaaatcttgagaaaaatctaataaaatgatataatctacttatcttttgatagaaatcactccataaaccaactctgaagataaaactcagatggcaggcccggtgactctcacctgtaaatcccagcactctggggggccaaggtgggaagatcacttgagcccaggagtttgagaccagcctgagcaacacagcaagaccccatctctacaaaaaaattaaagataaaaaaattacctaggcatggtagcacgggcctgtagtcccagctacttgggaggctgaggcaggagaactgcttgagcccacgaggtggaggctgtagtgagctgtgattctaccactaccctgtacagtataccaatgggccctaggtaagagagcggctggatgaattgcagagtgtatggctgtccacaggaatgagcaggagcctgtggacagacgtggcgtggtttccaggacatactgctagggaagaggagttccctgtaggacattctttccgtgcaagaaagtgggcaaatgaaagcacacaaggccacccaggaaagaaagggtagctcatggggacagggtggaaaggacaggggacagcaggggtaggggacccgcttctctgagtctggctgctacacagttctggcttttgaagctgcaattgggtttcacatcatcaaaaagtgaaaattaatacaatcaaaaagtacacagggggaaaaattctaaactgaaatacaaacagaaacaaataaccaaaccccatttcagatgagtaacaaccacgctggggcagggtggggtgtgcgtaagagcttgccaaagtggcttttagacccggtatctggaccatacgccttcagcgactgctggactctagttgggggtttctttttcacagaggcataggttaataatctctgagtattctgggattgagactgaacaaataagtaagtacatgatggattctgagagctccacgtctccttgtcagcagagggagtaacaaatgtgaaaggagaaggccagccggtggcctttgtgaggctgggctggaagtgaactgccatgtgtgtgggtggggccggcgtgtgtgggtgcaggggccgatctacacacatctattcacagctctggcggccgagagctggtttctaaatagcattccccgagaaaggaaccaggccgccttgagaaaaagctgattccaggccaggacagggtaagtacaggcgagattaggacattttgtgtatccaagagagtaaagaagggtcccaaaacgggagggacctgccagaaacgccagcatgaaggggctctcattggccaaactggaacaatttgggcagcagaatagatattgataataaaaggttataacccagttaataaattaggaatctatgagttcaaactaatataagtaaacaataaggaaacacataaataaggaggaaaggaaagctctttacaggagaaagttaactacaggagtccacatttcacgttgtccacaggttcttggaaaccgcaactttaagccaacgacagagggtcctcaagcaatgccagtcgtttgactataacactggtgcactggtgagaaaaataaccttggttttattctgtattatttcacttaaaagtcagtttccaagaacctcctgaggttaatgagggcttcccgtcctgaatgtagcaagaacggtgacactagatgaccatttcacttaaaagtcagtttccaagaacctcctgaggttaatgagggcttcccgtcctgaatgtagcaagaacggtgacactagatgaccagtagccaccaccacgacaacaacagactccgacaaagaaccatcaatgatgctgagacttgtgggtcagtgctcggggagtagcaggctgtctgcacagtcccagattatctccctaccagatacctgctaattatgcaggaaacaatgtaacttcacagtggaaacacccgccagcatcaccttcactgagagcttccgggcagcatcagcagcaacgaaatactgcggtggccgccaagcccagcggcatcactggaatccaatcacgaggaaacatgccgaaatcccaagctgaaaaacattttacaaaatagctgcccctacgcttccaaaatgtgaatgtcacgaaacataaaaatgacgaggagactgtcccggagcaaaggggactggggaggacgtgagaattgaaggccctgcagggcctgtcatctgctgttgataacgagacatcactagactatcagcgaaacataaacaaggcctacagatgagagaacaatgcctgctcgctgttattttccaactctactcactgaccgtagttgaagagtgaccacgcttatctgaggcaacatggcctggattattagttgggggaaggcatcacatctaacactaactttcaaacgattctgaaaaaaaaaaaaaggatgcatatcaataaacagtaattctttggactattttttgctgattttctgtaagtttgaaattacagcaaaattaaaagttaaaaagaaaaaagttaaggaataaaattccccattattattggaagacactaatcttcagattcaggaagtccaaaaaaatatcaacaggggtaagtgaaaacgcttacaaaaatgtagaacactaagactacaaaacacctagagagacacaacggattcctgccaaggaacggaacagccccagtggaactgagtgaaccaatcacatcctcagagccctggggaagagcagctgcctccccagcactgtcttctgtgagggatcattcaacaatgaaggaaaaggaggcaactctcagacgaacaaaaaacggaacttctgcaggaatttctaaaggatattacttccaaaggatattacttccagaagaaaagtaagagcaaaaaaccagaatatctgatattcaacaagaaacagcaagcaagtaatatccacatataggaaactttaaggagcagtggccataggaagctgtgacaatgaaggcagcacacggccgcagcctcccgttagctgctggaaggaagccacacacacccagatatttcaattctgcaaatgattaagaaaacgaaaccaacaacaaacataaaaatgggtgacccatgtcagaagacactgacagccacagcaggctggcggtcaggcacaggccaggcgagggccacctcccgggaccgagcaaggcgccctggtcagcctgaagacactggcactaggtctaagacggtgtggccgtgctggaggtcacgcagagttaaaagtagcttacccgtgacccggcactcccattcccaggcaggaacctggcaaagacccaagtttgcgtgtgtcagaaaacacacaaaagaatgtccacaacatcatgtttgagagcagccacatctgaacatgaatcaaagttgtgaaaattcacaaaattgaatgcaagacactaatgaacaccagtcaccgacagctacaggcagaaacctggttctcaaaaacagtcctgcctgaaaaagaacccacgaaatagaaaacgtatagtataattctatttacatgaagttcaaaaacataaaactaaaatcatattgtttaggaacatgtgcatgtatgataaaacttttttttggaaacagcagaatgaaaagcaaacatgtaaatgtccttgtagtggtctctgtctcacagagcacacggtcactgctattgtattgctttaaatgatgcagataatgtctatgaattgtttaattctttaattagagatttataattaaaatttaaaataaatgcgtgtggaggggataaaaacagaatgactaagcgggctgagaaagtgataaatcacctgtaatcccagcactttgggaggccgaagcaggcggatcacctgaggtcagaagttcaagaccagcctggccaacatggtgaaaccccgtctctacttaaaatacaaaagttagctggcgtggtgggaggcgcctgtaatcccagctactcgggagggtgaggcaggagaattgcttgaacctgggaggcggagggtgcagtgagtcgagatcgcaccattgcactccagcctggggaacaagagtgagacttcatctcaaaaaaaaaaaaaaaaaaaaagtgataaatcaaacaaacaaaaaaatttagaaggaattatagagaatggaatgctgatctccaccagtgacaaatgacataggtaaatctaaatttgccaaatatggaaataaggaaattggtaggactcttctgttatgtaaaaatatgtattttaatcaaaactattttgctgttgaacttttctagctattaattattggcaaatacaaaatccatgattctagtgggtttctgataatctataaaattttctgaatctttttgagtctttttatgtgaatttattttggttcttcccatcttaatgaaactgctgacatctcaagccatactgaacacatgtgctaccgtaaggtcaacctcagaacacagctcttgttaagacaaggcctctagagttttccaaccatgaaaaagattcatttttgctttcaaatgatccccaacttgtaagaactacatattctctccaacttgggtattttaaaatcaattatgaaaactgaaataattattttatctaatcttttttatttttcaaaacattctctcatatttacatgatttataccgctttccttgtataacaactgtcctgtaataaaacctttgataacgaataactacataatgtactgttattttcttttccccaatattctattcagggttttaaacctatgtttacaaacaaaatgtgcttataacgtttgctttattattgtctcttgcaggttctaaaatcaagatactctaagcttcataagattagcttgcagccaggcgcagtggctcacgcctgtaatcccggcactttggaaggtgaaggtgggcggatcacgaggtcaggagatcgagaccatcctggctcacacggtgaaaccccgtctctactaaaaatacaaaaaattagccgggcgtggtggcgggcgcctgtagtcccagctactcaggaggctgaggcaggacaatggtgtgaacccgggagacggagcttgcagcgagccgagatagcgccactgcactccagcctgggtgaaagagcaagactccgtctcaaaaaaaaaaaaaaaaaaaaaaaaaaaggttagcttacatttttctgtgttttgagccaatcttaaataaggtgaacgtgtgtaaatgttggaaaaatattacattatccctgaaggagtagcagctttcaacaattacctaactgggtcctttgtggggttctcagaagttcttccttttagtgacaaccaactcatgctgcttcctgtcagagtacaggatgcttttcttctaaggtctgacattttatagttacttgctctggcccagtcaaagccctccaaagccctgccatagagcacagaacatcacagctcccgcccacaccaggacttcccctagacactggcttcatcattctcagggcagcatctatccctgatggcacatccggttgttaagggggagggtcttcactgcgagtcgtccaggttcttgacatgttgaacaaagaattggacaaaacacacaaacaaagcaatgaaagaatgaagcaacgaaagcacagatttgtttaagcggaagtacactccacagagcaggagcaagctccagagcaagctgctcaagactcccacttgcaaaatcttctgggggttaagtaccctttagaggtttcctactggttacaccctatgtaaatgaagacttggctcatgaccaatcagaggccaaagtgaagttacaccctatgcgaatgaagacttggcctgcaaccaatcaggggctgaagtgaaagctcagcctgcaaccaatcggatgctgaagtgaaggccccctgtctccagatcctattctactgccttgcaatgacaagtttaggggagtaaagccttacacttcagagcgcaagctcactggttaagagtcagttgcttggcacagccccttgggccagtgacttcctttctcaatgcctctgttttctcatctgtaaaatacagatgatgtaaggttagtaggacccatccgtaggctgttgtggggatcacagctgtaaatatgtagaaaacacttagcaaagtgcctgtgcagggcagactccatcactgccagccatatttaccattatgtagttgtttatttacccatctactgtttgactttcccactggcactgggtgtggcaatgggtgggggcttttcctgtgtggttcaccagtagaccccagtgcttacagcagcctggcatgtagcagatgctcacaagaggtgtcttgactggctgagtgctggtgtgtggacgggaaccagcctaaggaaagcactcttgagactcttcatcctgcccgggtgtgggtagcctgggtctgtcactcggccccacacccggggccccactcctggcttcgataagcgacgtcaccaatgtctgccccagcacctggacagactcttgtggcccttccttctcgggaagcccagaaagaactgcagtgactgagacaaacccagcgctgctgcggggtgtgtggaggcatcttgccatagtgggtggggtgcacgtgccacaaacggctcactcttgatgatgagggtgactcacgcatccccttgtccccacagttctgtttcttggactttatcctaacaaaacaatcatgataagaacaaccagccccaaacataaagacacatgtgcaacaatgctcgctgaggtgttatttactatacaaaaaatttaagtcccattaacagaggatttttaaatactgaaatattacggagctacaaaaaaatcccattgctgttctatcgtgtatgtaataggtacaggtatggacatggggagacaaagagggaaagagagaaaaagagagagagctcctgcttgagaatctacaaaatgtcacctgtgactttctctgaactgtgtgcctcccagctaaatgtggtctggcagggtaaagagagcattttcctttctttcatctttcagcattgttggatgttaagtaaagaaaagactacatcttaacttttgaaactggggaaggggagtattttcccatttatttaataaactgctttcatccaacaaaatcaaagcaataaatggggcagatcctcggagagcctgtgtgtggaaggcactgtgcagtgctaggtgagagaggaggcgtctgggagctcaggccacgccctccaagaacccgcggccaacgacttaggtgtgtgcgcctggaaagtgcttcttcacgtgtggacatgggagaggtaatgctgaattcatgtctccgcccaatctggatttaaggaggaagatgccggtgagagctcaaaaagcatcccctgtcacggggccccggggcagccaatcacacacacctgggggcctgcacagggaaaaaacgctgccactcaagcaggcagaagcgccacaaaaacattcatttttattttttctaaaaaaagacaagaacatccattgctgttgaaatatttaacttaaaaaagaaacagtgcaaatttcagaatgaaatatatcctctattgcttcccctagaatccaggccacagaaagtgcatctgaacgggaccacatgcgctacggtatgcactgatgaaacactgacaaaggctggtgtaacttttaaaatgcgaaggattagcacaattgaaggtgtgaaactagaaggcagctgaaaaaattaaaaagtaactaacgcacataaataagaaatctggggtctctggaaaatattttcaaacatagagtacttggacaatcctgaatttgaaacccaaattggacacgcaaaggcaaaaatgtagccacaattagctgaaagaaacacagccctgagccatcctacaagaaaaccaatcctgccacaactcaccagtgcgaacttaacatggagaaagaggtcctcaccgcacagtatcctgaacagaaaggctggtgagagtgaaaattaaaagccaagagaacaatagcaatttttaaactccttcagataaagtaaataaatcctactccctgtaaagcctattgccattatgtgtttgctctccaggggccaagcaaagccaaagtgcctgcgtggcatgctgtggcttcctgctcagcagcccacccgcttcagtgcagcagccagcacactcaggacccccaggcagatagcacgcaggactctgacgcaagtggtgacaggatggtcggaagagccccactcacgaggcaccacagctcacagcacaactgggaacccacgctgcagaaagcctgttctctgtctcctgtggaaaccctggtcagttgttgttaaactcgccatcccttggagaggccataacagaagggggcgtgggcgaggtgctgctgtagggacgcagcgacagggacgggagccaaagaacaagagactgaatatggctgcagcgccctggcttaggaagagcagagtctacaccgacctgggaaggaagaacaactgcagctcagacacttccaaagcacaacttcagaaatgagcaagatctttcctctaagacacatgctctcttacagcagctaaaggcaagcaacatcctcttcaacaaatggtgctggaccatcaaattgccacaggcaaaggaatgaagttgaacccctacctcataccatatgcaaaacttaaggcagaatacaccaatgatctaaatataagaactaaaaccataaaactcatagaagaaaacacagggggttagtcttcatgaccttggatttggcagtggcttcttagatatgacatcaaaggccaagcaacaaaaaacagattaactgcacttcatcaaaatgaaaaacttctgtgcaccacaggacaccatccagagagtgaaatgacaacctacagaatagaaggagatatttgcagattatatatctataacatatgaagtacccctacaacacaacaacaaaaaaacaaacaacccaattcaaatatgggcaaaagacgtgaagagacatttatccaaagaaaatatgccaacggccaataggtacatgaaaagatgttcaacatcactaattattaggcaaatacaaatcacaaccacaataagataccattcacactcactaggatgactattatttcaaaattggaaaataaaaaatattggtgcggatgtgaagaaattggaaccctcatacgtggtgggcaggaacataaaatggtgcagtgttgtggaaaacactttggtggtttctaaaaacttaaacacagggctgggcgtggtggctcacgcctgtaatcccagcactttgggaggccgagacgggtggatcacctgtggtcaggagttcgagaccagcctggtcaacatggcaaaaccccatctctactaaaaatacaaaaattaaccgggcgtggtggcgggtgtctgtagtcccagctactcgggaggctgaagcacgagagtcacttgaaccccgggggacagaggctgcaggaagccgagattgtaccactgtactccaggctgggcaacagagtgggatgaaaaaaaaataataataaattaagcacaaaattatcataggattcaacaattctgctccaaggtatatacccaaaagatgtgaaagcagggactcagagacgtgtgtacacatatgttcacagcagcattagtcacaatggccaaaaagttaagacggcccaaaggtccaccaagagatggaataaataagatgtgatgtatgcacacaatggactgctcatccttaaaagttttaggaaccaaattctgaccatgccacaatacgagtgaaccctgacacattatgccaagtgaaagaagccacgcacaaaaggacaaatacaagtccattcacagaagggccctagaggagtcagattcgctgagaaagcagaatggtgaatggtgggtgccgcagccagagggagggaaacaggattgtttactaggtatggagtttctgttcgggaagatgaaaacgttctgggaatggatggtggtgatggttgcccaacaatgggaaaatatttactgccactgaactgtgcgcttcaaaatgcttagaattataaatttatgttatgtatattttaccacaataaaaaagcatgatgaacaaagaaattaatatacatgttggtagacagaaacaacacccaagtgttatttcaagaattaaaaagaaatatgttatttattaaaagaatcagggattgctttattaactgatatgaaataatcttcaagacagaataaatggcaaagcaaggagttggaagaaaacaacagatggcagtatgttttaaactctctatgatttgctagatacttctggggccatgggcatcccagcgagccagcagctggctgcttctctggtccgagacccccacatccaccgcacctgaggcctctctgaatgctgatgggagcctgtggggcagttcacatgccacccccaagcacacagaggtcacccctgtcatactgctaaagagaagtgcacaacaggcccaggggtacgaccttcccaggccatgagtgcaggcatgagaggcacagtctgaacgagaccacatcactcactggcggtgcacctgtttctggaaaaaaaccctgactaggatgattcaccaactgccttcgctgaacaaatgtttcagaatctgagaagcagagccccaaggaagccacaagagcctggggtcagaaggcggcagcctcgcctggctctgctggcagctgggtttcctggggcacctggctttgccctgggagcctagccgtacccacctgggagggagggtgtgcctttcccacggggtggcccagggctcggctgagccaatggcatgaataaggcaagccggggcccgatgaacgttcctccccttccccaggggttgggaggcacccccatgcagctcagaaactggggcccaggtcccctgccctcagaacctgctctgcagagcccaggtgtccagcgagtgaaactcagctgttctgcccctcagctacaatacggaagtcttttctcaattttacacacaaagttaattatcgtagacagcctggactttttttcattcatgaaactcccttaaatttggttcataccacagtttatgtgcataggcagaaaacaagtcgaaactgcaatcttgaaatcagacgctagcccccagccagccagcccagacttggcccgggactgcccttctgcctacagggctttcccagagagactgcctggctcacaggatgggactcagaaccagggcctgacagcctccccaaagcgtgcctgtgccctgcaggccctcggaaacccagagcaagcctagagacaccctggccaaattcatgggcatggccaagccctgcctggttcctggcccacactgctccctgcaagctaacatccagcagaggcccctggacagtctctggacagtcttccttcccatgctctccccgcatacacaccatccaggggcctggggtggctgccatttcttctgaatgtctgtacaggcccatgcctggccctgtccacaaggcccctcactgcacatccctccacatctgccagtgactggtccccgccctgagcaatgtaagctggatgacacgctgaaagccacacattcccaccatccacctatagcaggggctcaatcaatacttgccaaatgcctgaatcagccctgaaatgactggaggcccaagttctttcttctagccaccctggaggagccctggcgctggcccaagtgtgctccccggtaacccaggactgtggggaacccagctcccaggcttctggcctcttcacgggtaccccagatgaaaaatgttctacaaaaacaagggcaggatgaatgtagtccgggacctcctgacgatctcaaacgctgctgaaaaggccttaagatgaggtttgctgtgagcaacaggaagcattctgtaaggcattctgtccttgagatctggacagtgaggtacttgctgtccagcccctgagtttcccagacctgaatgtaacactgtgcaagcctcacacacagggatctttcttaacccctacagaatgcccactggaaggaggcaaatactcccaacgaggaaaacatcctatccatgagagtggggagctggtgggggaggaaaaagaaacaccaaacatttcaggaaataaatcacatctgtgcccggcatcctcccccagcgagcacagcacacatccgaactgccaggctcggcacctctgagaaaaggactttgtcgggtgcagccatacgcctgacctctcgggcgcccgctggccctctttatctccagcagcccagcccggagctcagagggcaggccagccctggccaagagtcaggagcggtggagctgggcttggtgtttatgtctgatccagacaactgggggtttatgacgatttactgacgcaagagctccccgaagcagcatgccagaaattaatcaagggaggaggaattctttttaagaaaccacttggctgctgcgaacctgcctgaaaggctgggagtgtaagctgagctccttcctccaggcccaggccaccaggcagcagcagcacacccaggacccacaggcagagcccagggccaactcctggccccagatggaggcaggcggcatggaaggtcctgcaatgccaaccccccacatcccccccagtgcagctacctccccaccagccgatcctgggctagcccactcccagaaggactcagaaggggtccacggggaccccaccagctgtgcagaccccaaaggcgggtcctcctattggaatgacaggaaccctccattatctgctagtaaaattcctttctcaggagttgagttttatggtttaccatcactcatcaccaaaagagaaaaaaaggtaaaacatacaagtttgattctgccccgtcatctcagtgagacaggcacagcctctgcagcagcagcttgggctgggagggcaggggccacgtcgggccagcagctcctctccagctttctgcacacccctcctcccaccgggacacccctcctccttgctcccccattcctgctccggctgggggagggaagctggcatcacacagacacccgtgctccatttgttttgtgatctgatgtccaagttattctgaaatttcaaacactgaaggacacaggttatttatatttatcaaaaagggcatgagtctgacaaggctgactaaactaaaccttgccagacactcagggcctgggctgggctacaaagggttctggatcccaacaggaggacagcagctgacatccctgggcaggaacaggcgctgggctccgtgcctgcctcactggatcttcacgacaaccctataaggtgaagtctcttaggagccccatgtctcagagaagggagcagaagcctagtgggaggcggccacgggtgtctgtgtgatgccagcttccctcccccagccggagcaggaatgggggagcaaggaggaggggtgtcctggtgggaggaggggtgtgcagaaagctggagaggagctgctggcccgacgtggcccctgccctccaagcccaagctgctgctgcagaggctgtgcctgtctcactgagatgacggggcagaatcaaacttgtaggggcctggatcagcggccacagagccgatggccggaggccgtatgcaggccaggtacagctgcctggagagccatgggagagccacaggagagccagagggacactgggagtggtgccaagtggcccaactgccagctttccataggagcatcgggaaggggaggtccaaccaggccccagggggaccctgtgccaaaggaagagatgcctcacaggagaccccgcgagggagtggcagctgctaaccctgcctggttccaaaggcctgagcaagggccactggggcctgcagccagcaacctggcaatcaggactgcaagagggcgacaggaaggagtgtggctcaccaaggacacctgaactctggccccaccgaacactggcctggacttccgctccaagaagctcttctccaccaacactgaacaggctgccagtgaccgcgcacagtggttgaaggcagccacgtggcagaagtggcacaggtcagccaaccttcacactctgttttcttatctcagaggaggatgctgattctgacaaacaaaatggctgcttccccataatgctaacatcccctggtcatgaggcctggccttctacagggagaaaaatcgctggcttccttactagactatctgtaattcaatgtgtcaatacaagtatatttatctttaaatgttttaagtgagcaattatactgaataaaatatacttttaaacgtagtatactaaacgtggtatttgtaacccaaccactttggtttaatgtggcaaaagagatctcaccctcagccttctccatcccaaaaaggccactgaagaggacaggctgtgctgccaccccagccccacatgccacgctgctgacacagacctgctgccctgtgcgtgcgcattcccaacctgcctgaccttggctgcccgaaattcggagtggggaggaaggcagatatgcctgaatacagcccagaggacatactgagagagcggccaagtgaagctctcagcctgcccaggaggaagcggggctgatgggccatcggagcaaagcgcggccagcactgtcgtgacattgatggcacgaaactcaacgtcctgcacatgattcctaaagctaaatctggaatgaattcttccttcatattcgaggggaaaacggtaaaagccacgagaaggaggcaggatgggggagggaagacaagcaggaaggggtggggtggccctgcccactgcatttctggtcagggagattttagagcatttataaggtgcgacataaatcacctcataaaatatctgaataaaagtgctataagagctgctcaaggctgcagatatatttcagtccactttaaaatatgcccaacagttattttactgcaacataaagatgaatgcaagcctggaaagcaagctgggactcgtgaactaagccgcccagatagtgagttctacgggggaagccttcaggaagcacacacgggccaggtgagcgaactgcaatgacacgtcgccagggctgcactggacccaccgtgcggggactgccaggtaaacctcagcttccactctgggctacagcgggccatactaaccctccagccaggaacacagaggacaggatgcaatctaaaacacggcgatgcacgaggagcccaggcctgggagagaagggaggtggaaagagggcacactcggcccgcgtgtcctccagaggctgaggagcggagcagcaccggacggctcggaccctgggaaacgaacgccagactgagcgtgggggtgaggagagccccgtgccaggagtgagggcaacacggacctgaccagtcctcacagaatccgcagcttgagcgtaagaagggatacaagagggaaaggtggacatttcacagtaacaaaaaggcagttattccaattttatggaataattttatgcataaaattctaaatctgcctaggcttaaaatagcttcaaaataaacaaaggctaaacctgacagagctaaaaagagaaacaatgccaatccacagttacatcagggggattttaatattccattcccactatctgacagaaaagcagacaataaaatagtaaagataacaggagatctgagcacaatgattaatttgattaaatggacatgtagaactggcaaatctccacggctgacttcttctcttcaagtatacataaaatgttgacaaaactgaccatataatcaataaagcaaaattcaaagaatttctaaaaactgaaattacataaaatgagtgaccacagtgaaattaaactagaaatcaataacaaaatgaaagcaaaatactagcaaattcataaagcactgaaatttagaaatatatttctaattaacacaagtcaaaaaaagaaactagataatattctaaaccaaattataattaaaatgacattaaaaagctcacataatctagcgaaagccatacataggtggaaatttatagttttaagcacgtggattacagaagaaagtctgaaaaaaaaaaatcagtgatctaaatatttaccttaatcagtaaaaacaacaaccccagcaaattaaatcccaaaaacaaaaataatagcaataagaacagaaatttatttttttaaattcaattttaaaaaatcaagaaaaccaaacacagttcttaaaaaatattaatataataaataagctcctagcaaagtccaatgaaggaaaaatgagagaacaaacaatatcaggaatttaaaaggggatgacactacaaatcctacagtcattacaaagataatgagaaggtatttaaacaactttatttcaatacatttgaagatgcagatggaatgtaaaaaattccaagaaaaactaaacacacaaaaactgacacaagaaaatcttaaaaatctaaacagtcctatatcagttgagggtgtaatttacaaatcttcccacaaagaaaactccaagataagttcataagcaaatccatcccaacttaagaaagaaatagcatctttcctacataaactcttcaagaaaatcaaacaggtgtcagcaaactatggcccatgggccaagtacaatctgtggcttgattttatataacctgaaaaataagatgggattttacattaagtggttggtaaaaaaaagaagaaagaaaagaaaaaagggaaaaaaacgtgcaatagagaccatatgtggtccacaaagcatgaagtctttactgactctctacagaaaaattttggcaatcctaggaatagaagaagaaagcaacttcatattttaagagattagtataactttaatattaaaatgtgacaaagcatttcaagaaaaaataacacgtcaatctcatatctttagatgataaaaattaaactgactataagcaatgtaaattcaacagtatataaaaagaataacacattataataattattacagaagtgtaaggttgacttaacattcaagtcaatcagaaaattcaacacaataaaataaagaaaaaaagcataagactattaacagatgcagaaaaagtctaatacattaagttgaaccaaatgaaaataccattttttgtagatggaaaaagatcaaatatctgcaatttcacatgactccatctaatattttaacagctgcttatcagaaaaactcagcaaactaagaacaaaagtaaactgcattcatctcatggactacacagaacttatagcaaattttatctataatgatgaaatactaaaaatttttctcttgatattagaataagacatagatgcctactactaccaatgactgatatagatgcctactattaccatttgactgaaggtcctaggcagtgcagcaaagcaagaaagacataaaagttttaaaaattagcaaagaagaaatgaaacattcaccgtccatagacaatatgcattaaaaacccaaaagaatatatagataatgagtataataataaacactgtgcgaggtatctggagacacgacaaatatacaaaaatgaattgtgcttctaaacattacaaaaataaaattcccccaacaaaacagcataacctagaagtaaatctaacaaaagaaataaaagacctctaggccaggcacggtggctcatgcttgtaatcccagcactttgggaggccgaggaggacggattgcttgaggtcaggagttcgagaccagcctgatcaacatggtgacgccccgtctctacaaaaaatagaaaaaattagccaggcatggtggcatgtgcctgtaatcccaggtactcaggaggctaaggcacgagaactgcttgagcctgggaggcggaggttgcagtgagttgagattgtgccactgcgctccagcctgggcagcagagcaagactccatctcaaaacaaacaaataaaaaaaaactaagacctctatactgaaaattacaaaatatgatcgaaagaaattacagatgctcgaaaaaaatagagagacgtagcatattcgtagattagaagactcctaataaactgatttcatatgcaaatcagtggatcccaattgagaccacagcaggtattctgttgaaattgaaaagctgattttaaaattcatatggaggccgggcgtggtggctcatgcctgtaatcccagcactttgggaggccgaggcaggtggatcacaaggtcaggagatcaagaccatcctggctaacacggtgaaacacccccctctactaaaaaatacaaaaaaattagctgggcatggtggcgtgcacctgtagtcccagctgctggggaggctaaggcaggagaatggcgtgaacctgggaggcggagcttgcagtgagccaagatcgtgccactgcactccagcctggaagacagagcaagactccatctcaaaaaaaaaaaaaaaaaaaatccatatggaaatgcaaagggctaaaaagaaccaaaacaagctttgaaaagttttaaaaagttggaagacctacattattagatactatggttaactgcaaatctattagttaagacagtgttgcactggtacacagatatgcaaacagaccaatgaactagaataaagtgcaaaaacagatccatttatataatttatttcacttatgacaaagttgcattggatagcagagaagaaaggatgactcttttaaataaatactgttaggccaactgaatttccaaacggaaaagtaactctcaatccctacctcacacataaaaaaaaaaaaattcccagtggatcacagatctaaatgagtgatagaacaatgaagtttatcaaaaataatatagaatatcttcaaataggcatagataaaactattaaattggactattaaaattaagagcatctgttcagcaaaaaaaaaaaaaaaaaaaaaacaccattaagaaagggaaaacgcagcacacacatagaaaatagcaacaaacaacaaaaagctcattcatagccagtgtacagaaatagctcctacaactcagtaagaaaaataaagacaaaccaatttcttaaatgaatagaaacttctccaccaaagatgacatctagttggtcaataaacgtatgaaaaggtattcaacatttttagtaatctgggaaatacaaatgaaactacaatagttaaaatgaaaaagaattacagtaccatgtattggcaaggacagagcaacattctataggtcagagtgtaaattggtacaatcaatttgaagaactgtttggcacacatacaccttatcaaaagaattgcatacttatatgaaccaattgaaatatacaagaatgttacagtagcattatacataattccaaactggaaaccaccaaaatgtcatcagcaattgaaccaataaataatttgtgatatgttcatacaatgaaatattatatacccattaaatgaagaaactactactataagccacaatatcaataaatctaacatattgtcaagtgaaataatccagacaataagaataagtattacgtgatttatatgacgttcaaaaccaggagaaactcatgttagaagctagagaagtggtatctagagggtgtgagagtgagggtacagtaactgagagaggacatatacggggcttctgggtgttgggatgtcccatttcacaatctgggtagcagttacaggcatcttccttttgggagagttcatcaagctaagcagtcatgattcttgcactttcctggatgcctgtgatacttcagttaaaaagttcacttagacattggcggtcttcaaggctacatgtttataataacaacaatggaaaggctgaaaacaaactccctgtccaccaacaatgacttgttaagttactctaccacatccatgcacaaccataaaaaaaagagtccccaaaggaaaaactgtaaaagctaggtgctaaagtaactacagtatacagccattcatgaacaaacattaagcaaaagagagtatctataaatgtacttcattttgtgaactcaaaattcttgacatattttattaaaacttgagtagacagtagagagagctgccatataccctaccaataccacctgcacattccccgcgattattagcatcctaccttactacggtatgttagtcacaattgggaaccaatactgacattactgtcattaactaaaattctagagtttaggatttcctgaagtttcccactaatgtcttttactgtattccaagatccatccaggatcccatccaggaattccacatcacacttaggtgtcgcatgtcctgagatccctcctggtggtgacagtttctcaaaggatgcttgtttctgatgaccttggcatatcgagtgggcctggcaagagtagactgtaggaagggtgtctactggaatttgtctgatgtttttcccatggttggactggggctatgggttactgagaggaagaccacgggggaaagtgccattctcatcatatgaattgatttttaaacacatggactagaattaacacacacccactccactaaactggttttactgaacagcaggttgtcacacaaacggctccaagggagggagtggaggaaatggcaaggctcggagacactgctgtcagatgcacgtgagactcagctgtactcaccggcgaaataaacgttttggctccgggaaggcagaaaacgtccactttgagagaaactcacaccctgcataagccactaaccggtggggactcccacgccacacatcgcaccaatacaagctccattcacagaaaaccccactgcaagtcggttatcgctgcaaacttcctctctctaacaggaagaaatcaggactcacgggagtaagcaaaatgaggcctaaatccggcaagcgaggaaatcaaacacttccatcttaatcacatattatagcgatgagcaaccgagtcagatggccgctgctgggtttgacattttgtggctcttcctttcctctgagctcccaacttgcttccaagaatgaggataaattaacatccacatatctgaccagagccaacttctgctcccaaacatacggcgacgggggagacaggatgcacccaaagtggcccctggctgtgcgtgacaaagctttccaggaacagagcgagccaggcaggacaaccggcttcggctgagatctgcagactgggccctggcagaataaatgagcggactggacccagtccaggctcgggacaattacaaatagcaagagaacaagaaatgctggcttgtttttgtacactgctatctcttcgggggcagaaagacaaagaaaaaggggagaaagaggtggatctggtctggaaatcccaggaaagccaggccatgcagaaggcatcccccagcacaccgaaagccagggaatctgcagccttgaaggtgaggctcagccccgcccaccagccaggtgcagaggctgctcagagagcacaggcaggtactccagacaagcacagagagacaactccgctcccagctggcttggtctgtgccaccagctggacgtgttttatctcagtcccaaaatgcacggtttctagacctcccgtggcacctctctcgcgactcaaagccagtgcagtgagttcctggaggcccatgcagcttcctatccaccacgtccctcaccaccctctaatacaactggggcagcggcagcctctactcgttaccctctcctcccgcttcccttcattccatcagtgccccaaaatccctattacaggaggccttgtctgacccctgcagcagcccagttatccctgagattctcacaccgaccttcgtccaaccccctagtgcaaacatcaaatgacacctattaaaattgacacactaaaagaacggctgcatctgagctcaaagtttattcacactgagcttttaaaatccaaaactaccatttgatgttcaaaatttaaatagccactacataaaataggaaaaaataaattccttttatttttctaagggagttctccaaatcctcagcagctgctatgagattcccgtggatttttaggtacaaagttcagactgagaggaccacagtattcaatgagattctgagctcagtccatccagaagattccataagcatccaaggcagaagtgagattcagccaccaaccacatttcaaaagccactggtggaggattccagagcaggtgtcatccagggctcagggcctccaggctccccccaaggctgagattctaccaaaagcgtaggttcggttccccagtggctgagttttgtttccggagagcatgtgtgttaaactgacttgaaaggtatccaaagaaactgtgaaggcagaggtcatctgtatttaagaaaactatgtatttagtttacataaaatcagaaaatacagaatctggctttgaagaaaacaatggtaaagatgttatattgacaagtaattttaaccaatgtctctgaatgaatataccaactcagatacatcagccacctgctgttcctatccaggtgaaggccggctgccctgccctccccttctgtcataagagggtctggggttgcctgtaaacacagggctgccccactgctcactgtcccagtgaagtcctttgctctgccagtttccatcagctgcagggccaggtgccgacagaaggcaaaagtcaaagcccagtatctttctaaagaaacagggcccgatgaaaggaagcaacctcagccccaggaggcaatgggcccagtccaggtcaccccggacacagagccacccctgggcagtgatctcccagctcctgcccctgtccattccccaggtgaagcctaaatgctctgatctggacatgggtgaggagcaccaaagccatgctctctcgggtgatgtgagcaactcaacggagacctacgttgttcttttgttcatgaagatagtactgaagtttgaaataacatccctcagcagagctccagagcagaatcttcccagagaaccacacatgtggcccgcggccccctgcaatctcctggctaaggcattaaaaacaccatctccttagaaaatgcagtccttgaggccacacccatgcaaatcagtccaccaaatccactcataacagcatccaggtaacttccaaagaaatggaaacactgataaacacaagaaacaccctccccacatgtgattctcatgcatcaggtcctgcagaccacagagagttcaaggaaaccgcagccaagaaccaagaaagccacatccatgctcaggccagggccaccggcctttgtgactgcttccctcagcagaagtgctagcagctgagtagggagacatcaagacatcatgacagaaagaggctgggggcctgaacacaaagcaagaagagtgggatgtgtccccaccccagataccctcctagtttctaacacattcaggccaggatggtccctgcagcagttggggcatggggtcctgctggtgctgctgctccctcaccccaggacaccccagctcttccctgagcctcagctacaccaagccagtcacagggcagtgagctcagctgttcacagtaggctgtgcaagcatggacacagccccacccgtcttcctgaaccatcgagaaattacgtcttaccaaatcctactgaggactggcgaagaacaaaagggaaccaaatcacagatagatgtgaaggcagatagacaattcaactgttctcagaagctacagaggggccccagtgggggcagccccactgagctccagtctgccacccaaatgcctgttggtgcatctcctaaaggctgggctgcatgggacagaggaggaccatggtggggtgtcagcacttccaggctgggtactccatcggtgctgctgcttagagatgcctctgtacccttccagctgtcagatggcctctgcaccttatcattctgttacaacagcctggacatggagacacacaccatctctcaaaaacagcctttggggatgctcacgtgtatgtttgtgttcagaaaagaaccacctgccttgaatgaagcatctgcttcaaagccacagggctccccgtgctgagggccacactgagaggacatctgtgccctgcagtcctcggcccaagtccacccctccaggccaggcaccctggccccatcctgatgctgcaagaccaaggatgagaagcccaccagagataaagggcactgaagatctggccccctcttcagcagtcacaccctagtccctgtcactcagaaaactgggctcactgcagcacccactaaacatctctaaggggatcctaacctcccatctccaccatcatcagagccaccattaccatcaaggactcggctttcaacacgtacaatgcatcgggcactacaaaaactaaaactcctcatctctctggtttaccaacgaaaacctctgctttccatgtctccagtttcccctagggcctcctcaaatgttctagaactctttttatccactagtacatcagaaagaaaaaattaaccttgccttcctccctccccgatcctttcacaaaaacaaggcagtgctatggaagcacatgagagagacgtggggcgaaggccgcctttgctcccgcacagccacattgagactgcaggtgttcaggcaaagacagggccaggcagcacctcggtgagcctgcagcaggaaggtttgtgttgtgcagtgtcagaccgggatgaggagacagggctggaagaatcagccccacctgatttggattcagtccatgtgaaaacaaagagtgtcaagaattctgcatcacactacctaacagggagggaggaacttcccctcaatacggccttaccctagatgtgaagaggtgagaaaggctttcaggacaacacatggaaaccctgagtgtgctcagaacagactccacatccttgcctgaaactccaacagcatttcacaaaccctactgaatcaacaagtcactgagaaacacagtgttaataagcatccaatttctacatatttcctaggaaaactcataggtatttaaaaaggaatacctttggctatgaatgcaaactaattgaaagaaaaccattagctcttataatgaaaggtattctcttggctttagcagctgctgtggtctgaatgttggcgtcccccccaaaattcacgtgttaaaatctaatacccaatgtgacagtattaagaagtggggcctctggagagtgattaagttatggactctcaggaacaggattagtgcccttattatagaggttcaagtgagacccctcaccccttccaacaggtgaggacacagcaagaaggcaccatctgtgaagcagagagcagccctcaccagacaccaagtccgctggcaccttgatcttggacttcccagcccccagaactgtgagcaagaaatttctattatttacatatcatccaccctaaggtattttatgatagcaggctgaacgaacaaaggcatcacctaaacaaccacattatggaagcaatcttctaagaaaatggtctaagcattttaaaatttaaaattaaaaaaaaaaaactggctccaatcacaaaacttcttttagggaaaggctctgaagacagtggcttcataataacaaattctgacatctcaagtgaatacaaactcaaagagctaatttgaacctttgagaatgtagttgtatacagaaaagaaaaaactcccccagttaatgaccatcactaaataatgaacactaagacacacagaccaacttgtcctaattctttataaatgctatttcaaatggaacaaaaataagtacatttaggtcatttctgtattttgaaaaaaacaaatacgttacaataagttttactactccttttgaaagtacagagtcttggtgaaagctaggaaatgacagtcatcctgaacactgtgtttcaaggtaatatcccaacagctctacagctgcccgtcagcatggaaccacactgggtcctgagtccgtgttgtagcactgaaggaaaggcagcaaggggacactgggcagagatggaggagagtacagtgagggctgagggagatgagggagcctggggtccagtgagaacaaagccaccataagccagccgggctcaggatcctcacagacaaccaagagcccgcaggcccagcgtcgtcttggagggaaacagccgcctacactgtcaagggggctcccaaaggcctggctatgggcttcggtctccaaatcagctgtgcctagctccctgagaggcagaatttatcttttctatttgtatttgttttcctaaaaagggggaaggagagagaagcaaacatgaaaataacgccccaaggcctccatccccaccaatgcgtatcactcctgaagggccagcactcccagtgtcttactgattaggtggctgaaagcaaaccagtttaaaagctcagggccagatataattcaaaaaagtttaggtatatgcctcagttgatttttgtcttaattttaatttcttaaaattaactgtaattttcattataattttccccaaagtgcccattttttgccatgttctcatgaaataaacaaagagaaggatgctaagtggccacaacgtgaaagtttcagcccaaatctcagagttcgcttggttatgccaatcacccagtcactccttcagtcccaacattctaaggaccggcaaagagagctcagagaaagttcacaaaaagacagaggaaggacagatgaagttccctgatggcaaaacccatgctcgttgaaaccaactgggacacaaaaaagcctacgttgcaggacagggccccagccggcggggcaggacctgcgggaggcccaccaaccctcctcacaaggctgtttcagcctcaggtcctttctaggggacagcctcccttggcctccacatccctcagggggcttccatgcccagcccatccctctcgtggcatgaaccacactggaccagagtgcctgctgccctgcctgccctgcctgccctggccagggagctcacacaagcagacaggctcaatgcctctcaggtcccaggtgcccagtgttctgccgcagagaggcgcacactccttgagggaaggtgaccgattctagcggtgccagattggcctctgatgcgctgcccagcctcagcctacctaagcactcgatagcagtaacactggtttcctcatctacaaaacagaaataacgtgtccagctcacgtcacaggctatatgcaagcacaaatggagtagcagcaagcaaaactcagaacaaacctgctgttcatttcgttctcttaaacgcgcagtggggttgactgagcaagcaagtcatcaaggctgatgtattattatgatgagttttgaacacctatggtcaagtagagccagacctttgatggcagtagctcccgcctcacacagcctggcacccggaggcagccacgcacctgcacacctgtccacgtgcgacctgcccccactgccgggtgcctcaatcacagcctttctgttccccgccaagctgtgctcaatggtttctaatgattctcacaccgcgttttctatgtcaaatacataccgggagttcattcttaaatttcaatatcattaatcatccaacattcagcatctcagaactcagaaatttgcatttctacaatagtggctttgaaaaagggacacaaatgcaaatgttccacaaactgtgtaagaattttcagagaattgccaaaacaaaccatcaatgctccattgacagcgaattttctgagctcttcataatgactgagtactcgtgatttttaaaagacaaaacacaatttgaggatcaaaaaaaaaagtaggttgaaaaataagtccttatgtctacatgatttccagaacaaaccttgactgattaagatcccagataatgatggcatggagaatccaggctagtgacaatctgagagctgcagacgccccgtgccgggtggctgggaggatgcacattcagacaggcggtgctgtgcgtcagaaaacgtacacaagtatttttgaaaccttgcctttagaaagcggaagcaagcagtacatggggatcaaaagcatctcccaccccaacatcagccggaactatccaggcatttctgttgtccttctctaaaacctccagttgatgtagggctggtctactctcccacgttctcggggttcaatctcactccctcctatccagaacccccagggctgcccaccgcaggggccatgaacaagctcttctccagctggcaccaagcatgctctcaggccctgccaccttgtccaagctcccctggactcctgccagctggctgcacctgctgcctacacaccccctcctcctgggagccctcttgggcctcctgcaaagccactctcagctcccaggctttctcattacctcccgccaccttgtttctgagcaagggccatgctcagaatctgcaacccacctgtcaccagaagctcagaatcaaggtcttgggttaattgcaggtcttcaaaattccttttctgccccttaaaactttgtagtactcctggccggatacaatggctcatacctgtaatccaggactttgggaggccgagggggcaggattgcttgagtccaggagttggagaccagcctggacaacatggtgagattcggtctccacaaaaaattttaaaaattagctgggcgtggtggcatgcagaggtgcatgccagaggtggtcccagctactcgggagcctgaggtgggaggatcgctgaagcccaggaagctgaggctgaggtgcataccaccacactccagcctgggcgacagcaagaccctgtctaacacacacacacacacccaacacacacacacggacaccctaacacacacatacacacaccctaacacacaccctgtgtaaaacaacactctcaaccctgtctaaaaaacacacactccctaaaacacacacacccatctcacacacatgcactcaccctaacacacacaccctaacacacatacacaccgtctaaaacacacacacccccgtctcacacacatgcactcaaacacacatacacaccctaacacacatacacatcgtctaaaatacacacccccgtctcacacacatgcactcaaacacacacaccctaacacacatacacaccgtctaaaacacacacacacccccatctcacacacgtgcactcactctaacaaacacacacatcctaacacacatacacaccgtctgaaacacatataccaccgtctcacacacttgcactcactctcacacacacatcctaacacacatacacaccgtctgaaacacacacacccccatctcacacatgcactcacccaacacacacacaccctaacacacatacacaccgtctgaaacacacacacccccatctcacacatgcactcacccaacacacactgtctaaaacacacacaccctgtctaaaacacacatacataccttaacacacacatatcctgtctaaaacacacacccatactttaatacacagacacccacaccctaacacacataccacaccctaaaacacaaacacaccctaacacacacgcatacagaccatacacacccgtctaaaacacacatacacacatcttaacacacatcctgtctagaacacacacccatacttttaacacatagtctaggacacacacaccctgtttaaaacacacatacataccttaacacacatcctgtccaaaacacacacccatactttaacacacagtctaagacacacacaccctaacacataccacaccctaaaacacacaaacacaccttcacacacacacacacacacacagaccataacacacacacctgtctaaaacacacatacacaccttaacacacacacactctgtctaaaacacacacccatatcttaatacagtctaaaacacacacactgtctaaaacacacaccctaacacacacataccctaacacacacgctctaaaacacaccctgacacacacaccctgtctaaacacacaccctaacacatacaccgtctcacacacacacaccctgtctaaaacacacacacaccacctaacacacacaccctgtctcacacacaccctatctaaaacacacacaccctaacacacacaccctgtctctcacacacacaccctgtctaaaacacacacacaccctaacacatacacattgtgtctaaaacacacacacgcaccctaacacacacaccctgtctaaaacacacaccccatcacacgcacacaccctaacacacatacaccctgattcacacacatacaacctgtctaaaacacacaccctaacacacactctaacacacacatacacacagacactttgtggtattcctgagacattcaaccactgcagagcattatttaaatgccataaaaatgcatctttatggatcatttctatattaaaatataataatcttggcggccacaatagttaaaataaacagattcaagatcaaataaagttagagcagaacatgaggactggaagcaatcccagaggagagccttctccctggactcacagggttaacactcaacagtggtctgaagcaactgtattaccatgaactcactcatcaccaagtcattgtggacagagactttttagctgcttttatgtggatgggggtagctcagactgaacagaatattaagaaatcatagaatggcccaaatgaacacactgatcttaagttacacacgtttcccacaaaatcctttttttttgttttgagacaacagtcttgctctgtcggccaggctacagtgcagtggcaccatctcggctcactgcaacctcacctcccggattcaagcgattctcctgcctcagcctcccgagtagctgggactacaggcgcgtgccaccacgcctggctaatttttgtgtttttagtagagacggggtttgaccatgctgaccaggctgatcgcgaactcctgacctcaaatgatctgcccacctcggcctctcaaagcacgaggattacaggtttgagccaccgcacccggccacttattttgttttgaactaaacattatccgtacctcgcaccaagattccaggagcgagaggatgctcaagttaccgaccactgcctgctcaaccagcttcctatcgagagcatcatcccggtgaccatagacacgtcccagcaaatccacgtcccagcaaatgcactgcttcctatcgagagcatcatcccggtgaccacagacacgtcccagcaaatccactgcttcctatcgagagcatcatcccggtgaccacagacacgtcccagcaaatccactgcttcctatcgagagcatcatcccggtgaccacagacacgtcccagcaaatccacgtcccagcaaatgcactgcttcctatcgagagcaccatcccgctgaccacagacacgtcccagcaaatccacgtcccagcaaatgcactgcttcctatcgagagcaccatcccgctgaccacagacacgtcccagcaaatccacgtcccagcaaatccactgcggggctccttgacactgagaacttttctgggcaagactttctctaggcacgaacattccggaagggaaagtaaatgacactggagggacggggtagtgttaagtgggtggccaagtaacaacgtctgcctttcctgctggccagtcaagtcaccagtatcctaagcccttaaccacaaggaaagacaaggacagttacttggagaactgtccttggaggaaaacaagggaatgggagaaaaaaaaggaggcgtagcttgtcctgccagcaggcccccgtgggctttccgtccacactcccggtttcatgccagggactctggcttcaaggcagaggctctgtgtcctgacaaacgcatcctgccctgccacagcgcatcccctcagggagggtgtggagggctggccgggcaaggggcgtaaggctccagggcctcctttcaaaggagagcccttccaggctaagtcaatccaggttcttccctcaggccgctcacatcattagaaatcgttctttagagcaataaaatcccaacagttaagcagctttgacgtcagagaaccagggcctggctctggcaaagttcagcgggaacagcaataaaaccgtaacacaaaactcacccagcagcagaggactttcacagaacacaggagaggaaagccacacacactgcactagaagggcacttcatcagcagggcaaagccaagtcacatgacaaatgtgagagggggcccatgggcggctggactcccccagcccggcctgcccagggagtgagggcggcacgggcacccacaccaggccacacaggagcagggcccccatgccagatgggcaggcaagggtgagccaggcaggcaagagtgagccgggtgggcagggcgaaggacagggccagctagcagaggacggcacgagagacacacggagggaggggaggtgcagccaggtaggccccgaacaccacgttgccaggactcggctcctcggctcaaggaaaagggacagcggttccgtggctgtgctctgacacacctagaaatttcccgctcaagagagcaaactgaatcctttagtattaatgatttctcttcctcccaaaacccactaaaatgatgaaaagcaggattggaaagcacttccagcaatgcctgggagcggacggacaggtgcatcagctgacaagaaacacagaggaacttcccgaaactagagatctctggggatggagctgcttgggaaggcacacaagcgagtgggcctcgcccaggagggagggcacggttctgggcaagccccatcccccgcctgagacgtgggcagaggccgctgggccaccagccagtgtgtgcaggtggtggtatgcacgtgttgggcacaaggggtcctgcctcccaagggacctccgggcggaagggcagacacggcagggaaagatgacagcggacagggcagaggaggcagccagcagacttcaggccccaggcaaaccacctcagctgtaccccctgcacagatggagagcagagaatgggctgggccaaggggcagccctgccctcaccagtgcggcctgtcttcagcctccaacccactgagagagagaatggagaggtcgtgggtggcaataaggcgcacacaacccaactcacatgggcaggacaggcccgggcaggccggtgatcaaactgaaccgcagcggctgaaattcccacagaaaaggccaaacaaacccagcaccccgcggtttccagagctgagcctcaaagaacccggcctgaaaaggttagagacaagcggatggagaaatatttgttagccaaaagaaaccaagggtagaaatacctcatgaaacactataagctctcggtcaaagaaacattaaacaaagagaaatatattatattttgataagagacctgatctaccaaaagaacagtcattaatttttaagctttaaaaaaaaacactgaactatataaagcaaaaaatggttattaatgtaaaaagaatattataagactataatcacagtagaaaaatacacttttccaagaaatcgagcagacagaaaaaaataagtaaagctatactgatttaaataactcaactgagttaatatataattaaaacaacatataaagaaaggatacatatcctcctatatataaataaaatatatataaatgagagaacttttttttttgagacggagtcttgctctgtcgccaggctgaagtacagtggcgcaatctcagctcactgcaacctctgcctcccaggttcaagcgattatcctgcctgagcctcctgggtagctgggactacaggcacacgccaccacgcccagctaatttttgtatttttagtagagatggggtttcactatgttggtcagaatggtctcaatctcttgaccttgtgatctgcccaccctgaccttccgaagtgctgggattacagctgtgggcctctgcgcccggccgagaactttaaatacaatattgatacatacatacagacgtctttagactgaaacaaaatcctaagagcatactttctcttcaaatgcctgcagagcatgtacaaattatgattatgtgtacaccaagtcatacaaaaatatgcacccccattaaaataatcaagtgtactcaaacaataattttcccatagcacactgacaaaaatgagagagactgaacctacccagtgctggtacagcacaaatgaaaaatatgcatcctcttacactggaattaggaagatcagttggaacgaggcttctggagcaatttgacagtcaacctaatgatgttttaagtgcacgggctcactgacccagcttccacttcctggaatttgtctagtagtgatacttagaagtttacaaaatatatgtataataattgtttgatgccaatttggaattggtataaacactgctacaaccacataaatatccattcgcaaggtatcaaaagagcaagttatatttgcacacatactgataccaaaagatgcttataacacattaaaatggacagaatgtaaaacacagggccctgcctatagaattatactctatgaaaatgctcacacacatcacactatgtttagacacagaaaaaagatacactctcacccaacagcagcccagtgtaggagggagagagccagctccattcaatgtctatttagacactttgagccatagcgcttaattttgtcttggaatgatcataaaccatttctttacatcagtcaatacataaacaatttaactcaataaaactttcatatctaaaaaaacctggaatcttgccctctggaattttcagacaaagacgattccacccagggaaagatgtgtgtaagcgttccggcaatctcaaagagagtgacccagacagaccctgagcctctctgcctctgctctaaggagcaggacccagagccaaggctaacagagcctcaggtgcctgtccaagcgtctgtccagtggccaccgtcttctctctcatgtggacgcaagacagaagtcgatggctaagtgcccttgaaggccacggtgcgctggaagtggcaggaagctgggcagcacaggactggctctgcaggagccccacactcaggcaggtcggcggcaggcctcgaggtttcattatggtgcacgctctcggtgactttccaaggacagaaagtgtgaagtcgtaaatggatgggcccatgacatgcttctgaagctcagagcaggacaagcttgcttcccaatcatgtgggtcccccacctaccagctctgtgacctcaggcaaattacttcttccctccaggcctgagatgatctggggctgtactaaatgcttgtaaaatgcttagtgcagcccctcacagaggccctcaaacaccaggagcaactgtggccacgacctcagtgggaacatgagcttcttcccagacagcccagacgcccagttggaggagcactcccacccctcacacaacccctcatgaaacaacaaagacactgggcaagaaaccagctctccacatcacaacctgacctttcaacatcacccttgtcaaaaagcatcgaggaaacctgtgtgcctctcaagtcagcctgcaaaccggggtcgcagacttgactccacatcctcccaggttttatcattcttctttcaccaagaggaagaataaaccatccattttgcactttgtgctgtcaaaaaccaacagtgaccactatcaagaaaaacaaaagtctcaaatccagaaagcaagctgcagtcacaagaacttctactttgggcaaagaaagccccgctgtgtgcccagagaagaaatgacccggccttacctggatggctttgggagctcattgctagcaatgtccactcctttaagtgattcgaaatggctcaaaatttccacggaaacgatagctccaacgagctccaaactcccaccaacacatacaagtaccgggacggtgagggctgggtcacagacgttcaagcgccgagcctcgccggcaaggtctcatgagccaggtaacccacaagttgaacagaggcgtccgctggcttctgcagatgaacctgcaaggtcagaaggagaaaagagactggagttacaacatggaagttccgatctggaaaacaacatccaactagggaaatgatgacttcctctttttttttggagacagaatcttgctctatcgcccaggctggagtgtggtggcacgatctgggctcactgcaacctccaccacccctgcaaccctgggttcgagcaattctcctgcctcagcctcccgagtagctgggaacacaggtgcatgccaccaggcacagctaatttttgtatttttagtagaaacggggttttgccatgttggcccaggctggtctcaaactcctgacctcaagtgatccacccacctcagcctcccaaagtgctgggattacaggcttgagccaccacgccccaccaacttccttctttatccttgttctgaccaaggactgatagaacagttcgacggaatcatttctacaaatacgagcagtgggatttttgttagtaaatcacagacatgtaaaaatgtctccagagagcagggtttctcagcctcagtaccactgggattttggtttgcgtatttaggtgttggggtgtagggctgccatacacattataagatatttagcaggatcctgggcctccacacaccagatgccagcagcatcttccaggtcatgacaaccaagaatgtctccagggagtgccaaaggtcctctgggggataatatcatcccctggttcaaaatatctgatctagagacaccttccttaccccttccagaagtttctccaacattaggcttttgaaaggaagcagagtatcttccaactaatataaatttattctgtcatattagcttatgaaataaatatgaaataaaatgttttaaaagaaaaatcactttcagcacattcccaccacaaaatgtcattactgcacgcttgcatcagcctggatccatagacattcgtagtcacaatgtctgtgtaatcacagaatttaattctaaagtccgcattcctcacgtaacatgataacctaaaatagttccctcatgtttctgtcttcataatgaccattttctcaggttttcattttctgcttataaaagcaatacatgcgcatcacaggttaagtatttaaaaagtcatccatgatgccatcacacacagacaagcccttggtaacattctgacatgcttccttgccgttgtttttctttgccttttgcccatacgaacctctagtgatacagctgtctatcacgttctctgtgctgatattacagccaggcattttccaatggcattaacaatacctggtaagcttcgttttgaagggctgtttcctattccatgtgtggatagacagctgccccgccccacttcaggagcttcggatgagcctgctgctcccagggaagtgtcgggccaaagagtggcatgtggcaccagctgagctcatcaagttctctttccaaggcctgcctcttcaatagatcagtcactagatgaacccaaaagagacaagtctcagcactcctaccactgagagtccctggctgatcccagctcaagtgctttcagaggcttctgtgttcatctttctttaaaagtgtgaccaattccttttcttgatttaattagtctagaaattttttttttttttttttttttttttttgccaattgcttataaccaaagaactctaaccagttcatcatgtaaagaatcacccccgcccccaaggctggctatctagatgctttccaactttatgttcattgtatctacaactctgattaatatcttcatgactgttgttctgtatctggttatctccttaggaatgacaatgacttatttgtcttcagggtcagaatgtttattcatctcttggtcagaaagagacattttcttgaagggaatgtagatggcatatttttcaaaccctcacaaatctcagatgacagtatccttcacacaaaaaaacacatctcagctgggtataaaaatcttagatcacaaatatgcccccctcaaaatttttggatgtcattcccccctcaacattgtagggaagtttaagtccagctcaattacagcttctttccaggtaaaactttgggggccgagtcttgatgttgtggttgttaccattttcttctgcctggaatctactggcatttttttcttgaatcttaaaattcaaaaacgttgtcagaagatacataagtaagagtcttttattttgttcaaaacatgactctttcaacaaatataggtcttctttctgctcaggaaaatgttcttcaattatgtcactgattattatttttgttaaacttgttctggcttcttcagagttcctatgctatttggctgaagtctccccatcagatctggcctctttcaccggtgacacatctgttgtttattctgcattcccaggcagcctctcaagtatgttcttcacttcactgctgctattttccacaatatccattttattccttatggcttcaaatacagattttaactaagccatgaactctttgttctcaaccacttccctttaaactcatctcatcatcttctcactcggcctagtccctcctcatacatcaccttctgcttctctttgttgagccaggtattcttctagccaaagccttttgaaaatattttttcctgatttaatttcattttcagaggcatattcttctgcacttcagggtatttccctcttccatacattctgggataccctttttttgacaggtccaaaggtgaggtttgtttctgtttatttatcttcaaataggaataagctctagtccagacctgaggactgccaagaggctatgtgtgctcactcctaccctgttctgtgttcactttaatactggtcaattatgcttctcaaagctataattctggcaagctgacatgcacggttcctagccaaatgtccagtgtctagcaaggtttcacctaacatagtgctgacagctagaaacggattcttctcccaactgcagattcaatagagcacaggcattttcactataatagaaatgttctggaagaacctcacgctcttgcaaaactgtatactaaaaacacaagggcttatcttagaaaaaagaaaagttgcagtagactattcaaaactatgctatttcatcaccaaggcattacaaaaacattacacagagaacattacattaagaaaaacatcacatagttttaaaaatatatatataatagtcctgatcaatgaaaagtccagtaaacatagaaatttaccttttaaaaaggtgaaaacagtttgacggaacagtaaaaggaagaattaaagcatctaagttgcagaactggagacagccaagcccaactatatcagtgagcatatcaaactgtctcaacaccccatttaaagggcaggggttgtcagactggataaaaaagcgagaccctactttcccagagtataaagaggaatcgtgtgaggagggactaaaaagcttttggagagaggaggctctgtgttttataacgtacagtcaatcttccccaagcactatacacccagctatgtgctgcctacaagaaatctatcttgttatatttaaaatatagaaatagattaaaagatggacaaatgtatatcacataactaatcaaaagaaagctgtaatggttatatgtatatcaaagtaaaatttaaagaaagaatactaccagcaatacagaagaccacttcataatgataaaggggttggttcatcaagtgggcacacagtcctaaacatttatgcacctgttggcagggcttcatacttgatgcaagcagtgtgcataggtattcactcacaccacgatatttccatatgagtttacatttcaacaatcatgagtctataccgagacctcagatcccaacatcacaaggtataaaataaaataataatataaaataataaaagcataagaagaaatggacaaatctacaattataactgggaattttcacaccctgctcttagtagctgttagaacaagtagacagaaaataagaacagagaagacctgaccactaccacccaacttgaccaaaatgacattcatggaacactccataaacaacggctgaatacacgttattcacgttcttttttaaaaacacacacagaacatttaccaagatagaacaccttctgggccataaaaccagtctcgaattcaaaaggacaagtcaagtcatacaaagtatgttcactgacaaaactgaaattaaattagaagtcaataacaaagatatttgaaaatcctaagtatttgcaaacacatcatgaatcaaagaaaaaatttaaaagaagttagaaaacattttgaaacgaatgaaaatacaacataaaaatctgcagtgcttaggaggaaacataagtaccaaatgcctgtattagaaaagaaggcctcaattcaatgaccttaggtttcaccttaaaaaattagaaaaagaacaaattaaactcaaaataagaaaaaaaaaacagtaacagaagacaacagaacagagaaaaatcaatgaaactaaaagctgattctttgagactataaaattgataaacttctagcagagctgataaagagaaaagacaaagattaacaatatcgagaatgagagagggggccaggtgtggtggctcacacctgtaattgtagcactttgggaggccgaggtggggggattgcttgagctcaggagttcgagagcagcctgggcaacattgtgaaaccctgtctcgacaaaaaataataaaaaaaaataagctgggcatggtggtgcatgcctgtagtcccagctactcgggaggctgaggtgggaggatcacttgaacccgggaggtcaaggctgcagtgagccaaaatcacgccactgtaccccagcctgggtgacagagcaagcctctgttccaaaaaaaaaaaaaaaaaaaaaaaaaaaaagagagtgggaattaactacagattgcacaaatattaaaaggacaatggggaatattatgaaaaactttatgccaataaatttgacaacttagatgaaataaacaagtgccttgaaaagcccaagctaccgaagctcactggagagagacacatatcaacacacgtcttcgtgggcctgaatccatcagagcagccgggctgtgacactcactgtcatgatgtttgcctagtggtgacatccaaatcacctcctttttgctgcacttattacttagaattccaaggcaaggatgagctttcactgctccatcttcccagtgactcagtaatctgcttccgttcgtgtggactcacagatagttacgttatccgctgtgttattagtcccatactgccaccattggtgttggtgctaaagcgccggccgtcgggagctcctgcaaaccagctcctaggtttttctggcaagcctccaatccagtcttttgtttgtttgtttttgagcatttgcttactttctgattttacaagatgtccctgtcacagtcccggaatcaatggcttctccagggaaccctggatccatgtttgggagaactgtgttcggacccaatctagtgctaggtgtgctaactgctgctgggcgacagagcacgcagggccctctcagcaggcagcgcgcgtagggactcactcacacctcagtatctctgtatgagtttacacttgaataatcatgagtctatactgagacctcagatcccaacatcacaaggtgtattttagtcttcctctttccttgtttttattaaatatctttctaacagtgggaaacctggttcctattatctacagtatcttttctcatttgtttaattccggtacacacacaaagtcatttcagaatcgctaacctctacacatgagaaacacattcacaagaccaccatttatacacgattctccttgttctcagccttaccgtatccaggtaagacactggtttccaaagttatcaggtgagtgcatttgtaagagagttaaattccttggttagcatatgtatttcatgttgagttccccacatactggttggttttagtcatttgtttattttttggatatgtaaaaagtacaaatattttaagtaaaaaaaaagtgttttcatattgatatttgcaatttaagatttcacaggttttaacatgaatttctctttaaaaacaaagcttttatattatgaaaacttcaaacatatacagagtaaagagaactgtgtgacagcccacggcatctagcttcaacgccagccaacaccctggcattcacgctgcgtcggtacctccttccacctacactgaaacgtccgaaagttaacggcactattttgaaaatgcatatacccatgtaactctattaccatgtgagttcctcctcacttttacacgcacagccaagctaatgggaaacatgtttcacatgatgtggccagaatccggctgtgtcatgaacaagagggcttctcagaatcttgtgtcctctgcgctgagggaagcagaagccactgaaggcttctgagcaggacagaggacctggggtcgggtctaggataggccgagatgacagaagcagcttgggtggggaccccttcccagagctggggggtgggggctccagctactggggagtgcatggagaacatgcccctccactcggtcacatactcagccttcgggtcaccttttcagccagaaatggtcattccctggtgcctctggtgaaggctcactgagagccaggtcaccaggaaccacccacagcctcctgggaggaagccagtgggagctgcgatttagagaggaagcagaagactcgggaatctgtagacgagtggatctgacatgaggaggctaagaagccagctccagaacctgctggacagaatatcaatgcccacagtctatgaacccttctttctggaaaccggcgagaacacagagtacttgagccaaaggaagtgagaattcaggttttacagagcaggcatgctagacccaaggtacacctgttaggagttcatggttgcaagcaatagaaaattgactttggataatctaggcaaacagaggaagctccagcgagtgaacggggtagctggcaaagcaggtggagggacccagaggcaggaattaacggagagtccctccagaacactgtccaaccacacctgatggcctgcgctgagccacagcccttgaccagggaagccaggacaccctgacaggcagcgccgccaatgtgggaccaatgggaatgagggtcattcctcgaaggaaaactgaagaatcattaccagagggggaaataggacaaggcagacagacgccacagacagccgcaaggggacccggagaccccagcccccgtgtcacagctggggagactgagtcagcagccatgatgctcagttgggctaaaaaagtagctccaacagccacagacaggaccttcagggtctgcccaggcaccctgccttcctgcagcaggaccccaagctgttctggctctggctgggtctgttgtgactcatgtgctcgcttatctgatgagcacctgccccgtgcctggctgcaagttccactgagagcaaacgggaacatgtatctcttcacacccccggactctggcttggaaaaaagtactagataggaagcgggggcacccgagctccacctggtcccttaggaaagagtactagacagggagcggggacgcccgagctctacctggtcccttgggaaagagtactagacagggagcggggacacccgagctccacctggccccagcactagcccagtgtgttctctcaccctggaccagttccttatcacccctgagcctgattcttttctccccatagaagtactgggttggagttcatcggcatccctggtgtgctgtaggaaaaaggctctggggccaacgctgtctgggaaatgtaagttctccagacggcttagaggctgcaggtaaggacaggaaaggcacctctctctccacctccacacccacgtcccacctcccagaaactgctcctgatcgccccaccccagacgctcattcctgtcaccctactttcttgcccttccaagttctttcctttttctgatatttcattctatgttgacattaagtagttgtttgttttctcattatctgtcggcccctctgcctgcccctggctggaatgtgacctcctgctgcacccctggcccaaggcacacagtaggcacacaacaaaactgtgaactgaatgaacgtttttaaggtcttcctggattcccctcagaaactacctcacagggggctgaagttgaaagcaaattgcaaaagaaaccgttttctgccttttgggggctagagttaagttttaaggatctgatatcaaagattccagaaattcacaagtttgtggtactttaagcctcaggactcccaatgcctcagagagcctgcagagggctgccatgagaaagccagagtcacatacaatgcagggaactgctgttggccctcagaatatctgggttaaaagaaaaacttcacattccctcatgaagatcacaggcagagaagagaaaaattatggagttaagaacaaacgattctacagctgaaaactaaatggaacccctcataaagaaagcagcgctatctgaagcccacgaggaaagcagtcttttctattggatatgggatgaaaacccatcagtcagctgtctgcctgatacacctctcttctttctgcccattccgtcaccttctccttaggtggtgtgtctttgaacaacccaacgcaacactcacaacataaaaacctactagaaattaaatggtttaataagacttaagcatgatctagttctttttatcttgatgtatgtgtctaatgatacttcactaaccagattagagaactacgatgatcacttttctaagaaaacacatggaaagcacatgctactaagatctcaaggatccatttgtttctgaaggacgtttgaaatgtgtatctgtacatccctaactaaaatacattctaataaataatagacgaatgtggacatattacaactttcaaacacaatgccttttaggatgtattttcccctaacttaccagatgcactagaagtccacactgagccacagagcctgtgattttaatttacaagcacctttagcaagacagccatggtcactctgccaagtgggcagtttctgacactgggcatctgtttacataaagacatctctctcttttcatttctgctccacacagaatcaatgaaagcaaatgcatcactaacgcttacgtgtgggtgtatttccttcaccaaacacttggaatctaaggttacctatggttcctcctcccgcagcttggaaattttgaaattttggttgacttaatttcatggaataagccataaaccttccaaagagcaaaagtcttagaagctataaatccatcagagaacattcttctaaaacatcttaccaagctaccacaaagaaatgtgacagtgtggggagggccagttttgtcccttaccacacaccctccccaccccatttcacgggcagtgactatagctcaaagtgcccaccatggcctcagcctgccatgctggtgacggaacggccagtgctagtgaaccaaaaggagaacccagagtcacacaaaggagagcagcctgcagaacccagtccagaacgccaaatacacatcatctcctgggcaacagagagccttcaccaaacagggagtgaggccaggatgcccactctcatcatttccattcaacaccctggcagagatcctagccagggcagtaaggcaagaaaagaaaagaaagcaaaaagattacaaaggaaaatgtcactattcacagatgatatagtgtatacacagaaaactcaaaacaatctaccaataactattaaaataactaagtgaattttacaggattgctgagtaaaaggtcaataatgtaccaaaatcaaaagctattgtatttctatacagtggcaataaacaaatacaaaataagctttgaaaacaagataacatttataatagcatacaatattagcaaatatccagtactaaatctatcaagagacgtagaagaattctacatagaaaactataaaacgtaagtgaaattagagatctcaatacaaggaggaatataccatgtgcatggaccggaaaccccaatgagattccgatgtcaatgttttgcaaagtaatcggcagtcaatgcaatcgcaatcaaaatcccagcagaatttttttgaaaactgacaattttacattttaaatggaagcacaaagaacctgaaatagcaatctggaagagaaacaagcttgggggactcacactaccaaatatcaagacttcttctaaacttgtgtaattaaagtaaaccaaggagaatatgctagaatgagaccaacacagagtcatctgattattgtgaggattccaccccaaatccatagggaaaacagggtcttttcaatatgcagtgcttgcgtcagctgctctttgatgctaaatgaaccacagcccatacagcccgccatgatggaaattagtatgagctggatcacagacctaaatgttaaaggtaagcaatgaggcctggtctaaaagacaacaacaaaaaatatcttcaggtgggcaaagatagacagatgttaaaaaggtactgaccatgaaggaaagaaaatgataaattgtgctgcactcaattaagaacactcatttatcaaaagatgcagaagagggaaaaggcaagccacaaaatagaagagaccctgccacacatacacccagcaagggacggatattcaaaatgtataaataattcttacaaatcactaagaaaaaggcagacaacctgaatgaaaaataagcaaaacacatcaacaggtactttacaagacaggattccaagtggtcaatcaacacacacaaggtcctgcgcatgtgtgactgcagggaaacgcgataaagccacaacggaacactccatacccaccaaaatggctaaaatctataaacgaaaggataccatgtgttggtaaggatgtggttggccggcactcacacacgaggttacaaaacagtcaacggcacacaccctgtgggaaacccctcggtggcaggtactacagccacacaagtgccatgccccagcaatgccagcccgaggcatctacccaacagaaagacatctacgaagacacggcagcattatctgtaacagtcaaaaaccagaaacctcccaaacgtgccaaaagctgcacgaataaataccttgtgatgtcatcataccacagaacaccatacagcagtaaaaataaacaaactacacctatatgcagtgacacagataaatcacagaaacatcatgctgagaaaaagcagacacacacagcagcgcctactgtagggctccgtgtgcataaaatgtgaaaacaggcaacactaatccgaggtgggagacatccagacaggttcccctgggaggggtgggggacggccactgaaggaagaacaagggagcggtggcggggggaacacctgctccttgatctgtggaagagaaggcagagccttcacttgcagaaagtcagcacccgcatatccctcctggcttgtgtacttttctcatgtattttataattcaataaaaaactggtgcagaccaatgactcaaagccatcttgcaccaagaaagatccaaataatactgatctgactggtccatgcagcttgcacgatcttacctggactttccagacagtgaggaagtattttataattcttgccaccatttcttacaaccagtacatgtaggagaaatagtcaccatactactcctcttaaaagaaacctcgcagaaacggaaaagaattctttcagaacccacgagggtgcaaacacagggtgcagattttaaatggagaaaaaacagggaattcccaaagaggtactaagtcaggtttgtcagacaaaatatatatgaaatcatttttaatttgtgtaattaaatgattaatttaatttgaatttagggtaattaaaattgaaataaattttaagctttagaaagcaaactgttgctatatgacatttctgactcctgtctatacagtgagtttaataagcactgttttccttagtgaaatgtggagtgtaaggtctggctattgtgttttataagagtgtcattttatgatacgtggccacatggcgcaagacttcagatatttttcctccataatttgttgggacagatttatactttagtttcataatggactctacacttgaaagtaataaaattccatttcactgtgctgtaacgggaataaaataggaaggatttcacacaatccacaggcttatgctgaacaaggccaaaacaggctctgctgagctgaggccaccattccatctgaggctctgattcccccaccctctgattctggaacgttcggaagatcagataccaagaggataaagaggaagggccatgggagccagcaaggctaggtcttcagagccatgcatgaggcaccaggggacacacacacacacttgcacaggccagggtcatcagggtcatgcatgtggcaccgagggacatggacagacatgcacacacaagccagggttgtcagggtcatgcgtgtggcaccaggggacacacacagacatgcatgcacagaccagggtcgtcagggtcacgcacgtggcactgggggacacacacagacacgcatgcacagaccagggtcgtcagggtcacacgtgtggcactgggggacacacgcagacacgcatgcacagatcagggtcatcagggtcacacgcgtggcactgggggacacacagagacatgcaggcacagaccagggtcgtcagggtcacgcgtgtggcactatgtgacatacacagacatgcatgcacacagcagggttgtcagggtcatgcatgtggcactggtggacacacacaaacacgcatgcacagagcagggtcgtcagggtcacgcgtgtggcactggcggacacacacaaacacgcatgcacagagcagggtcgtcagggtcacgcgtgtggcactggcggacacaaacacgcatgcacagagcagggtcgtcagggtcatgcgtgtggcactatgtgacacatacagacatgcatgcacacagcagggttgtcagggtcacgcgtgtggcactggcggacacacacaaacatgcatgcacagagcagggtcgtcagggtcacgcgtgtggcactggcggacacagacacacagatgaacgcacaagaataactgtccgttagcagcaacagagcatcagctttctccatggaggaaaacagacgtcagcactgaactttctccatggaggaaaagagatgtcagcactgaggcccttttgcagatgcctaggtgtgtttattgccagtctgcgtaagcataagagtggataaagatccacattctggcctatgatctctagcatgtacaaacttattggtaaaataaactctggagaggaagagtccaaatggagaaggcatccagataaaacaagacttgtttccgtttgctgtgaaataaaagaatttcagagaaaaagattcagacagacacacagaaggcccaaggatttgacttacggtgtgaaacgctgggctcaatggatcatttaacatcaactgccatgaacaccccgagagagcaaaaggccagtggggtcccaggcagatggctgcaaccccacgaaggaaaacatgacttatccctgacttatccctgccctacgcagggcacccccagggcaggtgacaaacagccccagaaccttatgtcagtaccagactaagtaaggaaagatctcttccaccataaccaccatgcacccaagcacgcgtagcttcaccaacaacgggcctgaattgagcttcaccaacaacatgcctgaaagcctccgtcactgacaggcacttgcggatggaaaacaaccctttgacaaaagaccctatcggccaaataagtgatcagcccccaggcccccagccacacagaaacccgtttctaaaacagcggtcctcataatgcgatctggggtcccagagggtccccgagacctttacaagaggtgtgtgaagtcaaatttttgttcataatagaaaaatgtcatgtgcccttctctcacaggggtacagtggacatggactgaacgagagccggtgtgagaagcagaaatactgtcgccattaagccacaccttccatagactggcaaagggtaaaatgatgcctctcttctcacgacgctttgtgttttaccgaacggttattttttgttaaaaatgttacctatctatttaacatgtaatgggtttattcagtttcaaatgagtaagcacgttttttagatgtgtgttagtttctaatacaataaataccaatacaggttgagcatccctaatctaagaatccacaaaccaaaatgctccaaaatctgaaattttctgagcaccaacatgaaaacccaagtggaaaattccatacctgacctcatgtgatgggtcacagtcaaaactgtttggcgaacaaaattattaaaaatactatatgaaattaccttcacattatatgtataaggtgaacatgaaaaataaatttcatgtttaggctgggtgtggtggctcacactaatctcagcactttgggaggctgaggccggtggatcacctgaggtaagcctggccaacatggtgaaaccccatctctactaaaaatacaaaaactagccagtcatagtggtgtatgtctgtaattccagctactcgggagggaggctgaggcagtagaatcgcttaaacctgggaggcggaggtggcagtgagccgagaccacaccactgcactccagcctgggcgacagagtaagactccgtctcaaaataaataaataaataaataaataaatttcatgtttagactcaggtcccatccccaagatatctcattatgtatacgcaaatacttcaaaatccaaaaactctgagagcctgaacacttctggtcccaagcacgtcagaacgacagtcagcctgtgcatctcaatcattgaagctaaagctctttggagtccatgctaatttgcaggagtgtgaagggctccggagtttgagaaccgtggctctgcaggtgtgttccaaccctcttccttcggagacacaggagggccctgaatgtcagatgtgagggatgtggggcccgcagagacacaggaacttggctgtgaggaattcagggactagcaaagggggcgatgagaagaccctgaaatgcaccgtccaaagcacagtaccatcttgcgtggctggcgctgctgcatttcacctttcttcacgtggagggggtctcatcaaggcagcagaacagcttcttgaaacaaactcaagattgacagggtgccaagcaagaaaaactggaaactgacgtgtcccagccgcccacccacttccttctccattgggggataacaggggggtacaagtgaagggcctccgtcctgaggagaggggcacaggctgtttcctccagacacagacactcctcagtggtcaggaccgtcctctccatgcctgtctcaagctgcaggtgcctctcctgcccaggtgaggtgggagacctgggcaggcagccctccctgttctgcaggtgaggtgcttatcactgctggagtggaccctcctaagtgttgcgttctttcggaccaaagcagtaaataaaggtgctttgattccaggtgatagcccaagttcctccccaactctactcaaaactatcgatgtcggcatcgacagctgaggctgccctgcagatgggaacccgcagacaatcctggtacctgctgctgtgattattcacagccgtcagagagccctcacctggggggaggtgaatgccaaccccacgggtgacacaccactcccctggtgaccccagggaagctgcaggaaggtgacaaaggacctgcacacacaggcagtggacaggctcgccggcagggaggaatcctctctgtttgacaagacacagacaggccctctctggtgacagtctccaagaaaggagggaaggcttggacagatgccaacaagcgggaaggaagacagcagcacggcccattccccgacggtcccctttcatctttccaggtctgaactgcccacagttctgagttttgggtcccaataaatggacgtctggaccaagagcatgtctacggttggagctcacacctgctggtggcagcaagccgactgcccggcggggggtgggcagcccgggagccacagggctccccagagacagccgcttgggctgcaatgtctccaagctacagtcccgctaacccggttggtttcccaagcatgtgagcgaaactcagaggttcgttaaactcctactttctaagtttatttattgttgcaattgtttacaaaaagcatttttattttaatgtaaaaagcaaagctatttctattttaaaataaattaaaactgctgcagataatcaagagacgggtcaagccctgctctcatttccgcgtacacggtgtagctgggcatgaagtacttataaactcatgaagtcaagaagtgttcaacacagcgcctcggaagccaggttgctggatgacacggcccatgacgtctcagcaggcctgggccaccttctctcaagcagaacacacagaatcgtagccacctttcatagaaaacaacggaaatgaagagcttaaaggagctgaggacagtgcagggtgcatgaaaggaagtggcacagatgcctgaaggcttgtactgaaagtggcgtcatgccctgatgggaacttcccattcctccctggtgggcggagagaatcataggaccgccacatcctgtcatctccacttttctttctcttaaagaacagatgattgcagcgtggctggcgacacacttcatgaggcagagaaaagcacgcccagatgcacggggccctgtacaggacggcaggccgtctgccctgtgtccccgggactggcaggtcagtgagggtagcatcccgacttttcccaaggggctctgcggggtcaaaacagagtttaaaaatgcaaagacaaccatgcaacccttagccatgggccaccaacaaccgtcagagagtggtgctagaggtccaaaatgctgcgctgagggaggcaccccacagctctgaaatgttccaactccctcgatcccactgaaagacatggctcggggctctcctgttaaagggtagagtaaaagcaggtatggttctcgcaggcaggagacaggtgccacaccaatcaagatgcagttttaaagactgctacttagcagacttgtaaaactggatttgcccagagacagaccaaacccagtcagcacgggcactctggactccctgcagcgcccccctgaatccaggcctccctgctccctgccttgccagccctggggcctgtgaagcatgtctggtgtttttcaggaggtcatgcactgtatggttaacggcaacagatagtgcagagctgatcctgcacagcggcctccgggagagcaggactcttgtgctggccaggcacctggtggaaaggctggtgcacctgcagccctgcggcgcctggaggagccgagcagaggagctggttgagcacccactggacttgggcttgaaaacctgtcttcacagctcatccccgcatcatgctgggtcttttcaaaatgatgatgattactttaagaacgttcctgggatgaattacagacagctaaatgagtcataaaggtgaaggaccaacatgcccctcatctcctagttggatagtcgatgacagctgccatctagggcaattgctctaaccctctgccctttggagccactgatgtgcagctgctgtccacaccacagggcttcccacagcctgtcgcccccagagtcagtcactcctcagctcctggcagccacagggcaggccccagctgggacagggaatcacccaggacagagtccacctttgtccaggcaggaaccctgcgcctcaggccaccttgtctgtgcagacacctgttctggcctgcaccacggccccgtccactcaggccaggctccaacaaggagtccaacatataaacacgtgtgtcactcacacatgacctcaaactcacacactcaatcacatacacacatccttatacactcacacacactctcacataaccacaaactcacaatcatgaacacactcaaacacgcacactcaaacccatgcgctcatatactaacacttatacactaatacaaacacaagcatgcacttacacaacctcaaactcacacattcaatcacacttgcacactcacacccaggcactcacacacactaacacaaacacacaaacatgcatgctcacacacataaccttaaacacacccgatcacattcatgcaaacatgcactcatgctcacagtgtaacacacccacagacattcacaaacactcatgctcacacattcacactcacaaatacactcatataacctcaaacacacatacgcacggactcactcacacacacacgtgtgtggcaacagcacaggggacctggctcaggcatggccgcacaagcaggatggagactggagcctctgtcggcgtggcccgggcctttacctgtggtccctcaaagcttttgcacaaagatgaggatctgggcctgcgcatccggccctgcctcattcacctgtattgttaaatcggaatcaagtgatagcacaggcatggacccaaaacagtgaagagcccgtggaggggcagggggcagcatccatcagagatttcaacaatgccccacaaacatccagcagctggcggacgggagcagctgcacccgcagagctgcaaagcagaccagggcagggcgcgtgggtggctgctcggccagaggcatcctcaaggccccagactgctgggggtctctccaacgagggcagtagggtgaagcaggaacccataggaacctgatggggagcctccctgagggtctctgtctcaggaactcctggacagtgggccccaggactctcctctgcagaaccagaacagaacccactgcccgaggcagcaggtggggagtttgtgatccagagaaaaggccctcaagccggcactggaagggcccagctactcatccgaccgctccccatccccgggccctcctccttactcctgcctttaagaagcaacacctcagccatgcactcccatttacaaaagtcgttgttaccacaagagtaacaccaccacacaaagacacacacaggtgatctctgtccctggctcccttgcaaggccaccagggtccttccttgggctgggctcccgcgcacacacgcgcgcacacacacagacaggcttcgcttctgtgagtgcccaaagactcgcactccacacgctgctctgcagctcccactcctacatcccggcctcccggtacaccaggagctctggtcccctctctctacagagtgtacgcggcaacacgcacaagcaagcagtttatacacagcgacagaacagacacactgcttcatgttcagagcaatagcttctttctctctttcctgctctctccaccatcaaacacccaacaggaaacctttgcgtggttgctgtccacacttccctccattccatacacatacacacacacgcacacacatgctcacaatgcacacatgtgcacatatgtacacatgcacacaccaggtggtcactgcctccaaaaatgaaattgtatcctacagacttctcagcatcttccgtttctcattcaataccatgtctcgggggagtccgtcacgtggctgtgccaacatttagccaagcattctcccactcatgggcacagactttcctccaagcgtttgactcttaccacaacactgcaagagactgccgggtgcaaagagcctcacgtcctggggtctgtggccctgtggagcacagccctgggagtgggggctgagtgaagtatctgcttatttctcacatcaggacatgtgagcagaacgacctctaaagaggctgcagccgcgcgtacctcctccagccatgcccgacactgctgcggcctctacatcctcccttgtaatggacaccatctctcttgccatattctgccaagctaggtaaaaagcacgatctctgctgacttttctgggcatctccctgggggctggggagtttgggcatgtctgcaacgacccctcttccctgggctgcctggtcacactgagcgttcattttctaatgttggtctttctctccagtttggaagagacctctccatagtaaactttttgttgttgttgttgtttgtttgttttgagacagagtctcactctgtcgcccaggctggagtgcggtggtgtgatctcggctcaacctccacctcccaggttcaagcgattctctcacctcagcctcccaagtagctgggattacaggcgtgcaccaccacgcccagctaatttttgtatttttggtagagatggggtttcaccatgcaggtcaggctgatcttgaactcccgacctcaggtgatccgcctgcctcagctttgtcaaatgttacacatatttttccaaaactctcatttcttcattgactttgttgctaatatctttatccactcaaaagttgtcatttttattctgtcaattgcatctttgtccgcttctagagatccggggtcaatgaggacgggtccttgatgccccaattgtctttggagatttctcttgctttactttttacagttaagccttgaatccatctgaaatgtatcttcccctcatacttagatatgaacaattgaccagccactgaaaaagttgaagcaagaaaaagaatgaccaaggtacacagaaaaactgagcccggaagacacagaggtaattcaagcccctctaaggagggacactgagaacagtgatgctatggcgtccgcagaacaggcaccaacggatgcaaagcagaggcgatcaggcagcagggcctggaacttcagccggtgaacagcagaacaaaactgcacagaggacctgggagatcacattgagtaaatatcagagaaataaaccagtagccaaaatggcattcacaggaatcccaccaaaggaaaacacaggtcagaggtgctgcagggaaatgacaatgatgccgacaatgatgacgagggtgaccaggagaggaggaaaccaccccagatgaatagaaaacaaggctttttttttttttttttttttttttttttttttttgagacggagtctcgctctgtcgcccaggctggagtgcagtggcgggatctcggctcactgcaagctccgcctcccgggttcacgccattctcctgcctcagcctcccaagtagctgggactacaggcgcccgccactacgcccggctaattttttgtatttttagtagagacggggtttcaccgttttagccaggatggtctcgatctcctgacctcgtgatccgcccgcctcggcctcccaaagtgctgggattacaggcgtgagccaccgcgcccggccaacaaggctttaaaaattaagttaactcatgtgtgctaaatgggataaattttaaatttcagaatatcaaagataatcagaagatctcaaatttcagataaaatgaaaataagacacctaaacctggacgagagccaagctggccacaggtcctgtcagctgcacaggcccaccctggcggtacgtgaagggcagcgtgcaaatcgggcaccctgtgtaagtcagagacccgatctaaagagagggacggtccctaaggctcacggcctgaagacccaggtgaggggtgacgctgccagggcacctggacgggtgggtgtgagctagacagactcaggagttgcctgctgcgggcaggaagggcagccgcaggggtctgatgggtcagctgggagaacacgcagagccaggcagggtccacagagctgtgaagaacactgacattgggaaccaggcagcaggaacgcccagatgtgcctggggcagggcagccacgtaggaagaagtcagcagagccaggggcctgggaatcagaggagcagagggtgccccgggaggtgccagagcctgcttggtctctctgctgtcctgcaggcctgcggactccgcccacccaccctcccatccacgcatgtccctaaatgttccctgaacacctgccaggccacggaccgtccactcacttgtcctcaccgggccagcgaggatgcctggtggcccacggccagcccaaccccaccgtgaggatgtgtgaagcgaagcccctgcctcaggcctgagcgtcctccatgcagattcagccccaccagggcaacaccactgacctcagcgagtggtgacgcctcacagcgtccacaggatggcactcacgcctacctggcacacggacaccacggacgctacaggccatcacagccttccagtatgactgcaggagagggtcctgccaactcagtcacgcacaggctccagtggcgcagcagaagggcagtctggggtggaagatcgcatggggacgctgcttgccatggagcacccactgccaggtgctctggacgggcgtttcctccatggccccccagggggcctggggagtctgggctccctcaaccagtgagtgcccccgactgcaggcaatcttgcccagcccaggcctcttgccggcccttatgggggagggtgctggagaagaggggggtgcctggcagtcaccccacccgactgcgagtgtcacctggaccacgtcatgtcctgtccacagcctgctggacgccctggggccagcctcgtctgactctgcttcaatgtgtcctttgatggtccctaaagcagggctggcaggttctgggcaatgatgttccaccatccaaacagcaaggcaggtgctgtgtgctcacaaccctccaccatccaaacaccaaggcaggtgctgtgtgctcacaaccctccaccatccaaacaccaaggcaggtgctgtgtgctcacaaccctccaccatccaaacaaggcaggtgctgtgtgctcacaaccctccaccatccaaacaccaaggcaggtgctgtgtgctcacaaccctccaccatccaaacaccaaggaaggtgctgtgtgctcacaaccctccaccatccaaacaccaaggaaggtgctgtgtgctcacaaccctcctgatggtgcccagatgtgaggaaggtgctgtgtgctcacaaccctcctgatggtgcccagatgtgaggaaggtgctgtgtgctcacaaccctcctgatggtgccccagatgtcaccaccgcgccatcagaggtgggacacagactctgtcgaccgccctggcccgaaggcacgtgtctactaccatcagtaacatggcctcctggccacaccacacacaccacctgccgggagcacaacacccgccccagggggaggtgatgaacgccatccagccacagattgcccgggacgcctagttttttgttagttcagaccgtgtgttcctgaatacagcctgagtggccacacttgagtaacgattaaaaagccacagtgctcaacagaacacgccactgctatgacacaaatcctcataatgcaggcatacggctgggaggcagggtctcggtggaaccagactccctgagtaagcacagcacaaaatgtttctgacacactgatgacaactacagcacaaactggggttgcacgatgatagcaagtttcaataataagtggctctgagtgcaggtccttattggaaggggagctattccacgcccgtccctcctggacatagaccacttccttactcacaccactgccctgccagacacggtcacttggaaccaacaccttacccgtgagcgtgcttcagagacatccccagcctgcggggcctctgccttcggtgcccagatgctgtcctcccaaagccggggtgggctgcgctcctctatggcagcccaaaggctacctctgctcactctgactctgaacttgaaaccaaaagcagttccccaggcgtcagctgccccagctcaggcgtcgccaccacaggttacgaggccgtccactaaccgaagccactgccagggcgctgtccacacaggtgctggctcacaggccacgtgtgcctctggaggccccaaaatgtccagggcctctgactccgtgactctctgtgttgccagcatgagaggcctgctccaggctgcaacacagcacctgtcacgagggctgccccgacgcctgcatcctctctgccaccaatgggcctctctggaccctcctggaggccctgtcttctatgcagatctccacacctctcagtgcatcaccacaatggagggagcacgagattctccttccccaaagggacctatgatgtatcctgcctcacttcgcccagaccaccaacctggagcagccgaggtgcgggcaggaggccccagggccacagtctcaccactggcttctcacaaggggcagggctgacagctcatctggctgggaccagtattatgtgcagagacccaacgtggtgaaaagacccccaggaccctagagcacctgccaggatgcaagacggacatctcagacacaactgggcacggccaggcagacaagcccaggcccaagactgatcaccgcgctgagctcagctgccgccaccttctgctgggactgtctccatatgccacagggggagcgccccacctgcttggttttacacccacctcaaggacctctaattttccctgaaataggagttctatggacatcaaaatgcctggttttcaaaaagaattatggccattgtcctccaggggagacgtcgcgtcctgaggcatcccctctgtccagcaaacgcggtgcccctccactcagccaacatccggggaatgccagcggcaggtgggtgcccctctcagcctggggacatgccctgtgcacatagatctggcccgggagacacctcttggaccctgaggcgtctgtcgaagagcagcccagtgggcatccgtgacagcttggggacttccttccttcctgggggagacgagcacccaggcacataaagtccagcggtgaccagggtggggagggcactaaagcagagtccaggatggagacggagttggcagctggggtccacacgatgatggcctggaagagggaaggcgttggccccggggaacgaagagctgagtcacatgctcaacgtgaccacggctgttctgacactgcgccagggctggcacccacactgaacgtgcaccacccagatggcagcatcacaaggaccatcgtactgttgagggccatatccagaggtccctgtcctcacctcccactctcctctgcaggcctccatgggctcccctcgctctcaggagccagaggtggcctgaaacggccccgggaaccaagaaccccgggaaccaagaaccccgggaaccaatgaccccgggaaccaatgaccccgggaaccaatgaacccgggaaccaataaccccgggaaccaataaccccaggaaccaatgaccccagcaaccaatgaccccggcatgtcctgggctcttctcttgttcacttgagggatccatgcatctcctactctccttcctgccttggcagagtcggacaatttggcctgaggcaaaacagtctttcgaacaaagaggacacaccaggcctcctcgaagactgccaagctctgtctagttccccaggaagcagccctctttcccctcatttccaaggaaaagtgtcccatgctgggcccgctcactcactggcacacagcagaatcttcagtgtcagccgcaggggtgggacgggaaggtaaagaggaagtgccctagggaaggagacacaaagggaagaaacgctcctcaggctaagtaattcagaagtgacagggagcccaggggcaagtcactccaggaaggcaggagctgggggtggaggccgccaagaaaagctgttcctcggaggacagagggagagtccagccagggggagtgggcgctgggggtggagaggaaggaagccaggtgaccaacccaggaaggtgggtccctgcaagtgctggctcccgcgcaggtgggcgagccccggggagacgcaccaggccggtgccaggagaaagcagagcgtgtgatgatgctgggcatgctggcagtcactgacagacaccaagactcaccccgtctacccgttgtggagccactgccctcttctgcctgtcaccctccagtccctcaagcacagccccagcccagccccatcaaggtctgctccttcttacccaaggaggtccaagctcccaggaggggtctggcaggtcccctcggcctgagctggcccagtgcccgccctgctctcagggcaccggctcctggcagggcctccctagcgctccccacagcccccaccttggtggcccagtcatcttaccctatcttcagagccagcctgggcaccattcccctggcagccccaaggagccccagggtggggtaagcgccctttctccaagccccccatcggctgccggggccccttgctcatcctctccactgggaaggccagagagcagcccctgccccaccacggggtcacactcaccacagggtcacaggaaacaaaggacagaagaacaccaagccaggctcagcacctgcacgcagacactgacagtgggatagggagacagtggaatgctccggacctggctgcggggtgactcggggggaagcggatgcagactgcaggctccatctggcccgtggtggagtgtggccagcctgccatccagccgggggcgccaagactccactgggctgggagggcgtgcacgaaaaaggggatgagacctggggtcgggggcgcggcgtgggcccatgggtgccagagccaagagggccctcatgaggctcgattcattcagagaaagaaaacagcacaatcagttctggagatctggaccagaggaataagaagaaatcccactgcggaatgcgcgagctctgcaatggcccgcgtctttgggtaaatcgaggatgggcatatgcacacacacgtccgtgcacacatttaacttcttatataattcatgtatttaatgtacatttacattaaattatacatatgttataaatacacatttactatgtattctatattgataatatagacatattttatctatgtgtagctatagttattgtatgtataaacatttgttttttcccatctttctctctatagttagcaaacatttgagttcaccacgggcctgacagtaaccttgtgtttcagaagaaccacctgcctttaaaaactctaattgaatagctatttaatgggtgtatgttaatagcttcagttttgcaagatgaaaaaattctagaaattgggtgcacaaccacgtgaatataattaacactgctgaactgtacactaacaaatggttacaatggttaattttgttaggtgtttcttaccacaattgaaaattttttttatatttaaaagccggaaacacacacacaatcaaataaattgcccaaactgcttgttcacatggattctttcccgctttgtccccaacttcagaggcattgctgctgcctaccgatctccactcggccttcacgtcccatctcagaaaacgagggatgcccggtttaaacgttcccgtacacagcgcacacttcctgtggatcgaggtcacccctcagcagcgcctcccggatgcaaggagcaaacacgggttcacgtcctgatagctgagaaaatgactggcagtgactgaaacaacagcatcccacacacaacacacacatcaggatgtttaaagtatatttatggtgactgagctgtcacctgaacacgtgacgtacacgcgatgctctgaggaaggaaaccgtctaggaaccaagagtcacggagctgcctcccgcgaccgccttcctcaatcactacaatgaaaacacgcagtgagctgagctgcagtgaagacaaatgactctcagtgcttcgttttagcatattctaaaaatgcaatttacaattcagcaatatcctttctttttatgtagtcactacaacacaaacatgcctctttgttatctcgaactacatctgcatgcaaaacacgctctggctgggaaaatgtaagttctggggaatcgaaacccatttttcaaatctgaaagagatggagaaatgaaaagaaacgaaaaggagaggagaaaggtacattttattcacatgcaaaaaaatgtaaatgaaagctggtttcatttcctcacccccaagctggtaaatgatgtatgtaacttgtcccaagagttttcaaaattactatttaagttctatgactgtacagtggaacaaaatccatactgggcaaatgcggtgccatttacttctaatgctaaataaatgctcatgttctggacttaatgacaagagagcttctcaccctaggtaccaatgacatttgcgacggacaattcattgtcccatgtgctgtagaatgttcagtggcaaccctggcttcaaactactacaggccagtaccacgcccccagatgtgacaaccaaaactgtctccagacactgacaaatgtcccctgggggaggagggtgcaaaacctcctaggcgagagatcccctaaaatagactcaagccagagtgactgaagtcaccgccccccagttccacgtcacacacacacactccatcagctgagactgctcactgggctttggaagccagggcaacacagtcccagttgctcaggcccccaaagccaacagtgatacagatcacatacggctccctagggccaagggctctgcttccccaagggctgggatctccatattcctcagcacaatcagcgacagcacagactcacaccagcaggagctgccttcccaagttagtcaggacctgcacccacgtaacagattaaaattaggcacgctaattgttaaactgtcgctgcagaagctgggaataccatttttttaaatgaatagaattaatggattctttatttgcgtgcattggtgatactcagcctgtcttttattatcaaagcaatcataaaacgtcgcttctgccacatatgcaaattaaatcattagtatttttcccaattacagcaactgcttatttgtattgctgatctattctaccaatttagttcctctaatattaatgatactggaaatgctttaataaaactctcaggcaatacaagatacacattttctactttgtgcctttctgatcatgtaatgggtaggaccacccagagtgacccagatgggccacgtctcagagactgaaccccggagccacagtgctctgccctctacatgggcccccaaacagggcttccctgactcctccccacaaaggggagaaacagcccaggggtcctgtgggtggggccaggccaggaaaagccagcccaccgtgatgggagctttctttaacagcttacactttctttttctttttttttttttagacgcagtttggttcttgttgcccaggctggagtgcaatgttgcggtcccggctcactgcaacctcagccatccaggttcaagcaattctcttgcctcagcctcctgagtagctggagttacaggcatgagccaccacgactggctaacttttttgtattttttttagtagagatggggtttcaccatgttgaccaggctggtcgtgaactcctgacctcaggtgatccacccacctcggcctcccaaagtactgggattacaggcgtgagcaacagcttacactttctaacaactcaagtgaagtgttcatttcactgtgtaactgcccacgttacaggcatggttggcttaatacccagtgttctccaacacggtctcacagtccagttcacggatctcaccccgctcacccaaaggctccccttgtcgaggaagatgtgcttgtttcccgtggccacccctgaccctggctccagcccacagggggaatcctccaccatgatgcccctcacaagcaggaggccctggcactgctctgagccctgcaccttcccgtaaagtgcataaccactgagcagatcctcgcttggaggctggacaaacgtcagtgtctgtgagttcagaatctgaaagaaggataaagctgcctctcgggagatggagcagggcttggaaacagatctgatgacatgtgggcaggcaggggcaggggtggcagaggtcggcttcttaagcactcagccggaacaggtgcctcctcaactggctcctctgagcgccacagagaaacccacggcaagcgcagtctgggccacaatgaagcaacaaggaagcagttagttttgcaaacccaatacgctcaaagagcgcccgatcaatccattaccatttattccctctctgtacctggtgggagaaagcgcggcaacgacaccgcctcagcagctctcactcaagggcgtggggtggggggcagggtagagcactgcctcgggccagctgatggcccctccctcaacgatggccggggcaggaatggacaacagagactggaaagtgagaaaaatgatacaaagtggaaacaggatgcagacaggatgaagctcatccacacagtcccacagagtcccccagacagcatcagccccgccaacaaggccagacaaggacagacgtgagagccactggagggcagggcggctggaagagctgccatcgctggcacctgggcaccgtgcgagaggcctactgacgtgagtaacgaggcgcagtccactctcgcctctaatgggaagccacgaacagcccggacacagacagagaagcagctcgtgggcaaccctccatcgtgctctgcaaaggcagaaaacccagggggacctggctgcacaccacatcgatgggaaagacacccaggctaatattaggggatgcccagatcccaggtcctctgtatcagctgttcgtaatctgggatacctgcgtgggctgaaaagatccatgatctccctaaagccacattcgaaatgacatattttagtacctctctctatcatatggaaatgtttaatgaaaaagaaaactgaggctaggcatggtggcttacacctgtaatcccagaactttaggtggcctaggtgggaggatcccttgagaccaggagctcaagaccagcctggacaacatagtgagacccctgtctctacaaaaaaaaaaaaaaaaaaagccagatgtggtggtgcacgcctgtagtcccagctactcaggaggctgaggcaggcagatggagagagcccaagaggtcaaggcggcagtgagccatgattgtcccactgcactccggcctgcacaacagatcaaggctctatctcagaaaaaggcaaaggaaacggaagaaaagaaagagaagggaaaactgccctgcatccgaaggaatgggtcctaggcggcaacaatgagtctgctttgtttcagtggacatggccccagcaccatataccccacggctctgtcccctgcttctgatccctaaaatgccgatttgtattcaaacacatacaaagatgacactttaacaatacaacagcttaaataaaacttccaaatacatcagccctcggaccaagcaccaggaagatgagacacaggcaggacctgaggaggggctcagggctcctctctgcaccccaccgggcccagaaactgatggggaggtgcacacccaagggctccagcgagccaggatacaggagaacagaactgcggacattttgtgcacagggacagggacaaggcttccatggaagagcccttcccatcccttcccttccatcttggctctctctcctgagaagggcaccttgcttcccggccgcctccacaggactggcacaatcggaggcccatagcccctgactgctttgcgtggaggccctctccccagcatccccagcacctcagctgaaaggtctcctccaagcctcaggaagaagccttgccctcagcttcccttagccagaggcgacactcttggagctcagtacatgggggcacacagcgggctggctgctctcagcaggaggaagcactggctggcagtgtcaggaggttccgggggcctccgggtcacctccgaggactgaagaaaaggaggctcctggcccacgactctgcccagctcagcagcggggaagctctgcctccacccggctccctgttggtggccagagcgggaaggcagagctagagcatggaaatgagtggccacaggggcccctgttccctctgaagtctcagcctcaagccccctgcctgcctgtgccaggagcccttgcagcttcacgtgcacagcacagcctaccagtgggcaaagccggcctgtgataaggaacacgcacacgcctgtccctgattctacagacgccaccccaggagccccagaaggaccatgtgatacaacaggacacagggagcctgactgcagcctcgtccattactcactacaactcacaaaggggacaggaggccaggcaagccacggtgagtgccgaggaagccacggaggctgtgatgacccttcctgccggtacagaatcaaaaagaggccactgggccccggaaagcggtccaagacagtctcctacagctctgctctgggagccccaaacaagccccggaggcaaggtaaacagaggcccagggacaggaaagctcaggtgtgccctaaacaagggctaaacaatgtggccagacccaaggatgagggagaaggaatctgggtcggggaggctgggccaaaccctggaagacccggcaggcaaggcagaggggcctgcgttttactctagacaatgatgagccacaggatgccaggaccagggcagagaaggaaggctgagagtcggagcacagggaagagaggctggggcctgtgtctcggaggttcagagccactgtcaggtcccagtcctgactgtgctgctggggctggggcggccgcacagggggagtcaaggtcacagacactgagactcaaatgctcaaacggaattagaggcatcctcagtttctgtacgaaaatgggtggcactggagggacgaggaaagaccaaagagagatgggtcacaccagaggcagatgagtgtgtcccaaccacgggaggaaccacatgacagaggttcaaaaccaccttcccaagaggagcgtcagctgagggtgcaggtcctgggggcatcccggggtggccggccaggggagggtgcgaggcctctggagcccacggatgttggtgggtaaggcgtccatgcagaggcatgcttggagcaccactgtgtgttccagacaagccgccagaccacgtctgggcctgaaatttaacaatgtaatgcactgtaaggaaatcccatgagcaccggctttaggtgtaagagcttgactttcataaacaacgtagtcacgacctagaggagcaagagccacatcccagacacagtaccgagaacttctgctcgtaacaaggctggcccttgtccagagacagcccagttctaacagtgaaaacacagtggtctccctggagagaagagaagctgggtgagaactgtgcatgagagaggatttcgccaccctcaccaccatcagatgtacccattttagagaaactccacccttcctcattaggtggcagcgatcagaggtgagtggctgttctgggttcaccaggaatcacgccagaggagccagactgcacacgactccagtgcgtgagcacgtgtgtgcagatgtctgtccgtgcgtctatctgtatgagggtgtgtgcgtgtccggggagcacgagtgtgtgggtgggaatgcttgctgtgtgtggcacgtgcacacgcacgtacatgtgtgttgaggaggaagaacactcactagggctgcagtcctagaacttcagtgggagctaaagacagagaagaggggactgctcacaagtggcctggatggggtcacccactgaagcagccgcgggcccacaagcaccagaatggctgcagcaggggctggagagtggccagaagatcccccggtgcacccaggccaggaggccacttccagcctcagtcccgccgctgcgtgcctggccaggaccacagggccggccgccaccaacgcaatgcccaggagagcctcccaccccttactttacaaaaccccccaccttcgcctggaagaaacctcctcttagaggtgtgcaggtttgaggttctctgcctctccctccagcctagagacaggacgaggcacagcactctgtgaccagagaaagctccagcctgtcttcaggcagcatctgtgccagccttgtgccccagctgacagggacaatacgctttatacccaaaacaattcagccagggcagggatactgcaattctgatcgtgtggagaagaaaaccgaggcttagagcggttgggtcaatggcaccagagcagctggaacgtggctccaccaagatgcacctgggccctaaaaagcctaaaaagccgagctcctcctcactctactttccaacaagagtgcgcccctggaggagccgcgcctcctgcctggggctcatggttccaccacgcattgcaatgggcactaaggggagtggaaggcgtgggctcaggagcagcagccagctcagatccacacccccaccccaccgctctcgcttggggccgcagtggccacaggtatcagacgggaggacgggtatccacgccacaggtgtgcagggactaacggaccacacgtcataacatggggcccagcacacagaagacacccactgcagaaacatggcaggacgcggctgggcaggtcctccctgaagccgagggaggcagcgagttcattcacctcatagcacctggggttggggaaaggctgggccattgacctcctgtgttacttatcctgacaacagttcttcaaggaggaaaccctgaagtctgctttgcagatgggtggacccggatgagggaggtggcaaactgaccactgtggctctccgctcgctggagggccgcaagcctggactttgaagctcatccacctaatcccaaagcacattccttctaacacaccacttgcccgcagggaggcagatgcggtcagtgcggcttccaggactatctgggcccgggccacgtttgcatcggccttctcaggcacctgcccacctctgcatgggacagatgagccaacatggctcaacccttctctggagcatcctcagatgaccagcagagccttggtcctctgggtgacctgggtgcctggccccagagggcagctggaccgcacggctggaaggaccaccctctgggcccccctttggcagccatggccctgatccgtcctccaccatcctgtgggttggagcccccaccccgccccttggggtcactgggctgcagccgcagggactctgccacacaggctcctcccttcctggcccccactccccactctaagggccccaggcttctctgcatccagccagtcatcagcggagggagtgtgtggagggatctccctgctgagctgccattacttctatccacctttcccactggccattttggcacacttgggctctgacttccagggccccgggttttcccaggaagcagcagagacacagggaggccactgtgtgttagtctccactgccagagaaccctgccgagggcttctcccacaggccctgggagcccgcattctgcctctgggattgagaggtgaagccagctggacttctgggtcgggtggggacttggagaatttttctgtctagctagaggattgtaaatgcaccaatcagcactctgtaaaaatgcaccaatcagcactctgtgtctagctaaaggattgtaaatgcaccaatcagcactctgtaaaatggaccaatcagtaggacgtgggtggggacaaataacggaataatagctggccaccccagccagcagcggcaacccatttgggtccccttccatgctgtggaagctttgttctttcgatctccacaataaatcttgctgctgttcactctttgggtccgcactacctttaagagttgtaacacttgccgcgaaggtccgcagcttcattcttgaagtcagcaagaccacgaacctgctggacagaagaaaccccggacacatctgaaggaacaaactccggacacaccatctttaagagctataacactcaccgcaaaggtctgcagcttcattcttgaagtcagtgggaccaagaacccactggaaggaaccaactccggacacaggatggggcccaccctgccctcctagaggcccgctaagggattctgaggcgaggtccgcagagcgttcagtgtggcacccatgcacactgagcccacaccaagactattctggaactgctgctgggattcatgaggcacgaggagctaaattcactgaggacgctactggcggctttcctcctcagcatctgtccccttcccccttccttcctgacatcagtgaattccataccagggaggccagttccccagccggcttctggaagaggcatgtccagcacccaggctgagccactcggtgcgctctgcaccccggtcacagtgactggttcagagttcaatacgtggctggagccagaccgaaggagagtgaatccaagacttgctaagacaaagatgctgtccttcctgatgggtgtgaaccagccagtgtatataaccctgggagcagcgggcagggcctgtgtatcccatgaagctgactctccccaggtagggcaaagaaacaagccccagatgacactgtggaggagctggatcaaacagtgcctgaatacttcctcctccggcactttctaggaaaacaagccaaacaattccctgaggccacagtacctagcgagatcctatctgatggggagctaccagaaatacctccctgctcaatacctccctcgaagccagccaggtacagtacctcacgcttgtaatcccagcactttggtaagccgaggtgggcagactgtttgagcccaggagtttgagaccagccatggacaacatggcgaaacctcatctctacaaaatatacaaaaaattagccagccatggtggcatgcgtctttggttccagctaatcaggcagctgaggcaagagaactgcttaagctgggagatcaaggttgcagtgagtggtgattgtactgtagtgagtggtgattgtaccagtacactccagcctgggcaacaaagcaggactctgtctcaaaagatatatatatatattggaagccacccccaaaaatccccttagagtgcctttcccaccctccacctgtggaggagctgtgcccacaggggcaccatgcggccgcagccccagccctgacctctcccatctccctgtccttcactgccctccagagcggcactacccctcactttgctaccaggagccgccacatgcctggagccccgagcctggacctgagcacccagccacgcagcctcccttgagacactgcagccacacccggtagccctctgaccaaggcagtgggcaaaatgcacacagtccttcagggtccctgctcatgcaaatcagaagcagtgaagacgggacagaaagaaccaaggggagggaaagcggggcagcctggatttacgcacagccacagtctcagggcagctccctctcccagcacactgggaagcatgacagacggcaaagccgtggcacagtgtccatcagaccgctcgagtcatcctcagggccaggggcctcggctcggcctcgatacgaatcacactgtggccaaggcgcaatctggacatgccatagcagctgagccaccatcacgagccgggctctgcataccgggtagggacgctggcccttcaggtccctaacaagcgcagcatgccctgggggctgacagtgtccgtgggaagcatcacggtgcttctgagctttcaagagtctaatctctgtaaactatgacacagtccctgcaaggacaaaggcagacgagagcttgttctcaaactgtactaaggtccttcggggagacgtccaccacaccacgacctgctgcagagacaccctgagcaggtgcaggagcttcagaaagtcctgcaggtgcatccaaggcccggtcagcagcaggccccgggcaggggacataccctactcctcattcctcccaagacctgccagcagagagggctgtgtgtcctcagagccagcgggggaggaggaagaggaaagctgagtctctgcgggagagacactcactcagcagatgacaaaggactcactgaggtgatggggtcatgacagtgaagctgggatctcaaccgatgctcactcaacaccccagagccatggaacacaggacatcactgcaaatcactcttgtccactgcaggcacattggcagtgtgacgagcaggagagagcacatccaccaatcagacccttcaccccacacccacgagagcaccgaggaaccaggagaaggatacgtgaaacaagagaagaggccctccgcagctcccacgtgcctcagctctggcctccgcttaaccagaagaattctgaaaacagaacttcgtcagaacgcagcccgcgtgtgctgaagctggcacgctgacatggaaagacactcttcttcagggagggaccgcgggaagcactgcacatggttggttgtgaactccgaagcccaaaaggtcaacatccccaccagcttgggaggtgagttggatgctcccacaccaggccccatcctgcccgggccaccatgccgggcaggggtgggatggcccagcccggctgctaccctcggatggcagcgggcatgcacgtaacggctctgcaggtcagctgctgccccagccagcaaccgagctacgctgggctgtgctgcacactcaggggcaaaggaaagcaagctgcttcagggcaggcactcgaaaggcgagaagacacaggcaccccagtgacatctcctttgatgcatccttctgacctggagagccaaggggcggattccaacacagagcccttgagctggcaaacaagtgttctccaaagaatggggactgtgaccacctatgaggattttttcagtgcaaaatctgatgtaaattttatagtagagggggttttaatatgccagaacctcccaatggttttctttatggctcactttaaaggtccaaaaggtcagagggccacccacatcctgcaagcaaggaggcacagttggcatcactaattaagatacaccccgcttgtgtggacccacaggccatcttcccctccttgtccacagcccccagaggtggaatgggggtcagcctccttagaacactctaacccctgagcttacggggctcggacatgagtcctgggggtgggtaagtcctcaatagccagctgggattagccccaggccacagggaggactgaggctcaggggcccttggccacgctctgctgacctgctgggggcccactttctgccacttgacttacatggcacggtgccagccagcaaggcccctgcagatgggccaggctgggctcagcctcagacccggaattctggtgtgtaaaccggtggcactgggggtgccagctcgggtcccccagcgggtcccctccagcacggtttctacacagactcctggcaggcttcagtcctgacagctactctacagaatcctggacctaggcacagaggaagctctcgccagcactgctagaaggaaggaaccccctcccttctggatgcggcccgtctcagagccacaggactgggacccccggcgtgtgagccaccttcttcaccttgcccttgttttggaagctgcccttgcttttcatgcagaagtccccacaacagcaccaccaagcatgtgccccaaggagggcctagccgcgccatggaccacctggaggcctccttgggatgcatctgaatgggcctgcctccacaaagttagaacaagagagatcaggtccatcacccagctggagccaggcaccagtgcacaaaatagaaagaacagaagcaaactctccattaaatgcaagaagactacacatacatgaaaacgcaaggaagtcctttgtgcagaccacacctccaccccacccaggcagcctgccagttggcccggctcatcactggctcacgcactctggcctcagagacctcagtcaccaggccaccatctggccacaatgcccttttcacaatgcagccccgaaactctggctctggctaaaaaggaccacaccccattcccacccacccagcctccccttcctcctcctcatctgggcctggctcctgcaccacggctctccctaccaagcaagccctccagccacagccctggttctcaggatggtgacccgtgtgcacctgcctgtttagctcctttttctcctctgtccctaccaacaccaaagcctcttgtgggcagaggccagttttcctgatcaagcctggggtcatggggctggccactgcgtctggcacagagaatgtgttcaactgagtctcatctcatgtaaaacctagtacttgggctggggtgtaaaatgagtatttgcaaaataataactaatcaattagaaatattcagggaacatggcccccaaggaccaccccccctccacccccaaccccaccaccagggaggccagtggagataccacagaaacttctcttcctcagtttaaaaaagaaccgctccagcaaatagcaacacataaaccagatgatgggccattcccaagggaaaatgcaattccatcaccgcttgaacaatactcccacttggaatgctggttcagactttcaggtcctaagaactgatttattgtttcaagcttaaacatcaatccagcaaaagcacttgactcacacagacggagtacttcataaacaacagtaaactcacaaagcccaacactcacatttttaaacagagcagactccaaaatgtttatgtacacaaacatattaatgtatcatattaaaattatgacgctaaataagaagtgattaaataatgtcattaattctaatttaaaacaagcagagaaaaacttcttcataaaagcaccactcgcctcctcacacgccggggccctgggcgaagcggctggagaacaagctgcacacacctgccttggccttggcacaacagtcgcatttgccactcgacagctgtgttgaaggcccttctccctcccattcctttctgcatcacagaattccctccacttgcatttatgacatctccttaggagcatgtaatctccaaaatcaggaccaagaagttcccagatgggggcagggggtgtcaggaaacaggcaattccagagcactggcaagaaccccgcagaggggccaggccagaggtggggcctcaccccagctctcccacccaaggcccgcattgtgccattcactgggctacctactcatccattcattcattcactcattcattttctttcattcttcgagcacctacactgccaagcacagggtacagagcaggcatgaggccctcagggcccctcaatcctacagagccccagctagtagaaaaggtggcattaaacaactaaggtcacaatgagctccttcctgaaattgcacaatgggatgctgttagaaaggaggaaaaaagctattaggctaagtttaacaggggatcaaaggatgagaggatgagcatgaactgaggggctggagaagaggaaggtaaagggaggccattccaaggaaggggaacagtgtgtgcaaaggccccgaggtcaaaggggacttagagagagctagaaagtaaagcaggtggcagctgaaactccacaaacacagcaagtgctatcagatgaggctggtaaaacagaggccaggatcaggcaggccttccagggccctgagaccttaggatcctaagaatacaggaaagtcatgccagggtttcaagcaagggaatgagaggtacaaacctgcttctggtggaaacctgggagactgtttgtaggatgggctgtagcagagcccgctcagaccccgagggtcagtccccaccttgaagagcttacatgtgagttagaaaaacaaatgcccctaaattcttctattgcaaagcatatttatcaacttgccaaggacttaaagagtacttttctttccaatgaagatatctaaatgttttcaaattactactgtaaaaaagtaatacacgcttaccaaaagaatctctacaataccaccatgtataaaagaaaagtgtaccccgtctcctcacctctgatggttaccttagagacccatgtacttaaaaccaggagtggcccggggactgctccagaccccgcctttccctcttacactgcacacttctgcctgtctacacatggaggatgccacagtgcagaaatgccagcaggtttaacaagtactccttttataaataatgcagccccgacctccacacacgtctggatatctacacacttatcttctttccttagaatagatttcaaaatgtagaactgtggggacaaggagaatggcatttaagattttgacacttaagacttttctagagagcaattcggtaatcactattttatgtttatacattacatatataaacttttttgggggggacagcccagggtctcgctgtgtcactcaggctgaagtgcagtggcaaaatcacacctcactgcaaccttgactttccaggctcacgtgattctcctgccacagcctcccaagtaatggggactacaggcacacgacgtcatgcctgattttttttttttttttgtagagatgagggtctcactatgttgcccaggctggtcttgaactcctgggctcaagtgatcctctcaccttggcctcccaaagttctgggattacaggcataaggtacctcgcccagccctattatattttatataataatacatatgggtctctccagagagcaaatgataataaataacagccaacatttatatcatgcttactacatgccaggccctattcaaggaaatttccatacattaacttaaactttgcaaaaaccttacaaaatagaaattattattatgaccagcaacaggtatcatcaaactcgccaatatgataggcataaagggaatctccttcacactgaattgattagtaatgctaacctttcatcactggcacaatgattcaatgttcatacgttctgctcatcttgcaatggtgatctcatgctctccttattggtctgtaaaagctctttatatattgactgttaagcttacacaggcataatgtggtatgtattttctctctcgtctcttagcccggctgacggagtcttttgccaaagagattttttaaaaaactcttatcctattaaatctgtcaagattttctttaaggtttctgggttggtattgaaagagtagattaacttggtcctcaaatgctttcttccaataaaatcttccaaggtaatcaacagaccgaacaacaaacactaaaagctgctccggctgaagtggacttggagcattagctcccttccgtcacccccacctgcctccaggcgtcctggggactttgcaggagaagaacatgatgtcttctagttctgcagtcccacacgtgacataagacagcatgagaaagccagaagtactgcccagacctatgaaacgcgcctgtaacagcgccaagaacagtcaacacagcactagaaagtctaacgacactgaactagaaaggtattccaaatcgtcctcttctctaagaggctgtgttcgcccaagcacctcgacaagctgaacttcagcttcaaggtcaccaccagcctagaagcagaggcacggagaggaactggcctttgggactggagatgcagggggtggcacatggtccatttcattctacccccagttcctccagaggtagagcccacctgcaggactgtgctgacacctacatggtgagtgcatgaaacagcacgagccccaagcaggtgctcatctggcgtcagctacgggagcacgtgacagctgctcgtggcatcatctccttgctccaggatacatcctcatcccccgacagtgatacaggaagtcacggtgggggcaatctatgcaggaccccgaccttccttccaggaagtgagtaggaggtgtgtcagcaaggccacagcaaggggacatgtaggaccctgaccctccttctaggaagtgagtaggaggtttgtcagtgaggctgcagcaaggggacatggccatttaatgctgcagcaccatggccctcatgccaccccaaaacaggtcccactcttcccacgcacagaagcccaagagaagaaaactgaccgtatgaagagaacttactgaccttagtgacacttgttcccacagaaacgcttatgaatgagttaaggtctgttcaaaggtagcatcacttttgacatggcacccctcatctgacctgaaccagaaggtgcagtacccgcctctaacgtcaaggccaaaaacccagagcccaccacacggcagggcatatgctgaccacctgaaatcaaaacaaacactccctccaaatccatcctttccgactccttaccccaggacagactgggggctgccaacaacagggcaggggctcagtctcggttccacagccccaagcttaggtggagactgggccccttcgcccttcagttcccccatccccagctagtcatcaattctgagcctcggaggaaagcccggccacagcctgtcgccccgctgcctctcagcaacggcagttctctcggcctctgcggctccttcgcgccctacatcaggtattaatatattactcatggcagcttctgagctatgaaagcccagccgttttcaatagagaatggtatggatgaattctacaggagtgatgaaatgtttcttctgctccggcaattaagacagcataaagtcgcctttcctttggtgccacccccaacattaaaggattggaattcaaagccattcatgctgcattgaaacctcacaatgaagctggagaatggaagtcgattactgggcataaatatgcagtagttaaaaggaaagagttataacaaaattaaactgcagcaaccccacaatgtgtggaaacttccagcactagagtcctcctggtaaacatccatagggcattcttctcaacgaggtctctggccacagagtccagatgggctgcctgagccgcacgtggccagcgtgccaggttgtcctgtccatcttgctacagcaacagcccccaaggcctccgagaatatggcatttggggatttttattttgcatggctaggaagctgctgaacacagaacattctctctggtgcagggctccgaggccacatctgtccttcgtccctaggccttccaggcccatatgcagtccagtcatcttccctccaccccgtccccttagcccagggctcccccgggggcatgcctgctgccagctccccttgcaggagaaagaaccctaaagagggcagcgttacatctgcctgctgagtacagccggcttcttttctaattgattactgctctctttaggatgggatttgatctctaaaataaaagcccagaacacagaaagctatagaagtcttacaatgtgttggggtgtgtgtttttaaggcatgaaaatacttccctcccacacaaatgtgagttcttctggggaaagatgccacagatcccagagagtagaatatctgggaaagcccgatcagtcttaaaaataggtaattgaacacagattttagaattcacaagagctacctgaaaaaaaattaaatttcacatatttttgatatccaaaactccattctgatgaaacttctaactcggtggcattttgcatttccaattataatagagtaattgtgttgccatagttactgcaaaattctgcaataacttttgttgctttgtaactgctgtagtgtatatttgtgtacaagcagctgagttttcttaattcgatctccctcccttccaccctccctctccccagccaccaccaccacctttcctggctaggtcctgaaaccaccacaccagccttctttggacagtcccgaaaataatgcacagaattatcagaagcaattaaaactccaggcaaccacgatcatattacaaaagaaaaagtgaaaccaggtcaaggtgcaaacctgccagtatccccccagtcctgctgggctggcgctgggccaggactgtttacaggcttactcccaggccttaactgcttcggtgatttgtgggaataaacagaaaagcctgaacagagaaaaacggggcggcaaagtgactgcacaggccctttcctccctcacggagagcaagcagaactgctctcagcaagcaattaggtaggtctctacagtcatgcaattaggatttagtgaagaaagtcattagttttaaaataacttaagtttaatttctgcaacgctttatttgaaaactgtgtcacagcaggtcaatttacaacatgcaataaagaaaacactcatatcagctgcctcaagttattacaaatttttgatgtgcattaaatgagtacactgggttccacccccggcctttccaactgatacgcacggtctcctcctataacagtgtcaaataattcaacgctcaatgtaaatacgagataatttgcttatgattccgtggtgtgttttcgcaacgccggcaaacgcggatcccacccccgagcgggaccgggccccgtctcggcctgctggcgccctgcgggctgagccgagcgggtcccgggcagccccccgccctcccgcgaccccccgggcgctcgcagcggcgacgacaagcgcggggccgcggacccccggcagggacgtttttctgcaaactcacagcatttgacaaagttacataaacggcgcccggccggccccggcgcccgcccgcccccgccctcactcccggcggcccggagcccacctgctcggggggcgcgggccccgcaccgggagacggcgccgctgcctgccgtgcccacccccgcgcccccgccccggcgggcgaagccgcctcgcggcgcgggtggaaaggtccagaaggggccgggcggccctggggaccggcgggtcccacggcgcgcggccagcgctggcccccgcctcccacggccgcgcgcggggcgggtgtggaccggcggcgtccacctgccgcgggctccaaggcctgcaggctgcgcggggcgcggggcgggcggcggacaatggcccgcgggcgccgggccggggctgcgcttaccgcggcgggcggcggcggccggctctagccctgctccggcgctccgcgccgcatctcctcagcctgcgccgccacccgccggcgcgcgggctcgggctcgggcggcgacagccgggacgcggccacggcgccgccgggggcccaggctgggaggctgttcgggcggcggcggcggcggcgcgggcgggtgcgcgggctcgggctcgggctcgggcggcggcggggacggtgctccgcggcggcggccccacaacctcccctcctcattcacaaaaaattgacccacgttgaaccatgatgcttctccccactccagcgtcgagccaggcggcgataggccaccccgcacgcccgtcagccggcccggccccgcccagccagccggcggctcgccaaccattggctgcggcagccttgcgtcacctccccttgcgggccccgccctcccgcctggtttctaatgaagagctcgtcaattacggctcggccccgcctcccgcccgcccgccccgggcgcctggccggccttccattggcccgctgaaacctgcgcacagcccgtctgctcccacccctcgcccagcggctgctcaaccgcggggccggatgccctatgagcggcagagaggctccacccctgcccgcctccccgcacgcgtcctggacctcattggctgctggagctgccaattctagagggtggggcgtaccaaaagacgctccaggcgccagccgctgggtgcttcgcggttgaggaggcgcagggaccgggggccagtagtggccgtaaacacgggccccggccgtgtccggtcgcactcggtagcccgcatggctgcctagcggtcagcaccgcatgtctgcgagcctaattcgcgcttagagggcacacaatggggtgcaggctaacgcggggagccggccaggcctcgccgcggcgtccatcttggatactggcagtgggtcacgtggtgctgcgtgcgcacggaggcgcagggcggcccggtcactgagtgcgcaggcgccgtgggcctcgccctgccccgcggcgggaacgcggccgtgagggtgtggggtgtaggtccgccaggcctgcaacggctgccgagggtcgtgggatgcgctcgccgcgtccctgctcaggcggagggagcccggcccgccgccagggtctcgagtccgggtccaggcaggcgtggaggtggcgggaacggcgcaccgcccgggtgggcgttgttttaaggccgcagggcttgggaggcttgtgttgagttacaggtcggcccgtagatccccggaagcgcctttggttgccagcaggtgtcggcgagggtcttcagtggccaccctcctggtggtgatgtttccgtttctttccaacaggagtatgacaacttttcaacttgagtgcacacactgtccccggaatcccgcgttccagggaggaagcgcctttgacagcgcgcgccggttcgtggggcccgacggcgtgggcctgtggttgcggacctggcggagatgcgcgttcgcttcgattgtaggccattccttttaggagctgagaaaggatccgtttttacagcattctcgacctgtgattcttggtgggggaaactagttatgtggataaaaatacagttagcaaaataaaaatgccaattttacatttccttaaatatctcattaataattagaaaactttggtcattgcaagaaatgcttaggctaaacttagaaggaaaggaatggtgaattagagaactttaaaacaagatacagctgaagaaaaggagagcaattacggggttttggagacttggctgctgatggaaacggtgcactatctaattttcatgtagaatgaaacagggtctgtagctagctaacatctagataagattcagtatcatttgacaggattctcaaaaacatacaatcacgagaaaatattaaaacctgcctgtaagtctaccaaagttagtttttcacgtacaaagagaagtgcctgcgcaaaaagtcacgtgaaacgagctctgggatctaatgcttgcagaggtaatttttaaaaagtagatttccattagaaggaatgggtagccccattgctgcgtgccatttagtcctcacaggagtcctgagaggcactccagcagagtgaggcaccacgcagacgttgggtggatggtgcaagaacctcactcgccatgtctggaaaagagaaacttggcctgggtggctgtgtctgccattatgtgtcagaggggctgtctgaaggagaccggtgcacagccagtgcagagcaattcagtacgatagtgtgcagtgaaagcaaacacgctatcctgtgagctgtgtataaggagaaaggtggggtgacaaccccaatgcctgggagcattcgcgcttgggacttcacatacaggtatttgacagagtcaaatgaatcacactcaaaggaatc

SEQ ID NO: 250 - DNA, 40256 bp, Homo sapiens
  source 1..40256: mol_type = genomic DNA
gtcacggggaatgtgcttctgcccctgtaagggctttggggaagggggcaacatagtagaggctggaaagagcccccaaacctgtacccatgcccctccagccctgcgtttccattctgccttctcagagtgcccttgctgcacccagaccaccggccaggagagaccttctctcccactccagcccctctcactgcccttcaactagagctttcacctttttacatttcccttctgaaggacacaaatctgcttttctgcccatacactggcccaagggctcacctaacttgggagggaaggggctgttggtacaaggatgattttctgttagactgccattttgcacggtctcccccttcccatctgatgtgtcctgcccctcagctctttgccttatctgtgtcactgtcactttagcaaaaatacagcggccatttgtatcagcctctggtggttgcttgtgaggtgggactcttgcgggaacaggtggactttgggaggagtgggcagggagggagtggtagtggcagttctcgagctatctgattaagccattccgctagttcagttgtgccctggagggcaggggacagagtcagtatctctggggctgcaggccctcttgccttggccctcctggcatggggtaaccaccagctcagctctcctcctccagctttcctctctctagcacaccccagccagggcaaggatgcccacgggcatagctacagcaacccctgcgggatttggtgtccacacccgagaggccaggccagatgggaaagggattagcgcctcttccctcacactctgccaggctgccaggagcttgggccaggtctaaggtaatgaggtgctcctcttcctgctggaaaaaccggacagactcagaaccacaaaggcaggtgctgccagcctggcgccttcctctctgcttaggctgggtgagcttgtccaggcctgtgcctcaccccttctctcttctaggctcagtgtatgcttaatcaggcatggtgcatcagagcgggaaggagccatcaacagtgtatacttctggagccttctactgataaacagaggccccagaagacgatttgacttacctgagctcccagctgggacttaaacccaggtgtgtctgagtcacaactcttcggggatgccgtggtgagctggggctgagctcctgtattcccactcccccaccccacccccactcctgccatatcagggctggtctctgtggactcagcccagggctgcctcctctttgtcaccccaaagtggggcagccagggacagccagggtgtgttcagaatgggttcttcctgcagggcaggaagggcagattgttaaaggggctgcggcccagaccaccctggtccctcctccggcagtgactcagacccacactgtgccgtgcagctgtgtgccctgcacacccgcttgacggcgcactgctcacttctggggggccctttcagaggcacttttaaagcaaataaaacatttattgttcagatttttttccattttcttcctttttacaaaaacatgcatacatacacagggtatggtgggtcctaggaaagacacacacacacgcctcactcacacacacgctcacacacacgcctcactcacacacatgctcacacacattttccttcttgaccccaggcctggacccccaaaagccttgaagactttgccagagcagcctcccctcctccatgtctgtatcttctctcccaccccttccccctcagtcaggctactcctatgtggggtgggaatcagagctatggtgggggaggccccagaaacagagaaggctccccgagtgggcagtggccgaggggtcccaggggtatgctgcgcttcttggggagatgaagggtttggcaccattggatcaggaagcacaggactcccagagcacccatctgctccaccagggcatcgccaggaggttgatgtaggggggcctctggcgagggtacggaccagatggagggctgccagtctcggctgtcagggagcttcgtctcagtgcccagtggtagagggaagcttccagagtcgtctgaggaagcaggtgagagggactacccctgcactcaggaatatgggacctcttggctccccactcccccctagcccctagagcctaggaagggccagcctgtctgaggccaagttcacatttctgtgtggagcctgaggctgtgtgcaaagtctggggtttgcagagccaggaatagtggttaagggtgagcccgacggagccggagccagtcctcctctgtgcagtcctgaggaatgggggccacagccagggcccatactggaggggagaatctgttctcgagagccctgtgggggtcgccgcccagcccgtctcctctcagggtcctctccagttcccattctagacccagggattttctcacgctccctgggataactgtcaaagcaggcaggctgttctctggttccaactacttgcccacaggatctctaaagacccaggaatgggggctattgccaggggttagaagagaaccaggtcccaagggcatggtgggcgggcagatggttccagagccttagagattcataggttcttcctcctccaccagctgctccgagggcctgtggggagggacaagggtgggatgctggagcaccagggctgcagcaagggccttagctaagcttcctctcaaccctggtcaggaagcctgggagggttggggtggctgcatagcggacccggggtcttcaagcagggaggaatgaagcggtggagaggctgtgggcccagggccaggggtctggcattacctatcttcagccaggatgcccacagagagggacgccagtgcggtcactgcctccacttcttctttgtcagcccctggcactctaggcacccaggagtctggacaggaggccaggcgctgcatgcagccccagtatttacctggggtaagatgccaggtcagaaagggttggagaaagcaagcccctccacactgcgtcctagaccggatattgaggttggtgtctcaggcccagggccccggaggagcgggcctgtcctccacttagggtcggctctcccacctgcccctctcctcacttcgctcccactcccgcacagcctgacagggtacacagagtgggttcaacatggctgtgagggagtcctagcaggtgcccagcctttctctcatcccctgtggctgcaaggccacctttgactcattccccacaggtgcggggctcctgagagcatcaggagagcctgcttgcctgcagacagggtctgtgtcacagtgacctcccagagccccaagctcgggcctcccacttaaacacagcccccaccagtgctcagcccagcactcaggaaaggagggcctgggaggtgggacgaacacaacatgggagaactgaccatcaccacggccgctctgcatgggtgcccaggccaggagaatgctcctcctgcctgctgctgtgaggaaccatgtcctggaatctggctcagtgtgagggcacccaccgtaagaggaatcagccatgtctttaccattatgtaaagacatcacggctcccctacccagcccttgatatgggaatctattttactcatttttatccctagtatagattatgggtcttgacataagatgctcaatagatgttgagttgaagttgaaaatttaaagtactttacaaatgtgggggttatcccaagacgcagcccccaagccagcagagctcctgagacgcctgtggccaggactgaggggagggatgggaaccaggccttttggcaaacaaggcctgagtgttgctcttgacctggccctggtctagggctgtcgctagagatggaggccagtccctaccttgaggggccactgtctggtaggccctgctggctccatcgggggggctcagaggataacccctcactggggggtgctcaccattgctgcctgggtcactcacaggaatcttactccagaccaacagcaggtcacctggctggcaccggaagccctaggatctggccacggtggggcagggtaccaccaagatccttcagtctgagctcagcgagtgtcccatctccacacttactgtgcacccggatcacggcctccagagagcggatggcattgaggttgggtttctgtttccagccttcttctgaaaggggatccacctatagaaaacagtacatcagccaccagtctctcagggacccacaggcccagctcactcccaccccaggggccccagccttctagccacaagcacactctacctaggccaggagatgctgcctggacctaacttggaacagaggcttccgcttcgcctaccttgtttcaggcttggccactcccaccctgtcccatcccatctgcctgctccttgggtagtcctgagagccgggcttacctgcctgacagaagcatggatgggggagggagacggctcaccctgttacccagaagagcagccacacaggcctcagaggcgtcacagatggctgtgaggtcatggccaccctccaaggccagcaccactgcgcctcctgccaggttcatcagttgctgcgtcatgtatccaaaacctagaggttgggaggggagaaatgggaggggcgggagtggagaggtgaccctgttctctacccctgtggcttccctgcttgcttcctccctaataaagaatgactcacatgtatcaatcactatttccaaagtgctttcacattgaatgtcgtacaaaacctactagtatgcttcactcaaggctcagggaggttaagggccttgggaaaggccccacagctagtaagtggcagcaaggtaggacctgaacttgggtcattgactctagcctgtgtctttttcactgagctacaccctctcttctttctgtactctgggccctgtggccaccctctattctgagagtgctgcttctctctccccttcctctggaggagctgccagcccacctggaatcaacccagctgtggtggggagtcccacggctgagcttcctgcctactggacttaagtccccatgggtatgacctggtcaagccctccgtggtgaaccggcctggtcctgagaaagggcttgggctgtgctcggctaggagatcccggggaatttcaggaccagctgccatactccagtcctcaggctgaaagccctgggctggccactgccaccttccctttctgacttgggagtgcctcccaactccccgcaccgcctggctctctgtccctaacgtccccctcagctgaggctcccttacatttggcagaaacatggtagccacccagtggggccgggtgaccctcagcagcatcaaatccagcagacaccaggactaggtctggagagaactctcgggcgatgggcatcacgactatcctgtgaggtcacaagaagtggcgatcatcgtactgtgcagggttgccaggggcggtcctgccaactttgcggtggggcaccctgttcttaggactccaaggctcccagtgccccagcacaactggcagatttctctgacctccttgaccttggctggccacccatgtccctggcacacacagcctaaggactcagccccctaggggacttaactagcaagaggcagaaaggagccaaggatggagcaccagagggaatgaaagaggagtgtgtgtgaccatgtgtgtgtgcatgtgtgtgtgtgcatgcaagcatctgtggggtgcagtggccggagccacagggaaagggtaatctcacagccttgcggagatggactctggtcacaaagcttcagggactacaagtgctcagtcctttggactgagttgaccacacccagctactcactacttgagagctgagtaggggacaactaggtcctctgaggttctgcgccacctggctacattctctcatcctctccctcttccaggcccccccccagctgccttcctctacccctgatccaactctggggcctgcttgggtgttcttcatagccctgggctctgagaagactccaggaactccagcccagggctctcgtagaattagctgtcatggagataactccagaaaagtgtttgaagatccatttccagaattctcttttcccaaatagagtggcagccttctctgactaaatgtgccagctctgctcactccaccacccacctgccagcaatcagtttgacattggctctcggtaatgtatgcctttgcaaagcaccctttgacttttgcattcttctctctgtttgtcctattctcactggcgttcacctacaatgtctaggaactggtggggacaggctgacaatccaactgatcacctcccccctggtgctcttgggagaagggacaggagagggtggacttgcccctctgggcccccagagcacgtacctgaaagcagccaggtactcaggatcccccatgggggggtccagacctccagcccaggccacattgacattgaagccctcaccgctgccagcccctacctggaaaacaggaggcaagagagacatgaggacagcagagtcccagaaggggaacaccagtttgttagagctgccagcccagctcatccagcctccccatttccaggtggggaagtttaggatcagagaggctcagcagtctgcccaggatcacacagctcgtcatgacagaggcagagtaagtgtcaggaggaggtcaatgaggctggaagatgtggccctgacatgcggttacctcatccacagccccactccccgggaagaagttgccgtcgtcatggcgatgcagggagatgtagagcacactggggtcttggtagaaggtttgctgggtgccgttgccatggtgcacgtcctgtgtagggagacgggcagcgattagggaaggcagagagatgggggccaggacaggttagaagggtttcaaggtcagtggccattctgaggtcaggaccctagactgggatcaggaacctggggttcctaaagccacacggtcgagtggccccacgtaatccactgcccggctctgaacctcggcctctctgtgctggacagggctggctgtaatatgagatcctgaaggagaggaggtgtcccaatctcaggccagcccacctgagagagtaactgtgtggacatggggttagtggcaaggagagggaagggttcagggttacacatatcaggaaccactctgtcttgcataaagtcatgaagttatgaggagatcagaaaccaagctcggttacagaggggcaggtacacgaggcccagccccatccctcgtagggagagctgggccctacactcgactcacaggaccatgcgggaactcaagtgtgcaaaggtcctccaccgctctcaacttctgcttagaaatgtctcttacacagctgtcagtgcagaagggacatagcttagcagttaaacgcaagcactctagagctaacccgcctgggttcaaatccatctcatgacttacgaatgactgtgtgtgagttacttaatctctctgtgctcactttcatctgtaaagtgggttatagtcaggattaaatccatcatgtgtaaaaccatcagtgtctggatgtgattagtggtgtactgatgttatctgctattattcttatcatcactacctgtacaggaaatgcagaaattactagatctgccaaaagaagccaatagaggtcaaaagacaacactcaaatgacagctcctactcgttgcaggggtttgcgatggctgaatgcgttcccacacgccatcccctctaggcctcccaactgtgatgtgggtgttatcttcacccaaattttacacaaggggaaactgaggctcagagaggctactgcagaactaagacatgaagccgcatctctaacatcaggctcagggcttttcccccagggctctcgaattggagggtgctacggacaggcacctacccagtctacaatgaggatcttgctggccttgctctgctgttgcagctgccggcaggcgatggccactgagttgaagaagcagaagcccctggaaggagagacaggtcctgccagcccattctctccacatgccctcacctccccaggcccctgggttggcccagcctgagaaagctcagggaagaagagagaatgtccctgaaggaagttcctgggggcttgccccccacctcatcccacccaggtcttcccttagccttacatggctgttgaatgatctgcatggtgtcctgggggccgcaccacagcgaaaccattctggaaaaagaaagaatgcttgtcaatcaacagacagctctgacccacagctgcatgaacgtaccccaagagttccaatctcaacctggttcccagagccctcaatttcccctccaaaaccctgtagcaatctctaagaggaatgcgatgcctggggttctgggcctggattccccactaccccactctgcttcctcctttgtggtgtgtccaccttcaacccaaacctcctacctttagctcacgagaagccactttgaaggcgaggtcagtgacactgccagcggcccagcgggctgcattggaggaatgaagctcattccagatggtgtcagtgtccacctgcgggagccagagtcagggcccgcatcatccaaggcttcacacaggagccagggcccaagggggtggtccccaccccacggccaggaccccaggggcagggagctgggcagacagtgctgcctccccagtgccccaccgcccaaaggcaaggcctcctgtgtcccccaatcccagcatgactttttcccagcttaagtcccagcaccagcccattatctggccagcactctgctggcagcatcacgcctgcctccccggtcaggggagggggcatggcgttacctgggcgggacttggggtttgggccgggagggggttttaagccccagctgactctgctcaggccctgcgggacggtcggagctggaggggccgtctgcaccactgtcttccactcagggcccctagcccaggctgggaggccccccaaacccagtccctgggcctcaaggctagggaggggccggggggcatgatggggagatggggagggcgaggcagaccaagagaggcgaggaaggcagagagagtcgcaagaggctggagaaagagagagagagagaaagacagagagggagaggagggaggagaaaacagaagcaacaacagttggaaaaaccagaaagtggcaagaaatgggaagttgtgaatagggcactgactggctcccaaagtcccccaccagctacagctcccactttccctccggaatgaggcctccatcccctgcctctacacaccttgcttgagaaactactgcagggatagtgttaggcgaggagagctgagccggagggagcgggaagctcccttcacaaaggggtgaggacttaggaagcaaagctcgcgagcggagtttggggctatgtcccggagtggggagtgctgggatcgccaaggacaccggaagcaccaccgtgatgtcacaccaggcagcccaaggtctggggaccaggctgaggtaccccaacttgccacttaagagcagacagagcagcctggcggccaatgcccagtcatgggggtctttgaagggagagatgatcctaagccccagccttggccctgctcctgaaacctcactcaacatctaccagacaccttctaggggaaggcttaggctggactccgcattcgggggagactgtgggtccgagacacgcctgtccaaaaggagcttcctgctgcagggggcacctcaggaagtccctggctcaccctgtctggcagaaccacaacaagcagaggttctgcaggggctgggcctgggagaaccacagggaggagagctgagagccctggcaacgcccccctgagacccctgggcacacttaccccaaccccaccacagggcagcatcacaaacatccgctgtgccaggagccctgcggggagaggcccagcccacgtcagcgtgaatactctcagcctttggcccaacagggagcagggagcccagagagcagggccgggtgagtattgggggagagaaatatggaagggagaggtggaggtgggctgaggaggggcttggcagcaagctggagtagggacgtccagggtgcaggaggaggctggctgggcgggcagagccgagacaggagtgcatgggagctgggtgaggtaagctggcatggggagacagggccactaggccattacctgccagcttcccgttgtccagtttgaggcggctgagcgggttggtgccgtagaggagcacgtgccgctcagagtggaccgactgcagctcttccagggaggccttccggcctcggagacactgaaaaggggaccacagagctctgagctcatgctcgccccttccctcccatcaccaccaccccatgtgcccctcatctctcatgggccccagggccccccacccctcccctcccatgactcctccctccacccattcctcgggccccacccgcgcctcctcacctcacactggctccggagcccccgctcctgcagccgggaccagatgctctggatgcggccggcgtgctccgggtgcctgctgttgtcaccgcaggagcactggtgcttcagcatgaccgagtcatagatcagccctgcaggagcaagggtcagagcggggacccagggagtcctcacgccccatggccttggctgcagagaacacgccagcaccgccacagcaggcacccacatggagccgggcgggtacacacccctcacacccacacaggcctgcatttcatcctgcccctaccccagccccagcccctcacacctgtccacacacgcccagacacttccccaggtggcagcagccaacacatcaacacagctccagccaacatggctgccacagagccacggccttcccacatgcggacacgactgctgggtggcccaggactcgagggcccagcaccaggccctcaagtgctcagagcaaagcatgaggcctaacgtacagcatctcacacacgtgtcatgaacccagagaggctaccaaggggcagcaggagggaaaagaattcctaggaaacccccaaaccgggagctaagaagcccacgatgacactggaccatgtgatagacaaatccagctttggagaagtgactatttcagtctgacccgtgggaagtcttcagaggagggtcctgctcattgcgggtgggagggtcaatttctgtgcgtctaggacaccaacgactctcaaaatgctcacaccatgtgacccaggaatgctacttctttagagtgaaccttgggaaataatcccaagcatgaggaaagatttatgcataaggaaattcaaataagctataatctaaatgtctaactgataagggatccctcagtaaaaatgaaatacattaatgaaatactatgagactctcagttttaaagactaattatgccaagaaggattcataatatgttaactaagtaaagcaggatacaaaacgtagttcatgtgttcatggcatctgtacatgtacatatggccagaacaaagcctggactgaaatacagcagaatttcagagggtttacttctgggtggtgggatactggttggtgatttttcttttcttcttaggtttttctgtactcttcaaaatgtctaaaatacttctgagctctttttacaagcagagcaacagtaataaatatcattttttaaaagggctgagtgcattggcaggagactggaattcttatcctggcttgactaccacttgctatttgaccacaggcttgtcaccttagatttcgtgagccttggtcctcatcggccaaatgcaataaccagctgttccatgtgctccatgggtactacgtgggcctaacaaggctaagcactctgtggcctctaaaaatgtcccaagtgacaccaagacacccacatggactcgtgcagccgagcccctccctccacccgccaccctcctcccggtctcacctgtggtgaagggcagggtcctggcaggggtctctgagctggagaggactcgggcctggctggcaggctctggggctgacagtgaggcaggtgcggctggggaagactgagcccgggacagaggccggtgcccaccctgggccagaggaagcagcacagtgtccccggtgctgccccgggggagccgcccagccagtcgctgctgttcccagagcaacacctaggggaaagatggggccttggtctccagtgtttcagggtcctgctccctctacttctgcctgaggtcttgggaactgccaagcaggcccctttcctagagagattccaggataaacctagacctgctgtccagtggggctctggcctttgactctctaagccccctgtcccctgcagccccctgacaggtttgcaccccagactgaccacccattccaccagctccccgggcccttggggctccaaagccaggaaccaggggaggggcgctggatcttgtgctgaccaggatgtcctcctgtcctggactatgtaactgttcaagaacatgtgtgtggcctgtcatcatgtgttatggagtaaattatgttccccaccctcaaatttatatgttgaagtcccaacccccagtacctctaaacatgaccttattcagagatagggtctttacaaacagaagtaatcaaattaaaatgaggtcgttagggtgggccttaacccagtatgactattgtccttataggaagaggaaatctgaacaggcattcacagagggaaaccacatgaagccacaggaagaagatgaccatccacaagccaaggagagagaccgggaacagcccctgccctcacactcacagcccccagaaggaaccaactccaccaacacctcgattttgacttccagcctccagaactgtgagatggtaaatgcctgctgtttaaggcgcccagcctgtatcccaacagctccggcaagctaatgcactgggtcttgattcccacagtgagagcattctgctggacacgctggagcctggctccatcccacctctggccctagccacctttctggatagaggggagacataccagggcaggactatgtgtggctccaggaaaggacagactccttcctggaaaagggacatgcttcacctgagactggcaagctgttgtgtgtatgtgtgtgtatgggtgtgtgagtgtgcatgtgtgtgtgtgcctacaccttagtgtggatccagcacccaggatcttatagggcaaccatgggtcctagagctgcctgttgcactgatgtcgtatctccctcccttccccatcttatgccaggccccagagtcttctgaggacactttctgaggggcaggtggggactgccatacctgagggtgctgctggagaggagcggggcctctggcctcaggctgcccatggcccagctccctgtgctccaggccatcgtccaccacctggcccggtcccccgccatctgtctccaggtcttcagccgagggtatctgccgcagccggggcttctcactcggcttggctgacctctggggaggggagaacctggctgagaagccatggtggagcgaggggcatggggtgggaggtggtgggctgggccaggcagccagtcatcttgctaggactccagctgccatgcagctctgggccccaagaagccacatccccctcttttgccctccagttccctgccctttctaagtacccctcttcttttggcccctaagtccccagttaaacactccctcaatacctccactgcccaattcctctcaccttgatcacctggacgtgagttttgagctgctccaggcggggctgcatggggcccggcggtgggggagcggtggcactggggggcaggggctctgagcgagtccggctcagtggccagtggaggcctgacccagagagccgctcggtggtcattaaggactgggcaaagtggaagggcaagggcccaagcccgggcactggaaagaatcggggggtggaataaggagggaaccacagggagcaatggaaggaagcgagggtatagggtggggggccagggtgcagcagggcaatgcgcaggacagggggacagagatggggaggaaggatgggtccatcccaagcttggctcttagcagggtgcagggacccagccccttccctgaagaagcagcagactcaccagtcagcagcggggcatgagagcctgaggggtccaggaggagaatgggctgcaggcgagagggcaaggtgcccccagcctcgggctccaagccatggggcaggaagaggggagtgtgggggctccccaggattggcccccgagggcccagagtcggatgggtcctgcggtcactgtcagcctgggggagaggcgggagaagtcacggggaagaagattccagcagagaacaatgaagatgatggggtgaggcagcaagaaaagggagtgaaagaagctgggggggcttggagtgggggtgggcaccccagccactcaccctggcaggggcgggcagccccagagtgattgcgggcagcaaggacactgtcggcaaggcgaacggggccacagaagtctcctgcagccgcagccgctggcccaagagcgcctgccatagggagcagggcgagggtcaccggtcccagacctctaccccggcgcaccttccccagaacacccaggaggctctggcaggggctgcccagaccctgcagccccagcccaggtagggccgcctgctggaagaaggctgagcctcagaactgccccaggagagcccagtctcggcaaggccttacctccgagcccaggatgggattggggccgtgctcgctgtcattgggggagctgcaccctgatgcgggcgtgctgctactacttggggaggagtctgagggttggggagagagggaagtgcagtcagaggccagggtgggcaggagggtacagccaggccgcctggtgcaggagacccgggagcacccccttccttaacgagcacctttgcttcctgctttctttttttttttttttgagacagagtcttgctctgttgcccaggctggagtgcaatggcacgatcccggctcactgcaacctccacctcctgggttcaagcgattctcctggctcagcctcccaagtagctgggactacaggcatgcaccaccgtgcctggctaatttttgtatttttagtagagacagggtttcaccatattgtccaggctggtctcaaactcctaacctcaggtgattgacctgcctcagcctcccaaagtgctgagattataggcgtgaaccaccgcgcccggcctcctgctttcttcccatcagagcaggaagaagacaggccacctttggcctacagcacctttgcataattttttgaagggtgcccccttttctgggagatgtcaccttagctaacagagcagggactgggtttcagccccaactcccccgcttcggcaagtgtgtgggacacccccatgcaaccacgcatggcagtcctaaggaggggacccctgtctaggtggggcctgacccaaagggacaagaccagccaggtttgaggatggcaaccgcactggctcagccggccctcacctccgagggtctctgcgggccgccgccggaggctggggggcgcactctcctttcggagcagtggattcttcctccgctccagggacttcttgggcttatagcgcagcttcaggttgggctcagagactgcagggagcaccagcgtcactcaggcccccaccacccttcttttttccaccctttaacccctcagtcccagtcatctctatcggtcaaggaaagagaaggcagaactagaaagaagatcctagcctaccgatgatctcctggcccagcccagcccgcccacccctgcacactcctcccccatgtccgaggcccttcccccttcctttgcctgaaaggtccgcctgtttgttcagctcacctgtcttgcgcagagggaagtgctctggggggtcactgggcaggctgggaacaggaggcaaaaagctgctgagcatggagcgggtggctccttccgtctccaggggctccagggttctacagaacgagtgccaaggctgcttcagaggtgtggggacactgcacgggcactgccctgagcacgggccctgggacctgagggggaggctgcagcgggcagggctgggcaatgtggggctggtaggaatggggaccatctccaggtggcagcagtgggccgcctgtccgctccagcagctatagtgcagagctctgacctaggcatagaagccaggtgcttggtgcgtgggtgaagagcccactgggggctctgtcacctgcactaggaacctgctctgggaaccaggacatttttgcgctcagggaaaatataaagagagaaggggctcatgtgcaagaaaaaagccagtagggtgtgtgtgtgtgtgtgtgtgtgtgtgtgtgtgtgtgtgtgagaagggctcaggtggggtggggagaatttaaagagaggagggcaggtatcagttgagagaggggctcgggggcattatgtttagaggaagggtaaggactggttgtggcaactggggaggaaggaggcaagtgtgtgtgctcatggctaacacgggggcgggggtggagggtgcatgtggggacaggagggcaggtgaggagggtgttacctgtagggaatgccggggctgttgggatggactgttctttctagggccgcctgctgttttttcagaatcacctccgctagcttctgcttgaccacgctgctggctacagcacctgtaggggcagagtcaggagggggctggaggtgggtggacaggcggcctcgtggcactacctggccactgccctgtccccatcctcagtaggaggcgtcccagggactccctaggcaagagccaagcccgaggccctacccctccctagagcctccagacaccaccccccacccccacatcccccacacattcacaggcagagcccaggcaagcagagggaaagcctcggctcaggcccagctggctgcggccctcccacctcacccctcacaagccacacaggcagccgcaggcacctggctggtggggctgggctgggctggggtggccacctccttacttcgcttgctcttgtccttgtggagaagctgccgcagctcttgttcctggggtcccacctgcaactcgggcatcggcgtgtccatggagagctgtgggcagggccggcagcccagaaagggacaaggagttgaggactgagactggtgtctagggatgctgaaggcggggaggctggggaccaagctcaaggtggccccacatgcagggagctccatctttaccctcatgggctccaccgagcgctgctgctgcaggcctgctaggaagaggtggtggtgcaggcgctggggacgctgcagggccagcaatgtgggctctggtgggggctccactgggggccgctggcccacccgcaggtccatgggctgcggctgagggcctggtgtgtctgcacagggcctggggcagcctagggacagagagagggagcagggtaaactggaaagtttgtcctcgggggcatgatacagcctgatcccccctcagcctccctcaggctcacttgacaatggcaaaacactctcatgggggtttttcctcacttaatcctgtcgtggtcctgcaaggtaggtattatcaattccattttactcgtgagaaaaaagtcacatgaactgtgcacagtaacactgtatcactggtggtgtttgaacggagtcttccgactccaccacagtgctcctccactaaacatgctcctccctgggccgggggctgagggctacagtgatctccgatgggctgcagatcctatggtaggacattcttggccctgccttctccctcccttcatccctccctggaatcagaggatttgcccagctgccctctaatgagttgggctcaaaggaagcaatcaggcaggcaaacaggcccactttgttctgcctccagccccaagcctcacaggccctctgggtcgccaccctcccatgctctatccccagtcatgagataaagtgatgcctcaagcctacagccagccctgaccggccacgttgggcctgcagaaccctgtgcccagggcaggttcctcagctcatagggcccatgtgtccttgggcctgctcctgggtgcctccatggcagctctgggcctggcatggtcaggatggcaggcacggctgcctcttctcaagtgtcctctgcacccacactaggagcaccctgccaaggctgtgggtgcaggggctatttataactggccaccagactagggtccatgccagcatagccagctggaccaggctgggctgagcagccagagaggctgagacactgggagacggagctgttgcagcgggcttatcctggagaaggggaagtgggtggggtaggagcaggccggccccatgggagggcacacaagtggagaagccttcctggagaggcctccttcagcaattccaacgctgggcatctcccagtggggcagccacagactgtcctcagggattggggctgaggagggctggaaaggcctgtggcaaagtaccagtccaggagtcagaaatcatagcctccaggcccaagctggccactcctaaccacaatctttacatctacagcacttgtgcatgagcagctacatcaagccactggccccggggggtagtcattactatcttgttatcctaaataaggaaaccgaggctcggaggtgaagggccctgtccaaagtcaccctgctaggggcagagctagcatgggttctggtcctaccaaggcaggtactccagtttcccaccaactttcaggaattcacctcccctcaaggggctttctcactaagcaaagaggggtttgcagtaggctgtcattaaagggcattcactctaacattccctgactgtgacatggacacaagacaggagcccagcaaggaggtgcccgccatgtcccccgaatatcaagaggcctggagggacagtgatggctgtgcacccagatgccgcccgcagtagaaaatgtatggctttgatgccccaccccttgttcacattgcctcccaagaaatccggattctcattcgggttgagtctgggtttcgaataccaaaacactcctgccccaggaaaggtttcagtccttccatgttctgtgtcctggcttcccggggtgactcccctgattatgcaagaggggcttgggggaaccaaggccagcgacctggacccaagaccagtggcttcagccacatacggactgtgagcagacccccagcaggggcccttcccctcacactctgcatggccactgcctccacagcagaagggaatacaggatgggctctgcctggagccctggaaatacttttcgaggtgctttagcatttgtgaggctccacaatctggtcctaacttggcttctctcaacttggtctgcatttgaacatgaaccctccaccttggccatcagcttccacctgtcacaaatccacatctcttctgttctctgaccttttgctcacaatgtccccctgcctgtgctgtcctcatccctacattctacttttccaaatcctactctttgctcaaagctcagctggagtcctccctcatccctggacccagccagcgcctagcatccctccctcttttggactccaatcacatggctgttccacaccaggattagtgctctgtgggcaggtaccatgtctgagttaagctccatagggcagggagttggtttcatgctttgtttattattcctagcacctggaatagtacctagcacatgacaggcactccacaaacatagaatcaatgaataaatcagtgtctctcctaaaatgtccaggaaagtaccctggcacagagacagaactcattaatgattcttgaacaaatggataaactcatgaatcagtgtcctctcattgggcactggtcacattattgcattctattttttttcgctttgtatttgtgtgtgcttcctccctaacctgcctgttagcttttcaacagccaggactgaagcaaggaggatacctgggttccatttctccctgctatatggaattattaggcatcaggctgtatatcttgcactcagtaggcccttggttgatactggctacactaaaggaagggcagaccgcgtctagtccagacctggccccatgggcatgtcctaaaccaaagcagcagcaggaagtccagtccttccccagggcagcctagcagcagaggaggctcgggccagcagagggaggaggcgcagacagtgagagaacacttcccctccagcagagcagtcctgcaagggctgccatgcccaccttgcagagccggtgtgaggaccgagtccacacacaagaacacaccttgcctggtgcctgacatggggtaggggtctcagtataaatattagcttcttactttccttcctgtttcactgctcccagcaaggacaagacgggcatcctgtgtttccttttcctgttgtgtttcctagcactgtgcccagccagcatccagagctgcctctcttaccccggctcctcgcccctccctggagccgccacctcctggctctctggcagatcagccagcgaccctgcttctctaacccctcagcttctcgcgttcttacagcctttccacccctcatcttccactccctaccatggactcccccgggtttgactcttacctgcgccagtggggctgcagtagtgggcacccgggctcacctgggtcccatctgtagagagagagacggagtgaaagagctgcagggaggggtgaggagagggagcaggaaggaaagaaggtcaagccaggcctgctccctgccactccaagcttgagcacgccaaagcctgggacctccaccagaagctaatcaaaacgagaagaccccaccccattcgactcctccagtccccctgctggtgaaaagggctcccagctccctcttcctcaagtcactcattctaaatgacttgaactcagactacagcaagaacctaaggaggcctcagctcacccagcagtgccctcagccctccctcctgtggtcagatacaatcttccctgggcagccaaaccaggctcccatcgcccgagggaaagaagaaggccaagaggtgaggtggggccagaggtgggagagcctggctggggggatggctggggggacaggaggagaaagggaggagcaggcctggagagagggaccctggcctgctcagagcctcccaggtgggagtgaaaggagcaggaggggacacagaggtttccagagtgggggagggactgggtcatggcccggaggtcaagtcagatctggtgggaactgtgaagtgataaggtcaggagtgcacagcccaaggaccccatagtgcagacccttttcctcccactgccccatcctatgtcctgctgcctgtttcctcagagaagggacctactcagcctctttcccagataatctgagatagaaatcttttcttttggaaatggctacctctctcaggctcctaagcccagcaagaaaacctatagtagggcccaagctggtcagcagcagaaagcccccaggggacatggaggccagctggggttggagaagacagagatgagtcctgaggccacctgtccaggacagacacctttccctcttgctgtccagttcagggtcaaggggacaggaggccaggagacccagaggctgcctggacggggtactgggtggacacagaagcgctctgctggccagacttggggcagaagggatattttttgagaaactgccggggtgctcctttgggtctgtgtctcagaggcagccacagttcctcttcagagccgagaaatgagaacttcctgcaggcaggcgctgctgggggagggggcagcctgggcacagggagactcccaccgactgcccctcaaaccagcccatgctttgggtaacaaagttcggtccgaaaatgctgctctacctatttaaattctgcccatcctctgaggtccagcccaagtccatctccttgggaggctctccctgacctctcccctcttccttttccacagcactcgctctgtgtctaccaccttgacacttcattcatcatgatctctgtggtgccctgtggaagccatgcccatctgcaccaaacacctcgcagggcacgtggcaggctctgttagtagctgacaaatcaaatacaatgactctctcctgacaacctgcctgagacacagcatgcatatttctcaaggtggtgggcctcagaggcaaactcccctccccacgacatggtaacccccaatcccaggccttcttagtacctcttctttcttctgcaggacctggtcctcccagaggtttctggactgggctccagggtgcactcccagagactgtgtcaggctgagtcccctgcctcctgggaattctgtcccacctccccagtccctacccaggggctggtcagcagcattcatgcttgggagcagagccaggttctctgtgccttgctcccctggtaaccacagattccggacaccatgcactctctggataggagaaaaattaatgaccctgaattctgtggtgtgggctaccaggccccaaagggatgttttgtggtgataatccataatataaggtctgtccagaaaagctgtgtgcatgtgtgcatgcgtgttggcaacggggctgcttccaatagcaattcctggaaaaagttctgcttttcccccgctccctggccccgtgctgagggccatcaagttcagaagagcgcagagcgacagagattaagacccaggaacagctctctttgtgtcctagagagaggaaaggtatctactggcaccccgtcagtagctgaactgaagccagagcatgaacatcctgcctcccagttctggcttgagtgtgggacctcttttcccatcactgcctctctccgagggctgttactactaatttggggtcagcctgaaaaaaaaaaaaaaaagagaagtaaatggacccaaggtaccaggaatactgtctagcacagggctctttgccaggttggagagctcttctttttggaatcctggctactccccttttctatcttctttggaggcaactgcagtcagacttaagaacagtttacttggcactggggcatgtgggcctaccaagtcaccttcttaaaccagaacacctgattttacccagaaacctatggagcccctgttccaataggtgcaccccagccctcagcaacctccagagtaaacacaaacacaattctaagcacctggaacaaactgacctccctactgctcctaccttattgcctcaggccccagtcttggtcctccctccccagcaggtatgactttgcctcctagatctgcaaaaggtggatgaaaacctgagccttgccgaccacctgctctcccaggagcttcatgtcttcagtgggacaaaaggcttccccaggagcactgccacctagaacgcccccctcccgatgcctccagtgtcttttcttaatttttttttttttttgaggtacggtcttgttctgatgcccaggctggagtgcagtgatgtgaacatggctcactgcagcgttgacctcctgggctcaggcaattctcctgcctcagcctccagagtagctgggactacagtatgcaccacgatgcctggctaaattttttttgttttgttttgttgtttttttttttgtagagacgaagtcttcccctgttgcccaggctgggctcctgggctcaagcgatcctccccgctcatcttcaaagtctttgttgaggctgttcccacctccctggactcttgattagcggaaaaggaagcagcagcaagaagacctaggccccagcagcaagaggaaagcaggcagtggcagaaggccatagtcctgggttcagagctgactcccttcacacccgaggttgctgtctctggttctccttccctgacataggctggaaaaagcttgagtctccatggggctggcagagaagatgaaggctggtggtgaaatggcttcaggaagatccaagaacaaataaacaggagaaagaacactgtggttgccaggcctccctgacacagagtgggggctgagcacagaggatctgctcctcttccaggctttagagatcgttcagaccaacactctcatttgacagaggagcaaagagaaagaaggggctaggtcacagccacccagccagccagtggtccagccaggccaggccagaccagtacaggggaaacccaaaggtcaaccccaaatgcaggtactacttccctgggaagtcactgatctaggggttgaaaagatggaaatatgagtgaaacctggttctcactttcaaggagtttagaatacagcctgcagccttaaacatatttgaacaagtacaatacttgcagatactaaaaaaaattcagagagcccaaaagttgttaggataagtttctcattcatcccagactccctagaacttccctggaagccgccctttctaacagcttcttgtgtctcccttccagaaattctctatactgctcattgattggcactgaatgcttcttgctcagatttatccagaacccagcagggagctgagagtgggctggaagcccctgccacatgaagtctggcaggccacaaactgtgagggaattgaaggtctaaagcacacaggacattggctttgcggtcagatgggcctgggtttaagccccgactccctcggtgactggcaaagcaagccagaaacacaatttaacctgcttaagctgccccacctgtaatcaggagataagaatacctacttcaggctgggcgaggtggctcacgcctataatcccagaactttggggaagttctgccctggccaaggcgggcagattacttgaggtcaggagttcgagaccagcttggccgacatggtgaaatcccatctctaacaaaaatacaaaaattagtcaggcatggtggcggggagcatgtagtccagctacttgggaggctgaggcacaagaatcgcttgaacccaggaggcggaggctgcagtgagctgagattgcaccactgcactccagcctgggcgacagagcaagactccgtctcaaaaacaaaaacaaaaacaaacaaaaagaatacctacttcaaagaggtcacctgagattagcaatgctgtctgtgatgcacccagcacatggtgggtgctcccttgtggtagcgagtattagtttgcctcctgtacttgtctgcagcctccttcctggcattagcgtttcagtgtctgctcccaactctcctccctcctctaccacagaccattttctcctgaatgcatgcccctgccccatctctctctctctctcttttttttttttgagatggagtctcgctctgtcacccaggctggagtgcagtggcacaatctcagctaactgcaaactctgcctcctggattcaagtgattctcctccctcagcctcccaagtagctgggactacaggcataagccaccaagcccagctaatttttgtatttttagtagagacggtgttttgccatgttggccaggctggtctcgaacccctgtcctcaggtgatttgcctgcctcggcttcccaaagtgttaggattacaggcgtgagccaccgtgcccagccccctgccctatctcttatccccagcctctcccaactatgctctcttccctttctcttccacctgaacttttgtaagcgaacaccttattatgtgccaggagttgttctaagtaccctacatttgctaacttatctagtccacatgacaaacctatgaggtatttactgttttatccccattagataaatgagtacgctgaggcccagcagtattagataacttgtctgaggtcacagacaagtggcagaggttgagctgggacttgagcccaggcaattgggcttcagaatccacgctctcaaccaatacactccacccctcctccccagcattcccattcgccacaggccagccagcaaaggacacatgcaggacctagatgggcatgcagaaagatggaaaaaaaaaatcacacagccccacagagacccgtgccagcagcaatccccagccctgcgcaggtgagagggcagaagctatgtcatctttgggtgcccatgaagacaatctcaaagaatcatttggagcaactgttgactttgtagaaaccaagcaatgatttgggactgtgtgctggaaacagggggctggcaatgggttggggtcttagaggaccctcagctccaactcccctgctctcagtgccctgccatatcccttctctagaagctcccaagtccctctaggactctctcattagcgtcccaaagcaagctgcaccatttctctgtataggcagaggagccagctgcccatcagggcagaggctcagctgccaggtgagccagccgggatgtctgcctacccagacgaaggcctccatcagtccgaggcaagaggacagagaagctcctgcacaccaaacaggaggctggatgtaagggtggcaacagtgagcatgcctctttctccgccacctcagggcagctggggccctgaggcagctatttttagctcttgacacctgggtattttgcagccgcaggatgtccggtttggagtctctttctgggaatcccacatgcggctgttgtaaacagccccacgcagcagtggcctgagctgggagccagtgtcgcccccccaccccacctccacttctgctgtttgagatgaatcaaacaggaagcagatgtaaccatggcagcagcggcttgagctccctgggggtgggaaagcatcctccctggttctttgtcccccaccccagatccccagctccaccctgtggcctctcctcaaggatgaagacctggcagaacctgaggccggggagctgggccattctgagttgcgtatggctgtcggtttctgggtctggcactctctggagacccttgctgtcctctgacagagaaaaacaggggtcctcccagccctgtccaactcccgggacctctcgggccaccactcagccttccctgcaagtccattgtgaaggggagggcatagctacttcctgcggtggcaggcctggagggcctgcatctacttcctattacccatggccttcagcttatagcctggcctgcccctgcactgctctgcccacttagggaattcctgagccagtgggctcccctagtccacactaccctaagatttctcagttccaaaaagccctcaaagacataagttccacattcatcctcactcctctgctccagtatctccagtccctgagataggaagttcaccatgatgtctaactaccatctttcctatcataagcaaaacatcctgagcaggcaagatttgaggccctatctgtaacatggggataagtcggccagtttctgccttcatctctccccttcgcctttacccctctggtgccccacttagaccagttgctcctttagcagccagtgtgagccagtctttctcaagggccagtgtttgccccaacaggaagcacagtcaccgccccaggctgcctctaggggcggctccttctcccctctgaggtgtcacactcattcccttgctctccttgtcaccccagctcctgggccctcctcatgcagaccctgcccctctgtgtaccctactcctgctttgcccactggttctgcctctcccagctgcaggccgagcgagatgtgccttcctcactcttctcacctgtgccacccacaaggccacgcagcccattcccaagactgccagggaaatgtttaagttacaatatcaacaatagttatattattttaattaattaataatattaataatgatcaacaatcatgtgttaatgcttactgtgtgctggctattatcctaggcatttttggcggggggagggcaacatcctcccactaagcgatttttatttatttatttattttgagatggagtcccactctgtcacccaggctggagtacagtggcacgatcttggctcacttcaacctctgcctcccgggttcaagtgattctcctgcctcagcctcctaagtagctgggattacaggcgtgcgccaacatgcctggctaatttttgtatatttagtagagacggggtttcaccctgttgattagtctggtctcgaactcccagcctcaagtgatccgcccacctctgcctcccaaagtactgggattacaggcctgagccaccacaccaggcccccactaaacattttaattgtactattgcaagtagtcctcacaactctgtaaggcagatactgtttttttgtttgtttgttttgttttgtttttgagacagaatttcactctgtcacccagactggagtgcagtggcacaatctcagctgactgcaacctctgcctcccggattcaagtgattctcctgcctcagcctcccaagtagctgggattacaggtgcaagccaccatgcccagctaatttttgtattttggtagagacggtgtttcactatgttggccaggctggtctcaaactcctgaactcactgaatccacccaccctggcctcccaaagtgctgggattacaggcgtgaaccactgcgcccggcctatatactgttattattctcattttgcaaatgaggaaactaaggctaagagaggttcagaaacttgctgaggtcacacagatggtatgtggagctgctgggactccagaacctaagcttagcatcggtacactggcgtggactgcttactcagcctgcctcctagtagtggctgaggtgagaccaccaaggggacaaggggatgcaagacacagtgaggccctagggtatgctcccaatgccagcctgttcccacaaagtgtgctgtgttccacccctgccatcctcaattcctttttcatcttctatttcccttcctttttaaatgtacattttaccattttaaagtgtaccatttaaacactttacagtgtttcctgttagctgcctccagcagggtataactaaacaagcaaacctcccagggctgccacagaggatcaaacgctgcgtgagctctctggaaactgtcaagccctctacaaaatgcgggttgcataaccagagcaagtcaccctcagagtgggtactcgggggtaaattctcttgggaggaaaaggtctctctctctctctctctctctctctctctctctctctctctatctctatctctgtctctcactcacgggcaggccttgggcaggtggaagcgctggaagcacccacaagtgcaaaagggagcacctaccttcagggccactttctggggactaggaacacagccgcacggctatcagcatccctggatctggggcagaggaaggcagaagccacaatggagaccctggtctgcactcagtaagaaccaggcaaaccgaactgaggcatctcggatgtgaatagccacaagctgtgaatcctgacactcacagggatgccacattaacattaatgacagtaaataccctagaggtcccatcccagtggtgccctagaatccccctccttttgcctattactttggaagacagcagaagtctagtgggcagattctccacgtgacctgattcccttttgcagccaggctgcccttgagacttggttgaaggggtttttccagatcacaaatccagctagggtgcttacactgccttcaggtcactcaacagacagatggcatggtcctgggtactgatttggacaaaccagctgtaaggacaatttctggccaactgggaattccgttaagatgaaaatttactgtaatggaaggtggaaatcactgactgaaaaaacagtatatgcagagtaatctcattttcataaaaattacaacacataaagacacatacggaaatggaaagatgtgcagtgatctctgactgatgcgtctgtgatgttttttattttttagtttttgctggtctgtcctgtctgagtatccacaatgcacatggactgcctctgtaataattacgcagcatatatacgtacatagacacagcccatggtagcaaagtcaaagtgtgacctcgggctcccgtgagcattagtccacagggttttcaccgcccccgggtcttcttggaccatatatcctctgaggttccgtgttatctacaacctagcgtcctctgcccctcctgagtctcgccaagggcctataacacagagctgggcacaaagtcaggacttacttaatgaatgccttctggctgaataatgatcatttcctgaaagaaatgcctcatgcctcttccagagccgctgtgctgggaatactcactgctgacatcactgacctgcccacccctcctctgttcttcataagagcaacaagggaagggctaaaataaagttcaccccagcagatgctggcaaggtactccacatcagggccatcaggggcagccccatcccagaccctccccaagctggcacagcagcccctctccagggccagctggcttcaaggccctggggtccctcctcgccctgcctcactgggagaggctgggagagggagtgaacaagagaagcaggggtccaccctatgacttctggctacagctctctggctgttccaggccgcgatgggtggaggaatctggaacagggatttggcctggttttttctgtgaactggggctaggcccagtttctgttcttcgtgtctgcaacattccctatccctgaccttcaaaaaatatgaacaataacattaataatgatgatgaatattcagtgagccctgacttcataccaggcacagagctaactttatttacattatctcctttaatcttcatagcaactccataaagttgaaactgtaattattttcacattacagatgaagaagtggaggcacagagcaaaatgtgcccataatcacacttgcaggagaaaccgagactcagccaaggccatcccattcctccctctgcgtccttacaggaagctctcctgccaggctttgccatatatacagtagggtctaaggcgataattaacatctgtagagtgctttaagcactaagtggggcacagagaaaagccccacttgaaactaggaaatcgagtctcagagccatcagcatccttactcaagatcccacacctttcgactaagattcaaacccagatctctggcgtcagaatggcacatttcttccctattatcacacgatgcccctggctcactctcaaggcggccccggctgcctggaagggagagtcacacctccttcagcgctggaatctggggggcgaggcctgcgctcagcccctcgcccggtgggggtggggtgctgcgccagcacctcctcagcgtctccgccgtgactcactcccgggacccaggggaagcacagccctgcgctgcgggcaaacatcgtccgccgcccgccccgcctccagctccccgcctccacatttgctaaccgaaacaaggctgctgctatttttaaccctccagctcccccttgcctggggctccccccttcacctccccaccccccgccccagccgggtgccaccagcctgtcattctgagagcagttctataacctgaacgcgcctgggagggcgcagcggacgtcccggacgtgcaggtttgtggggcaagcaaaacaagacggttacagcccaatcgccgaattcccccaccccagactctttccgaacctgtcactcccagactgccctgctcctcctgccattctgggggttggggtagaggggaatgggacttctgggctggggtcacctcaggagccagagctaggctccttggaatgggtcctgcagggaggaagctgaactgaaggggattggagttcccctacggatccccagggtgagaggctgaccctataggcccaaagcttctgaccaccagggtttacaatccctgcaggcaagatggaggaaaaaggaagtggtgcggagacagggtggggatggtgagcttagcccagggccttcctgacgaggagaagtcccctccccatcctgctgtgggggctgtggagcttgggcgggaaggcctgggagtcgggaagagcactgagcagcctccagagaggcccagggtggaaggcagccttggcagtgtgcagggggaaaagcggacctggagtcagggctcctttgacactcaataatctaaggcaagggccaggcaacaccttcctgcagcctgaagctctgggtccccagaaaaaccttcctgggagaagaggttggaggtgagaggggctgaggcctgctggcctagagccggaacctgacacccaagttgctgatgtgaaagttaacctcctgagaggggtgaagcgtagagctgcaggtggaccagacaggggcatttcctcccagctgatgtagagcccgtgtcttgaatcagccccatctggccctctggtctcagagtctcccccagtttgggcagcagattccaagggcccaggagagactctggagagcccagccaaagggccatctgggctcaggtttttcccgtgtgcctctcctgtcccagcctccatcctcccttgagccctgtcctctctggtcccaaccccagccttcctttctggttctgtcctctcttccagggcccaggtcccctctaggccttgaccccctctctttggtgattcctgagccaagtaaagtaaagtggccacagaggcagcaggctagaccagagggaagggacttggcacagtagttccccaactggggagatggcggagaagggaaggaggtgggaggaaggtgaaacaggagagctcctggggagatgctgcctccttctcaacattcagtatggccacagggccctggactcagccccatggaagaaaaagggtgctccccaagcaagggagtggctttgatcttggccttgtgcagctcccccttctgctctcccctctgccaacctttggggctgcttaaggggaggagactgccatcttccatgccaagtgagaggctggcaattcagctccaacccttagccattggtcagcccagggcctccacctgcatccagggagttcacaagcacggctccagaggctctgatggctcacttccaacctggggaggtgggagacggcatcaatgtcaccttcttaggcagtcctcccctggccaccctatcaaaggaagtcccaccttgttattctttattgccatgcccagttcatttccttcttagggcttatcacagtgtgtaactagtcacacatactcattcctttacttgcctacttgttctgtttgtcttctccacgagagtggaagttccctgaggtcagatgttgtgcctgtgtgttcactgcatatctgtacccagtgcctagaacattgcaaggctcagctaggatccagtgaatggatgaattgctgagtgactggctcagcaacatggttccctggttgccaacattgacctttagggatgacactcaacagttccaggatttctccaaaaaggaggcagcagaatgtagcaagaagaacaaggtcagaaaacaagaaagccaggaccccagaggaaagatcagccccaattagcaccagcccaatcgggtccacgtcatcacaaagtgtagttatgagcacacatgcacacacacacacagggggtacatgggtgagcacaaagtcctggacaggtcttagaagccttgagttttctcttggttcttcctcttaatggccctgtcaccttagagaaactacataccttctgtgggtctatttcctcaaaagaaaaaatgaagaggttgacccagggcagtggtcctcaaacacagccttgccccaggatcacctgaagcacctgttaaaatctggattcccaggccccacccctcagattctgactagtcaatctggaatgggcctgatgatctgaatgtttttaattttgagacagtctcactctattgcccaggctggagtgaggtggcgcaatctcggctcactgcaacctccacctcctgggctcaagcaattcttctgcctcagcctcccaaatagctgggactacaggcctgcgccaccatgcctggctaaatttgtatttttagtagagatggggttttgccctgttagccaggctcgtctcgaactcctgccttcaagtgatctgcctgtttcagcctcccaaagccaccgcgtccagccaggatttttttttttttttttttttacagagtcttgctgtcacccaggctggagtgcaatggcgtgatcttggctcaccgcaacctctgcctcccgggtttaagcaattctcctgcctcagcctcccgagtagctgggattacaggcgcgcacgccacacctggctaattttttgtatttttagtagagacagggtttcgccgcattggccaggctggtcttgaactcctgacctcaggtgatccacctgcctcggcctcccaaagtgctgggattacaggcgtaagtcaccgcgcccggcccaggatctttatctttaacacattccccaggtgactctgaagcaaatggtccaggaacccgcatttgagaatcccaaatgagatggtgttttacaagccagcatctggacttctattaaaaagccactcctgcccagatatatacccccaaaaaacatgtccatacatatggacatgtttaccccacacagggccataacctgaaaaggtgtgcaccatacagatgatgcacatctgtcttttatgtgtgcatattcccaaaacacccaacacagaaccaccacatagatcacaaattgcccggaaccaccacatcagcatacacagggtctggggggaggggtacacacacagatacccaccacgcacccagtgtgtgctcacacacatctcatgcagacccacactaaacagacgctgtcctgaatttattttgcctctgggaactggtccaggaccaaaggagctatgctctgctgatgaaaacatccctcccacctctgccacccccacccctgccccttgccccaggcagcatgctacccacctctcccttgtaggaggagggagactggaggagggcagtggggatgggttgggaggaaacaagaggctaggccagcgactcaagttgctcagggcccttccgggcgtccagctcccctctttccctctcccttccccccagaagacgccaaagggccttcccccagcccgcgagtccatgctcactcaggccactcgcctagattcccaggcccctgatcctagggagccaaaagggttagggaggtggctagatctggggactcctcctaatactcaggcctctaaggaaagggctgtctgggggcaccttcctgtagccctaaggcctggggcctccagggaaggttaccacagaaacagggggaaaatattacaaggaaacacaatacccggcagggtcacctgctgaccgggcttcctgctgtgttgcccacccccagctcactgctctcacagcctccttctccagccttggcctgggcctcctcaccaaggctctccttcctgcctccccagagctgggagaagcagtcttaagcagaaactctgcccctccgtggttccaaacaacaacatcgaggatggcccagagctgagccccccactcctaatccttaccaacccctcctcaccatcaccacaggaaatcaaagcttcctgccccaaaggaagtgccccatctagtgaacaaatccaacacacacaaatgcacagtcctgggagcctccgggaggacagatgccctcccgctagccccagactttattcaggccctgcttccagcaataccccacaccccactggaggcctcagtccgaagtctaactgagggcaggccagggagagccaagctgtggagggtgggccagcagaatgggcactggcagagtgagaaggcctggttctggccccctccgcctgccattccctggctgtgtgaccctgggccttgcattagctcaccttctctcaggcccctgccgacttcaaaattaccagcccttaatgaaaggccaggagaaagaaggcaaagaggagatggggttccacaggcttctgtcttccaagtccttgggcatgcttgcccacagctaccagagggtccccactccctaccccatcacacatgagtttctctcttgctcaagggttttatatcagaattgagaaagttccagcttccatgccaagaggccaccaaggactaaagctgaggtccattatccctaagcaaactggagggggtggataatagcacagtaccttcattctcctctccatagtcaacctcttctgctctgctctgagaagtgtgcttggaattttctccccattttactgatggggaaactgaacttcagtgtcaaagtggagtgaacagcttagacatgcaaacttccctgccccaaaacccactgtaagacccggtggccacagagacacccgccgaataagggacacagaggcctctggagaacactgcaccaggaccattccaggtgcaacatcaggaggcagctctgagcttgcctctgagcctggccctgctgggcaaggagggacatcaggggactaaaggcagaggaccagtcccaataggtccaagacctggttccagtctaggttcactgggctgggtaccactcactgggactactctgtgccttagtttccctcagaaatgactgcagagaagaagaaaatgacttaataacccatgggtagcggcagcctagcagcctatggagtcctgggagggggaaagggccgccaaagcgtctcattggagggcagggacctgagtcacagtctcctgccagccctatagctgaataggggtcctgaggaaggtcccacaggtccagatgcaagtccagggaacaggctgagaagttgatcttgagctcccagcagggccgctgagggccgatgccccattctcaccctagaaagcggcaggcagagctgggcctcaggcagatgttgcctaggggagtgggcagggagcgttggcagcgagacagccagtgtccagatgcagggggaggcctttgggtgcgcaagacagccagcggggagaaggagtgaggagcagccgtggctggggaggtcagacccaaacgggcagccacagcgggaagcaatgggggtggggcactgggtggcctgcgggccccagagggctctctcctggcccacaggcctagaaactctggtcgtgggaacccagcccatccgccaaatttgccgcctgctctcacactccccaacaccaacagaccccaggcctggggggtgcacatcctgtcccccacccctcacacagcctgcggcgccccgcttcccgcgccgctgccggcattgacctccacagctcaccagggcacaggtgtctcttcaccctgatgggtgagcaaggatggggggcaatgctcagagaaacctcccagccagagacccctccaagggacctctttccccgccgaaggatctgagtagggccctgcccggctccacgggatgggggcgctgatgtccagccccacaaagcccagccccaactcagtgggtcctgccctttgccctcgcgcttccaaaccttccgccccggagcaccgccccctcgccgggccaccgcggccgtccctccctccccggtccctcggctcgtcctccccgggaacaggggtgatgggacgtggggcccgcacaccggcggccggggcctccaactccctcccttgggcctgtagctgccccggggcgggcggatgtgggcgccccgcgggaggcccgagccctccggcccccggaaccagctccgacccggagcctgccagagccccgcggagccgggcgggacaggcgcggtcggggggcgcaagccgggctgggcccgcggggctggcgggagcccgagccggagccggagccggagccggggccagggccggaggccgagcctgggcgggcgacgctgggtgccgcgcgcagggcggggcggggggcggccgcccagtactcaccagcgccggggctgtgcatccaggggccggggccctcagagcggggggctcatggcggggcggggggctggggcgccggcctcacatccccccagtcgccggaggctgcagagcgactgtgagacggcgagaggaagggagggggccgggagggggagggccctggcagcccggccggccgggtaggatgacaatggaaggaaatgctttatctgagtctgagagcgggccaagggggaggggagggagggggcaggcgctcgcggccctgggacacaccaccccggcagacactgcaccgcgcggcgcacaggcgggccgcagacaccgcgcgcggccagatcgcggcggggcgcggcgcactgccggggaggcagcgccgaacccggaacgccggccgcggctccgagccccagccgccgcgaggcgctccgagccgtgcacaattcccggaaacccagctacctgggcgcacgcaccctcgcatacacaacgtacacgagcacgcatccatgtttacaaggggcagaatcatttacacagcacacactggggcttcggggtggacccccgtgcacacactacatacccgtacagcccacaagcacgcagccacacgcgggcacagtgggacacgcgtggtgtcccatgtcccatacaaggaatcccagacggacaccccccaccacacacacacacacataagcacgacttgcctcaggaaagttccaggatctgatttgaatcactgcccagccctcccccactggcacccccacacacacaccatgcctgctgaggggaacggaagggtccagcctgttcctattaaaagaaaaagggtgtgggggtggtgcagattttgaaagttttctttttttaaagaaatttctcaagggacttccttccctcctctcctcttcctctcttcctcccattcctctccctccacaacccccctctttccccctcccggtccctatgagtcaaacttcagcaatgtgcccagtgtcccccagtgcattacagcggatcacagaaatgttccagtctgtgagtcggaatgcagccgcctccagccctccctcagctaataaactcagctcagggccggctttaggcagtggccctccctgcctctccctccgcttttagctggagagaaggtcagattcaggggtcaggggctaaggacctcgccattgtgcttcctgggctagccggtcagccgtgtctgcctccagcaatctggagctgctcctaggaaggggagaggtccaccacgcaggaacactgggctctctgcagcgtgaggcgccaccattgtaaaccaaggagcagcttcccctgaccccattctatctcccgcaatcctaagaaaccccaagaatccagagaaggaaaaattgaggcagccccagaggtggagtcatgtctgattggaagcaagagcccacagtggcctaggagggcttggccatgctggcggtgaacttcaaaccatagattctattcccttccctcaggcacagctcgggactcactatctgttgctaccggcatattcagcgtgggacttcttacttcagcccctttccttgtcccagttctccttcggcaggcagatccaacccctctgcgcttgttaacttaccctcccaaaagcctttcctggcattcaagtcctcctacaacctggcaccacactccatac

SEQ ID NO: 251 - DNA, 8727 bp, Homo sapiens
  source 1..8727: mol_type = genomic DNA
tctcaaacgtttcagatgagaaaaactcagggatggtgacttgacggaagttgcattaactaacaacgctcacatgctattctccggacttggaatgtccaagcaccctgggcttgctgacacccactcacttttcaaacatcaattcttgggaagcttttcccttccttaatgtcccccagataggtgatgtccccttgttacaggttttagaccattatgtacatctccttcctagcacatacatatattaaaatttgtttcctgtctccatgaggagagggactacatctgtccttttcactgctggcacacagtagttgctcaacaaaaatgtgcgaagtgaaactcgaacaggcggtcaggctcacagtccacgcctcttcctactgtggtcccgctgtgtttggacaaatagttccaaattataaactttaaaacctgagaagtctcaatagaaaaagcagggaagtctttccatttccatgattaatggaggaccttagcagaaacggctcaccgcgaggtgtgacgaccgcaggagggcgtcaatcaagaaaatgcccccttgccccggaggcgagtggagccgcacagagccgaggccatacgggccagcagtacggactgcttcaatagaaaacacgtgcaaaaccagagagccagactgcgcacagctgcgaccctcaagagccagcagaaaagacacggagcggcccccactggattgaagactgcacagcctctgcccggcgctgtaggacccgggcctccccttgattgctgctcgcagcggcttctgccagcatcctcgcggaagtggcttgagtccgaggcctccaaatgaaaccaggtggagcggccaagagtccgcagcacctgaactccagccatccgaatcccgccgggccgcagctaagggccgccgagcagccctaggaacccagggcactgtcccgctctgagctcgggaaacggccggtgtgacagccagcgccactgttaatccagggagcgcacccaccgaggaggcgtcttaggccagcggcctctgctcccgccgagtcccgctgctccccgcctggaaacagctgctgccaccccgggcccaggcctggacggcgcccccgaatttcggcagaggtgcctcggggccgcggacagggccgctggagcccgcactccagaaggcggtcttcctcgcgcctcccccgacggacgcggcccagggcttccctcgagggcgtcctcggccggggtgcctggagtccccaggggcgacagccgcggcggggcaccagggcgccagttccccggagcctggtagcaagcgcgtcccgggggcggggagcttggccggcggggcgggccggggtgggggcgggcggctgctcttggggccccgcgccattggccgcagggcccggcggcaggaaggggccagcgagcgcggccccaccccgcggccggcggagcctatcgccgggagcgcggagcgcggataaatgtagcgccgcggcgcgggccagcagctctgcgaggggccggagcgcggcggagccatgcagtacccgcaccccgggccggcggcgggcgccgtgggggtgccgctgtacgcgcccacgccgctgctgcaacccgcacacccgacgcccttttacatcgaggacatcctgggccgcgggcccgccgcgcccacgcccgcccccacgctgccgtcccccaactcctccttcaccagcctcgtgtccccctaccggaccccggtgtacgagcccacgccgatccatccagccttctcgcaccactccgccgccgcgctggccgctgcctacggacccggcggcttcgggggccctctgtaccccttcccgcggacggtgaacgactacacgcacgccctgctccgccacgaccccctgggtaaggcggccgggcgagggtgggggcgaggaagcgccacccggcaggtggcagcgcccgggaggccgagggggcgaagggggcaggcggtagacggctgtggcaaaagcgatggaaaagcagctgtcgggcacgcgcggggacgggaggcgcgcggccggggctgaccgcaccgtgactcagattggttttcctgcaccttgcaggcgtcggggcgcgcgggccggcggtagacctcgcggcgagggcagccgtggaccgcgcgtgttacccggggtggggctcccttagcgggagggacggggaaaggggcgtcgaggcgcccctggccggcccccgtggggcagggatcgcagccgggcccgggtggctacggggctggacctggttcaacaggcttgtgcagtgaaagagcctgaccctttccgttcatacaggaaatcttgagttctcgataggagtaaatctggtttcagaagctgttaagtgttttcctggctgcatgaagcagacccttcccccggagtagtgcacgctgctgattattttatcgacatcctcaatacagacaaattcaggaaacactcgacttctgatagccgggatccgtttttctgatattgttcatttcctctgtgtgggatgtgactttatggcagctaaaataaccagttgcttcctattttttttcgaggctgttttgcaccagtctgaagcctgacgcaagcaaaatctcgaaaaaacaatgctagctttcaaagcgttgaggtgcaggcctgcagacggacggacggaccgaccgacactactttgggagtaggaagcagcagctcctggtcgccagttaggaagggaagcagggacacatagggcatatattccagaacttcggggcttgtcccctcaatgtgcggcctaacaaataagccgcccgtggtccgcgctgtgggtgacccttggcgccttcgaggtctggagccctagggtaaataaggaaacggggcgcctctagagttttaaatgaactctgttattggaagcttcagtagggaccctgaaaacaattaacgtcttaattagcattttaatgtctccattattacggcgcgggctctagctcagccctttaccttaccttctcaccgttaacaggggagggggattgtatttttagttcatctttttatgtttttgagttgttatcctgtctgtctgattccagcctcgagggtttgatgatgcggcccgagcctggctgtggtcgcctgtcggggctggagcgggaccctcagccgggccgggcctgggggctaacgttttcacagtgcgccctgagtttccttgggttactgctgggaccgcgcaggaggaagcaaagagtttttcgagctagaccaacaggaaacacattgacggaaatgttgccatagcccatggggtggctttaactggccgcccccgcgggctgggtgtgaaatcagaggaggccgcggctcccccggccaggattggaggctcctcgcgcaacctaatgcgggtgtccgggcccgagcgcttcccgcgcagccaggccttgtcggtgcagcagccccgctcctccccaacacgcacacacccggtgttcgcaagtgcggctcaccaagggagatccaagggggcaaaaagttatgtataaatccgagagccactggggaaagagggtcgtggtattgtaagcccagccggtagtgcccattctttttggggttaaaggtatgtctggatttagttctaggtgtgacggctgtgtgtctgtctgtgtgtgtacaaggctgtgtgcatctgcggtgtcagtgtgtgactttgggtatgtttgtgtgtcggtgggaacgtgttaggtccacgtgccggtgggtgtatgtgaatgtgtctggttgggtggcctcctggcctacctttgtcatccctggggcccgacagctctggggtctggccaggccgctccagggcagtgggtgagcgccgctcttcccgctcgcaggcaaacctctactctggagccccttcttgcagaggcctctgcataaaaggaaaggcggccaggtgagattctccaacgaccagaccatcgagctggagaagaaattcgagacgcagaaatatctctctccgcccgagaggaagcgtctggccaagatgctgcagctcagcgagagacaggtgagctcgcggggggcctggggccgcctccggggaagggaaggcttctggggtaggggtcgccgggccaccgagagagaggcgaggagccaccctgccctctggcacgtcccgacgcgggctcgttgcaagttttctttctctctttcctgtaggtcaaaacctggtttcagaatcgacgcgctaaatggaggagactaaaacaggtatggacatggttctgtttctatggaaataaatatttttatcacgttatctcagtgcaaggctgttatgggttgtatgcaaaagtcatttaagagactatttaacctcttcaccttgattaaaaagacaaatagtcctgctgaaattcaggatgagttgctcaggtggcagtaatgctaaaagcacctaatggggttcctatatcaattatgcttgggttttcacacactggctagtaaaactcccagctaattgttttataaatcccatatgttgtttatctaattaacgcaggaaagataaagtaattgacagtaaatgacttaagcagttatctttgggagaaaattgtttcttttatttacacagccataataaaaccaggcagaactcaagggtaaatataaagaaacaaacacctttaagtcttgtttgcactgttttttagaagaattaaatgtcagggagtttaaaaattattttctatctaatgccagctcttaaaatgaaatataaaacttgtaagaaaatattcaagcctgtttggaaagtagcttaaactttctgacagtctttcttccagtgaccttgtttcgcaatatgtgataaaaagtaaaggctaatttagtttttaaaagaaggtctattgacttaaagctaaacattcatttttgatgtcctaatctggatatactctccaaagttatctgataattgctgaattgttcacttgtcattgtatatacggtttataataaatactttgaaacaatgagtggagaaatttaaagcaaagtggattttaaaatttattgatcattactttttcattaaaaagaaagtgtcccaaagaatattttgaaatagaaaataaaattcccataacttcattactgtaatgtgatttaaatatttgcagatccactctcaatttctgaccgtgtgcatctatttgttgagactataaggcttgcaactatataacaaatagatgttgtaatatttctatgtagtatttatatgcattttagacaagtataggattaaaaattcactagcttatatacttaatagttcttggtcaaaggcttgactctagtttaccagagaccttaaaaatagtggtttctatgtaatatggggatatttcccagaaatttgccccagattttaagtaaattgtagctaattgtctaccttctcagttggcagcattcttccagatccacattttttttctttgccatgattttgtaacttgttaaacatttacacatgtagatgtttataaatttactccagaaaatgaatgaaaaaagatccagtctaataattgaaactttattcttaattcaccagttagcattcttatttttaaaatgtctgaaagactgttaattggcaaggtttaaatatttaaagaatgaagttaaggtgtatctgtagtgatctgattttctttcccccttaaacttttgagaatattgaaaccatgggtctgggctggtgttaagtaaccagaatttgtgttcaattggtataatgtatctgcccttatgttcatgactggttctcatcttttaagcatataatctttgatatgacagaaacttttcttccaaagtgagcaaaaagcacaagtatgtatctcctgaataagattataaactgaaaacactcagtaaactaaaaattaaaagatggaataggatgaagagacattttgatttattcctctcacctatccatattttatgatccttccaatctccattttcatttcctttattcaggagaaccctcaaagcaataaaaaagaagaactggaaagtttggacagttcctgtgatcagaggcaagatttgcccagtgaacagaataaaggtgcttctttggatagctctcaatgttcgccctcccctgcctcccaggaagaccttgaatcagagatttcagaggattctgatcaggaagtggacattgagggcgataaaagctattttaatgctggatgatgaccactggcattggcatgttcagaaaactggatttaggaataatgttttgctacagaaaatcttcatagaagaactggaaggctatataagaaagggaatcaattctctggtattctggaaacctaaaaatatttggtgcactgctcaattaacaaacctacatggagaccttaattttgacttaacaaatagtttatgtactgctcttaggttgttttgataaagtgacattatagtgattaaattcttccccctttaaaaaaacagttagtggttttcactatttataaaaaattaattttgaactttttgttaaatttttaagttatagctttaaaggttttaataggaccttcttgaacgacttttctgtaatctgtttatctcccacttaatggaaaggcaaaggggtaccccaaatccagaggtgcctacatttcaggcagccttggagtattttaaaaggaaaacattctttacttttatatgacattcttatactgctgtctcaaatccaaaaacatttcagagctcttgtctcagagatgtgtgttctttttgtcagagatatggttgatgagaatcttaaatgcttgttttgcactatcacttagtacctgtttgaccaaggtgttaaggggatagtacctcccaattcaagcagagaaactgacctgactaaagttaatcgcagatgaactagaagtcacaggttaattaaatgtaagtagattgtagatactgttttatatcaaacaatgtttataatgtgtatatagaattgttcactgtaaaaaaaatggccaaaatgtgttttttttttaataagtaacttgactataaaataaagccgtccgtgggacgactgacctcgttgcaagtctaattctttgattttaaaaagtctgcacaccttttcttgacctcctgggtgcttggcgcggtgctgggctctggggacaggaagtgactggggctggatcttgctggggctctcgttccgagtcccaggaccgcgggtgggtgcctggaacgtgggttggggcctctcccgggccgtttgccttggggctctgctcctgccggcggattctgagcctgatgggttcgagtcccgggcacgccaggcgacgggaagagccgaggcccaggcccgctgcgccgtgaagcgcggggccgtccggaccccatcgattctcctcggcagccgggctggccctcgccgtccttgaccggctgagtcaacaccgcgtcatccctcggcggccggggctcgggaacccgctccgcgcggcggggcccggggtggggaagtccgagtggggggatggggggccctggccgaggggagcggggaggtggtttgcgctgagaactgttctcgaacccggggaacttcagaacctccttcagggcttgtggaaacccagccctgttcctggagttctgatctgttaggactggactgggctgggaccgggaatttgtatttccaacaagagctgaggtgacgccaaagctgcgggcccggacaccacccctggggaaccactgatgtgagcgcacggggtgcggaagaagcaggtgggaccggcactcctcctcccacctgctttcccgggtaactttggccagcaagaggctggggcggagggctgagaggagggaaaggcgagggggaacagaggaacgaggggcttatccaggctagtgggagtgaggtttgatggctgagcagagggcgcagggtggaggaaggggcaccatgaaatggagggagaatggggtgctgaggttaggtgggtgtgggggcccaggtttctgattgttcagggtattgctagtctgtgccagctgcttgcctagctgagccatcaggtctctgacattccaggaaaaccatgacagagatctgttggggagaggcctggaaatctctctctagccttggcctccatggaggaggcctctagttgtagagttgggtacttctggctaaggacctgtgaaggaatgacccgacccctggcctggcttctagggctgtggcgcccccagatatggacactcagatgaagacagtgaaaaagtcattgctgttagggagttgtcacatccggcttccttagattctaagaaggcccctggaattgcaggggaattaagatttctgagaaaagcagtactagtccttaagcagagaggtgtggatagacttggaagtttgaagatttgggttggtgttttagttcttggcctcaaatcatttgtagaacgaagatggtctagttgaaccatatgaaccccttccagctctcaaattcccaactcagttcatgccgtccttattgttctccctactccccatgtctcctcagcc

SEQ ID NO: 252 - DNA, 532560 bp, Homo sapiens
  source 1..532560: mol_type = genomic DNA
ggagaggagtctacatctgctcttcatcaagccaggctgaattctcatctcctcaccagccaatcacacactcagcttcctttccctgcactccacgcgccccccaacaactgccccagctctcccctgtctctagcctaggcccctagaaggtgtctgtgtctgctacctccacttccccaccttgccctcactcctcaaccaccaccatccacagccaccatttattcactcaacactcagcagcatctatgaagggcccactgtgcgccaggaactgtactagtccagctttcccaaaagccggcaacaattcatcctctgattgctttgaacgaacagaccctcttaggctcttagcactaaacttctggacggcgtttaccctgagaatcccccttgatcgtccattaatatctccttctcatggctcccttcgtcctcccgacccttaggacttttccaaggaaaagtcccctgggtgatgcagactcactctggattagcactgtcattctcttccaccacagcagtgatggccgctgtgattgagtaactgatgatggcctcccctgctacaatgtgagctcctcgtggtggatctgtgtctgtcttgctcgctgttgtatcaatgactgcctctcgttggcactcggcaaatcattgctgaatacagaaggtgaggactccctatcttttccgcccgtgtaaccccagaaccctgtgcaaagcctgctcggaaacaaattgttgaaggcttactatgttccaggctgtgttagccaccctgtatatgccatctcatttaatccccacgccagcccttatagatgtggatcatgaccctccactttacagattaggaaacagaggcacagagaggttaggtgagttgcccaaggtctcacaggcagtaagcgctgtgcctcccccactgccaacactcaagaaccaattcactactcatcttgaagtgaggtgaatgggggtccccccgaaagttaagtttatgtcctaaagcctggaatctgtgaaagtggccttgtggaggcagggtctggagtgatgagtgtataaaccagggaaggccaagcattgcctgcagccaccagaagctaggaggggcatagaattgattctccttcagagcctccgggaggaatcaactttgccaacaccttgactttggagttcaggcttccagaactgtgagagaataaatttctgttgtttaaagccacctagttcgtggtgatttgtcacagcagactagggaacaaatacaggccccaaaccacatggtgctatatctggtgcttcctcgcgaggcctttccagggtctgcaagagtgtcctgggctgtgtgaccgcagcctagtcacctccgctctcttggcctgactgctctgaagcaaaatgagcacttgggatgccaagtatccttccaactctgacattgtggaaccctctagaaaaaccatgagccaggcaagcagggctatgttgggattttcaaatttattccaacatgctaattcttttttttttaaaaaatatcctcaggctgaacactcagccagagctgtaataaaggcaattattatacttgtaaaaacttctcattcacagtacagatgtaatttacaacaaaggtcacacacatcaatactgagcatttttccttttgtacgtcagactctgtgctttagacctgcgtggatttttgttttttttttttgtttgtttctgttttgttttttcttttgcactgatatataccataccaacattgcaagatgcaagtgtggaaactggagtttaaataaaattacaggcaaaactaccccatcccagtgcggttgctgtacatatctacagtacaatttttggaatgtattgccatttaagaacatagaaactttctacagacaatttcacatacagaatacgtacaccttttagaaaaaaaggcaaatatttatcttacagagagcattgtattttacatttgcctgcacgtttcttttttctgtttcttttctttctttctttttttacatactagatttattaaagtgaccataagtgccgaagcggttttctaatggaaagcagactggattcacaacacagaagcagaattggtggaacaggctttcgggaactttcttcccctggtcacacggcagatcggtccccaaggacaggtgctcagccaggacttttgctttaagaaggatttgtctggagaaaggactagagagaaatccagctcagatgtattgctcattcctcttcagaaggactgggtgggaatggagcaggggctagaggaatctggaagctaattcttttaggctttttccaacagagggaagcagagggacttctgggtctggaagttggagcttacggaggcgacagtgcaggcagctggctgctgtcgggctcctggagggttgcaggggttgagcccagagtgagagccacaggtgcgggcgggagcagagaggagtggggttactacccaggatggccctgagattgccaagggtgaaaggcatcgtggagcgcaggcctggggggcaaggactcaccaaccaaaggcaaggtttggctctgaaacctcgaccagttggttcctcccccactgcccacacccaaggaccaggactagtctgtaccgaggaatggccaccccgcgcatttcaacagagcacgtagcaggcatctgtgccaagtcagccactgcctcctctgctgcttccctcaacaggcacaataacatcacaggcaaacaggaagcttggaagtgactgggagcagggcagaaggcccagaggagggcgtgcatggggcgagcgtctttctccaaatcatgaaggtgtacctgtgggctgggggctctgtgcgcagaggagcgggactagagtccggaggagggggttagagctgtgcccagtgacatatacccaggctggtggcattggttctgtccctctgggcacggcatcaatgtggaggcagccctttggtgagattctatttgtgcatttacccccatcatttagaaatagtctccagtgactcctggcccctgtggcttctctgcctgagcctgacgggcccggtgactgccgggcctctgccctgccggctgcactgttcattgctaggctgcccagggaggaaaccttgggtgggtaggctgtttgagtacagggagaaaaatgcccaggagagctggaaggcagggtggggtggagtggtgtggggccccccaccaatgtcaggggctagtccaccagagcccccggtctgctgctttgtaggtctggggcaggaagagcttgcccaggcagatttctaacctgggctgaagcaatgccctttatgcagctcccagacctcagcccttgaagtctccaatccgtgggcagtcccatgggttagggctgaaaggcaaggatgagaaaagccctggcctcctgggacttggaggagtcactttctgtcaggccactgtccagcaatatggacagtgtggtccaggctgggcttgctgcttctcttggggaggatgagagccctagtctctgagggaagcagccaggagctgctggctaaccctgattccccagaaccctggagcacagtggactcccagggagccctgccttctgtctcatttttgtcttagctctgaggcaaaggagaatgagtgaacaaggtggtctggctgcaggctggactgtggctggtttgtctgtctagtagggaccaagcagggaaaggccacgaattggaagaggcaagtacagccccgcacagggaactcacagaagggtcttaaccctccccacctactgtgtcctgtacccaagcagcttcaatagctcaagagccctggggcaggcacttgattcacacagcctggctgaggactggggattagccagagaggtccctgctctgtatagggtggcatcaaacccagccttcacgggcctcaaccgtagtccctgtgctgccctcccttgtagaaagtaaagaaaatcagttctgaaacactgggaaaaagctcacctctcccagttggggcgaacacgctagagttcaagttccatagttcaatttgggatttaaatttctggtcctattatttttcttacaaagtagagttttgccccaggaaatgcagggcagcttcttgaaagtagagatgtgggtaaggaagaggcactggctcacactgattgctttggagaattccaacgagttaggacaattcaaaaatcctctaggtcaaaagaatctgtggtggctgggtgaagtatcaaacaccatcctctctctttttaaaaaagaggtgtaagacagcaaacaggtccaggccgtatccaccagccacagttgtgggtatttccttggggtagtggagacaggggcagggacggggggaaacggtcctgtggcaaagtggtcctgaaacagttccccgcaaacctctgctgtggagaactggaaaaacccagccatgaggggaacaggctcccttgtaccccagggaccaagatgaaacaaaacccaaaacccagtctcaggaacggccgctagggctcgggccctgccacttctgcctttgtgggtggtttggtggttttagaacagaggaggcaacaggagagtgaggcctcggtcaggggcttgggagccagggacggacagtcagggctccttccccagcccagggggccagggtggggtgcagaagggaggtgtctggagtgggggtgcgtgggtggggtggcctgcccacctgtggagtgccaggatgggcccatgactcagactaccagagtatccaggagcccttggggagccagccctcctccttctacctgcacctattattttgtgttgaaatcctaggaaaagtatcattttattttcttgcaaaaaaaaaaaaaaaaaaaaaaaaggaaaagattagtttttctgggcctgcctgctggggcctgggtgggggtcacctgcctgtgtttgtgcccctctgcctggggacactggcctttctgctggcagagaggggtggctacgagctgggcaggggggtgaagtggcaataaacaggaaccttgatcgcatctgtacacaggagtgcttccttttacatttaattctatattgtttgaagtttccttttcctttctccctcagtgtacccctttccctctgccagcctctggggtgggtggctgccaaccacagcggggagggtcaggaggcttcaccatcagcctttccccaaaaccataaactattcacagcctcagactcctcgtgggttgttgttttttttttaaatgtatgtatgtgatttgttttgtttctttttaagcaacaaaaggtgtagaaaaaggcacaggtaactgcatacatgggaaggtacaacagatggggccgtgagagctcctggacggagggacagatggggctgaggaagtgggatgattcgaggaaagtggctggaaacgtctgttgctggacactggaagccagatgctgaagcagttggagagaggctaagcgttggggggaaccctgtcctcaggctgatgtggatgtgccctgggctccccacttcctgagggcttgggggagtcctgcctggtcctgggttccccggagaggttcctcgtccgggctgggaagcgggcagaggcctctgccaggcagcccacagagctgctgcggtccagcggcggggtggcagaaggctcggggttggtcggtgcacgcggggactccaagcgggggctccaggactgcgctgcccggcgtccctggggcggccggggcaaggtgtcgggtggggtgcaggggctgtgcgtgggtgtgggctctgcaggtgccccggtcccatggggtgtccagtcaggaggcctgcccgggcctccgccggtcctctccctctccttggggtagtccccgccctccagctctgaggagagtgtgaatttggagaccttagccacaggcgacacggaggctgacgagctctcagtgggactccagcggcctcgctcctgggcctcccgggcccctgtcaggtcgctgccacccccggagaagccactgacccaggctgcggtgggccctggcagcagggtggggtgggctcctggccgggcctgcaccatctggatcccaccgatgggaatcaagggacatggggcacgggtcaagtgctgggagtgcagaggcaggtggctgaagatgttctcctctgtccgggccaggatgtggccgtggaagtcatggagggcggagaagggtcgggaggagagaggatgagcagggccgggtgagcaggagggacttcgggactcggccttctgctggggtcagaaaacaagacaaggtaaggtgaaggttacatgctgggcacatggggagccgaggcctggaagtgggagggggactcgcccaagatcacagagcgagtccagggtcccggctgagctgagcccagaaccaagttcctgactccctgcccacagatgctgagccagctgccatctctggaatgggccatctccagctcgacagtgaccatgagtatgctcaggccccatggtctccatgcctctagccagcatatctgtcttcaaaggaggggatacttgagcgacgtggggccctgttgtcacccatgagcctggcctctatgtgggtctgctgcctgtcctgttcctaaaatggtcttcacccagcttcactcttggacatgagttcccacctgaggctctttgcccttctgctacctccaggaatttgaatgtgaacccaaaattaaaaatcaaggaaagattcctagatcagtgttcctccaggagtgacagggctgggtcatggcaacacggggacagagaaggtgtcggaagggggtcagctgacaatgatggtgctatcggtggaggggtcatggcagctgaggggacagggatggtgactgtgctcatggggtggcagcagtggtgtgttggtgcaatggtgacagtggtggtgctggccatggggatagtgctgatggttgacaaggatgatattggttgtggtgtctctgagagcactggtgacagtgatattggagatggtgatggttttggttaagttgtgccatctgctcaaagaacacaggcagatggggatggggtgggggatggggaattgcacgagtatttacaacctcatccaaggccacaccccttgcaagtgatatgatatcgtttggatatttgtccccgcccaaatctcgtgttgaattgtaaaccccagtgttagaggtgggcctggtgggaggtgtttgggtcatggggacggatccctcagggcctgatactgtcctccagatagtgatttctcatgagatctggcattttgagcgtgtggcacctttcccccaactctctctcttgcttccactctgccatgtgagatgcctgttcccgctttgccttctgccatgagtaaaagctgcttgaggcctccccagaagccgagcagatgctggcaccacgcttcctgtacagcctgaagaactgtgagcctattcaacctcttttcattataaattacccagtctcaggaatttgtttatagcaatacaagaacggactaatacgtggtagaacccatttcccatgaactccagagtccatgctctgtgcttctgaggctaaaataaagtttaataagccagctgatttagggcagccagcatggtgcatggcacagtaggtgcctaataaatgtttgcgaaattattaataactactgagctggcagagctgtttagttccaggtgtgatacccaggagggtgtgaacttgcaacccctgcacccacaggggagaagcggcccagccaccaggggcaggaactcacccacggggaggcgcaggtctctgggcttctgctgaggagcttgtgaggtagaggcgcgggcgggaagagaacccgtgggtccagccccaagcctgggccatgctcccccgctgaggggctgcccggcccagccaaggcccacttccctggcggcgctgaccgtggtggtgactcggcctgacctggagaccatctcctggtgggcgagtatctggggaggcctgggtcggtggtaccctcgagtttggagagcacatgtgctcgaggggccagttctcttcccagggggcagagggtgagaggagacagctgaagtcttggagacccacaagggagagcgcccatgccccttcctgggtccacgtgcaggccaggtgggcttggggctgaggcctgtggttctcgggccggggagcatcgctggggagatgagtcgtttttggttagcgagtgtttgcgggctagtggtggacggctgcctgcttctttgcttggggaccacggtcttcttggggacacaggcttgtagctcaaggctgagcctgtgtctttctccacagagcccagaggggccggtcccagccaggggaggcccggcatgctctggctggacatggagcagctgctggctgtcaggcgctcagcttccgagaccgagctgcctcgtgtagcctccgtgccagaggcgggggcatctgggggctgagggcccaggatgggtgaggagtctgcccgcagtgcatgtggtgggccaggcgggggcgcctctgaggatggtctggacagctcatcctggctctcctcctcatcctcatcctcgtcttcgtccaggtctgagtctgagtccgagtcctccaggtccgaaaactggtgctcctccacagcctctgaaccctctcgtccttccgagtcctggaacaggtcgtcactggttcctgagggcaaacacagaagacccaaggtcacagttgggccttggccccactgcccacacggctgctcctctctgagccccagtttccttgcctgctgactgggcaaaatagccatcgcaagggcacaagattgttgggacaaccaagaaacgtaacagatatgggagcgctttgtaaataataatgaacaataattcccttatgcctagaatgtgcaatgttcagttctgagagctttaggtatatttattcatttagacctcagagaatcctgtgaagctggtactgttctcatcctcatgttacagatgaggaaactgaggtaagagaaagtaagtaacttgcccatggaagacagcagtagggctgggattgagccatagcaaagaagacagtctttgtttgtttgtttgtttgtttgtttgtttcactagcatctcagtgctggcttcaccatgggcaacttaccaccttgctctgcttggtctccccctttgtcgaatgaatgtgatggtctcacctcaccaggttttctaggaggactaaaatgaaggcctggcacatattgagggcttaaaaataattatagctaccatattaatacattaatgatgaaatctgttattccaggacagggcagtcacactggctggtccagcagcacagagccatccgtggtcagtgtacacacacatctgccacggtgaccaggctcccggtggctggcacaatggcatctggcaggtggcggactctggcctctgtgggcggcttgactaagctggcctcaggctgcagagcaggtccccatcccagccacgctcttatctgaggagccactgcccttttgaagtccaggctgcctctagcctcggggccctcccattgcctgccagccccagctccaccccatagttttcgacctacatgtggctgaatgcccacttttgtccactttggacatctgactgctgcatgttgagtgacttggaagcaattgttcacaagagtaaacaaaaaacaaaattgtgatacttgtttcagatattgttggacatttaggtcacttgcactccttaaacagactataagaataatgacagagttattgaatagagtctaaaagtgggggttagggctctggaatactagcctcctggtctgattcctctgggatgaccccaaccagtcgggtcacctctaacatgtcaggagtctagtttgggcatctctgaaatggacagcaatccggatgctggggagagctccgctaacatctggcctgttcgctggcccatcactagaccattggaacctgtttctggtctgcagagtgaggttgctgacaggtgggttgagctggccagccagccccatcgctcacacatatcagtactgcacccacctgaccaggagggctggcacagaaactgactcaggccgctggggcagctaggctttggctctcaaccatgcccagctgccccggggccagaaagcccggaactagcacttccaagtcactcaatatgcagcagtcagatgtccaaagtggacaaaagtgggcattcagccggatgtaggtcaaaagctatggggtggagctggggctggcaggcaaaaggaggcccctgaggctagaggcagggtgatgagaccagaggaggaatgaaggattaggatgagagcagggctggggatgggggtgaactttgtagttatgccccaggcatttacctcccttgcctaggactttgggaggggcctaattcaacacctgttcacctggccctgcccctcatttacatacagcaaaatccaggcacagatgacccagtgagagctggtggctgagtcagaactaaggtttacagcccttgcattattacgctgacagtttaaaaatgatgtgctgcactaagaagcagggaatggtcgggtttgaatctcagcactaccacttccttgctgtgtgacgttggatactttactttctgtgtgtctggtttcctcatctgtaaactgggtagcaataaaagcactctaggaagctgttcagaggactgtgagggtctggcacacagtaagtacccaataaacttcagctcctgtcatcccatgataccctgtccccccagtctcagcaggcaggtagctggggtgggattgtcagcattttgcagatgaaggtcacaggggtagtgttaggagtgaaggagagtcaggaccagcgtctcctgatgtccagcagggagggctcctaaagatcctctttactaatgtggaagttgagacccagtgggggtaatggcccgtcctgggcactcagtgcatgaatgctggaagccaagagtcccctgcccagctcggggctggccggggcctccacatctgcgttcctgcagggcgctgagggaatgcccctggctgggcggccccgcccctgctgggatccaggccaacgctccacaaatgagagagcttgagcgcgcggcgggcgccgctgggagaggccacacggtggcgctagcgcccagcctggccagcaccatgggcagggccggggcgcctggctccttccaggcagttctcccacgcgccacctcgcgtcccacagacacgaactcctgccgctccccccggcatctgtctcgtcgcgggaagtggaaactccatccttcagtctcttgggccgtaatccttggagtcctccatggctccttttcgttcttccccctctcttctgccccatatggggtcatctgagcctgtgggctctccctccggaacctccccagaatcccgccgcttttccacctcctgagcacacccgtgctccccgcgcccacggcacaggccagaggacgccctgcctctctcctccgctccagggcacccccccatgcccttcagccctcaggctctagctctctctgaaccggctgcccccgcgtccagcgggctccagcacgcgggccaagcgccgtggcccccggggaccccacacctgctgctccctctgcaggagagctcctccctgaccccacgtggctcctgaccccggttcctccgggtgggttctctgctcacaccgccctgtctagcacagcggccctccccacgggccccagccctcacttggctcttctgctttctctttggcttcacaggcagggcccctgctctactccaccatcgttccttgcccagctcccctgccatgccgactgcctgagggcaggagctgttttatttattgcggaacccccagcacccagaacagagccaggcacagagactgtgcccagtaattacttctggaatgaatgcatggatttcgtcctccgaaaagtggctctgagcatcctcgtttgctccactgggaaaatgaggctggggcagggcagggacctcaggggagggctctggcttaggttcaggctcccctggtccagcccaccaggcagtggactggcatgcagccagggtttttgtgtgaccttgggctatttttacctgtctgagctttgacttccctgacttaacatgagtgacacaagtttctgccacctgttttgaggactcaatgagacaacatgtgcatatggcccagtgtatccttgacaagcatagtgaaccccattctagctttgggggggaacagccccaagttcactgtgttctcctctataaaaatgacttattccacctaaaaggaaatatgacttaactcttttttgtaagaccacaaatacatccccaaattggaaaaacaaaaacagaacaagacacacagtgcgtgcatacacactcctctctgtcacactctaagtcctggggctgatttcagggaatcagtatgcttcctgctttgcttggtgctggcgagatggctccagcctccttctgttggagggactgccgtccaccaccaaagcccctctggccacctgcctgactgctgaggctgggcagtgctcagccagacccactggcttcgactcctctgccctgtcttctcagagactgactctaagatgcctcctggggattgaccaccatggccggggtgtgtacggggatggggctgggaggtgacaagcggctgtcaggtctggtttgggcttttttgaaactctcctagctccaaaaggcccatgtgtcaggcccatgccagagtgtgtaggcaggagtgtgggtgtggagcttcggagagtatgtgtcccacagtgtcactatgaggggttggctgggataattcagggcatgcatttagaacccgcctgacacatagtgggcactcaatcaacgttggctgtaagttctcttgtgtgcatttattcagtaaacattcactgagcacccatgggtgccaggcgctccacctgcatggcagatggtaatgcatgatagctagggctgcagagcatatcctatcagcatgtggggaggtggctcgatcattcagggaatttaacctttgtctgatacttgggagaactgaaggtgaagctattggagggagagaggggaggagggggaatggggcaaagcagacagaaaggaagcagggaaggcaagcaggaaaggtggaggaggatagggaaagcggacaaggggaaaggggacggagaaggttggcaattgttaccttcttcggcttccagctcctccagcacccctgtctcttggcactttttgctgtgggccttcgacttcatgtgcttagtcagattccctagaaagaaacgagaatacttaggctctgctatggggcaggaggccagggcggacccagggctcatggaggtagcacctggccggcaggccatggtttctcaggccagtcaaggccctgccagctgcagggctgggcaggagctggggtatccctctgccccggtgctcaggcccagaagtgtagccacagctgctgttcagggcagtgcacagcagctaggtggggtgggcgagggctgtgaggggacagacagtataatgaggaagtgagatgctggttaaaaaacaaacaaaaaagaaattaaaagacaactcaagtgcaataggtttttttttttttttttgcttctgatttaagtctggccctagtagctggtgacactcatcaggcaggactattggccatctcaagtgtgggatgacgtgggaggctcccattgaccggcatgacgggtgaggactgagcatgcccttctggctgaggacacctctagggcagctcacagggcagaattctaaagtgtaggtagagaaaccagggcaaatttaatattaggcatggcgagagggcagaaggtgagagtagggaagtctactagccagggactcaggagccacaaggctgggggcccaagcttggtttccatagagaagtcccatttctgggccttcagtttccccaggccaatctacagtgcagacacaggaccagggtggttcagggaaggcctgggcaaggcctctgtcctgctccatgcctacaaagccctcagaggggaggctgactttgccccaagttgtaggtccagcccacaagctgaagagtggaggcagcagctctgtggaatcagggaacagtagcaacagcttcagttccccaacaggtgcacaacatttcacaggccacacagctctgtggacaggagcgttctaggaaggacaggcagagcatcccagcctgccccagaagaacacaggccagatgcctcaggatattcctttgggcccagcagctactcccaaaccgtgatgtgctcactgttgccctggggatggctatatttccatatggtcattaacatcataagtcataagttccctgagtcaggtgctctgtcccattagtctaatgaattggtaagtttgaatggatggatggaggagagaagaatggaaagagctaagcctcctggagtggatgaatagagcgattggtgcgtggatagataaagtggataaaggaaatataaagagaatgaagaacaggaagaggatagacagaaggatggaacgctagatgagcagataaggagatgaataggcagacggaggataggtgagtagatgaaaacaaatggaaggatagatggagaatgggtcaataaacagatgagatgatggagagctggatgggaggacagagacgtggatgaatggaagaatggaagaatggctggttggatggatgaatggatacatgcactattacatgcatgagagtacagacagaaggatgaaagaatgggaagttggatgggtgggaggacaaatgggagaatggtaggaacagataggatgagcagataaatgaacaggaaaacaattagatgagatggatggataggtgaccagggagagggcccatggatgaactgaagggtgcttcttaatcattcctagaattagaagaaatatttagggttttgctaagaggttaatgggggacccttaagctgggattccctgaggtgtccaagtcaagggcagcagggatgggaggggagctgtttcctttcctctttcttcaccttggtcctagttcatgactctatccttcccaatttgggttttcctcctacaaccggaaataaatctggatgtcctactcctggccatagtgggagcaaagccataaatttcagagtcatcttgtagccagagggtcctcagaggtccctatccaaccttgtggacttcggccctcattgtcatgagaaggcaaagccagagtaggacagtcaagaggtgggaaaaggcagctggggtcttccgcggatcagagatacccactgtcctaaggtcgtggagccaggcccaccctaccctgactaccccaggccacagggcactgtggacactgctcattctggctattacctcacttgttgcacctgttctgcctggaaggtttaggtctctaatgaaccaagctagacgctgggcacacaatgggtgtacaatagccatgtatgggaaatgcccttgtcatcgcaggaggaaaatgttggaaggagcttcaaagtccatgtaattcaacccccgccaggctgaggttctccctgcttctgatctgactctgggcccaggtgctgatggcaccattagacaagatcactggctgtcttggatgctggcagggctgcttgaaccaacacagtgaatcaagtggtccacagtcacagtgctggttggtgccgagttccatctagacccaggtctcaagactcggggggcctttcccactccatgtggaggcagaatggaacctagatggaacctggcagccttgggtttgactgtgggctctgccacttgccagctgtgggctcttgggcaagttcctcaaccttctgagccctggtttctgcaaccgtgaagtaatacctacctcgtggggatgcgggaggacttgatgaggtgacacaagtagagtggcagcagagtgtgcctggcagagaacagacccctgtccccatgtgagtcactctattgagcagcccaggggctctgccacgcaccatgctgggtgtggaggaagagatgctaagatgatgcttttggtgaaatggttttacctttctcaggagaaggcaccagggagccccccataggcctccctctcctctgcccccgccacgggggtgcagggaggagtcaggatcggaggtgactttgcgggtccaggagtggacactggatgggcagccctgagtgctgtccgggtccctctgtgacttcccctctccaggcctgtctcctcctctgtgaaaggggaaggtggggcacacggctgcaggcacagcctgaacaccacttccctgttgagggccagggcctcagcttgtcaggcagagccacagcttctcacagtcatcccagaccccaccaaagcctgacaggcctggaatgaagaggaaaggcaagtgagaggtaaagtgatgggtgtcgggaagaggcggaacctccgataaaagggcatccaccaacaaccctgcctgcctcatttggctttgatcaaccgctctgtccctgcccctgccgctggcagacctgaggccatctctgtcccctgaggcgatcggtgcaagggcctggacatggcacagccatccgctggcctctgggaaccatctgagaagaggaaatgggacccccagccaccacagggccacccacaggcctccccagccccacctactgacgcattccttagccagtttccagaggcctgagctgctgccacgacgtctgacacaagagacgagacacacacggcagacagagacagacaggaaggcaggaggggctccccaggccctggtgtagccgggtggtagggtcgggagggctgcctggggcaggcctggaggtggcccaatggggaggcacacagccccggagacaaggggcctgtgttgtctgagctgatggctgacggggcccagcactccacaaagacacctggccccagaaacagacaggagctccagcgccctgctctcccttcacccccatactgcagagagagttaacagggagacttccctgcttccattgccaccatcccaacctggccttccctctattagtcaaacagtttcagattccaccatttcccatctgctcccttcgttggttctggaaggttctagtcttctagaagcccctgtgaacagttgaggaagagctcagggcactgcttgatcactggttgagagcacggcctcacagccctggccttcaggacagcaggggcagccttacctcgggggatgctctacacccctggaaatggggagggcctacagcccctctgttcagattacgccctctggaccctccaaagccctccagggccctggctctgtgctggctcagagagacccaggaagggactgcagacaggctcagtgtggcttccaatgaaggcatctcctagaaagtacgggctcctgctagggacccaaggcaaagggaattgagtgggccccctgtgggaaactgcttgggctggaaacttccagtctcacgcggcagagtgatggtttcctgaggcgatgggcagcccaggctgcgtgtggggcacaggtgtgctctgcatggccctgggctggcagtgtggtcccctggacacaggccactccaagtgcagctttttgccacccactccagggaagggagggaactaactgctcacagaaaggaagatgatggggtgatgccctggagctcggggcccgtgttctagttacagctccagcattaacagttattctgttttctgggatcactttcttcaccttcaaggggacttgggtgataagttttccacttttagagttgacgaccgtccattgaattgtcagtcagttatccccgtcttgctcttccataaaatctcgactggctgcagaaggccagaggaagtgcggttggagggcgtgtcagggacagcccatgtccagggcgacgcatgctgggcagggctgcagggatggaagacaccttcgaagcacccatggggtgggtggggagtcctgggccaatgtgccctctctgggcaacctttgggacattgtttatgagacaccaagagagaagaggatgggggaaaggcagtgggagggcaggcacctctgtttaaaccaaaaccttgacaggaaaatttgagctcaacttgcagatgatggcgaggggacagaggagggcaggggttcagttaatggggtgaggagaccagaaatgggaacacagtcagagaagaggccactctcccaggggatgtgataaactggcccctgacctggtatagagagaacggaaggggccaagcagcaagagcacggaggaagtgaagaagggtagggaccctgctgggccccctccagagcagctgcccagcctcgcttgctgggagcaactttgccaacagaagaaaggtcaacaggtggcacagctgaaggatgcccttgagtttcaccccctgagaaaccgtggggctcccagaagcccccaacttgctcaaaggagaagacaggaccctgatgtccaaaccctgacccaggaatctatcaagctccagaggctgaagacactggggtgccgagagccctgggtctccctccaaggcgcttcagtctgcagtgagcaagctgccaggaccttccctgcctatcctgcagtaggagagtgcaatccaagaatctcatggactcagctcctttgtccacaccaggggcctggcctgggtggctgtggcaggccaggccatgcccatcacccatcacagctctctgggatgcatgcctttcacagcaggcccctcctttcaccagtgactgccagagcctatcctgaccctgatgtggggtgtggctggggcaggggtgacagggctgtcagtctgggagtggggggctggccctgtgctgagaggtgcagagaagctgggtggagcaggggcatggtgggagtggagaggtgggtggaggtcggcgcgctctggcaggagaagagagcatgcgagtgtgttaagcagctgggagtggaatggatttccaaatgcaagagtggcagtgacgagcatggatgctggagtgtctcagatcagtggataaacggctcaggagacatgcagaagggaggggagatgagagaagatgcaaaaccatgaacggtgagcaagagtgccgcaccaggctgggcaggccagggccgggtggccacaggtgcaggggctgtgtgtgtgttccaggaggatggctgggggcagccatggggagccacaggccagtctggagccagctgctctgccactgggcaccaagctgggtgggaacccaggaaatggggctgctccaggccccctgcaaagaggtctgggcacctgaactctgtgctgggactcccagaggggagctccctgcagcgggcaggggcagtgccccagctgactctctcttacctttggttttaaaagcaaagtgacagtgcttgcacacatagggccggacgtcagtgtgggtgcggatgtgtttcttcagcatgctgggcttcttgcagcgaattccacactcctcacaaacatatttccctcggccgcggcctcgcacatatacatactcttcgtttgatttgtacctatgagcaacaggcgtcatagtaaagggaaaaaaaaggagaagaggcaggttcccacctcagaagacgcacgcgcttcctagattcatccagcccgttacagacgcaaggaatggaggccacggaaccagagaggaccacgagagtgggaggaactgagtcaccctggtgatccactgcggacccctgcgcccctccccctcagacggggggttgcactattcttcctcctccagagcagcagacactggcgcttcccactgaggggatgtggagctgcagggtgccagacagcctccttggcacagccagcccagctacagcttcgcccacaaagaacagccaccgcaggccaccagagtcccagagagggaatgatgataataaaacagcagcagcagctcgggcagccgccattcaccaagtgctcactctgccaggcactttacccaaatcaaagcacaaccacctcaccatggagagcctgtgagaccccgagatttagagacagtgagagacttgtccaagatcccatagccagaaggggccagaatcaggctttgaacctgcctgccccaaagcctgtccagtctgccaggaagccgccttgatattcatgggaggagaaggaacagggaccaccattgcttccctggcttcagagtttggaatgaggagtcctgagctctccccctcacctgcacgtcagcctgcaagctctgcaggatgcagggtcccagccacctgccacatcgcttggggttctatctggaagtgccaccagctttcagaagctgcgcctgaagcacgaatcagaatgctcttatttccacttagaaggaaacccacgagtcccacatgcgcaacaggatcacgatgaagctgtcttgttggtctaatgctatacatgtgcaagtctcagatgcggtggggagggtggcagggggcgcgccaggagaggggaccctggcataattccaggagaagagccttctgactcctgaagcctgagaggccactggcacggcacgtggaggaggcgtggcttctcaacctgtggggcgcaccttccaacgccagccagagttgccctcacatactcacgccgcaccacctgcccctgcctggttccagcacagaggggcaggaggtggctgggaggaggtgagcaagggacagcgtgtcggggcgggggggctccaccctgctccaatggggccatcagcttacagctgaaaggacttgggaaggaagggcttggaagaggggacttgagggagagagcccgctggcagcaacagaaccaccaccaccacacccccaccctcacactcgccctcacacatgctcacacccacacactcaccctcacacgctcaccctcacacacactcaccctcacacgctcaccctcatactaaaacatgctcacaccccacactcaccctcacactcaccctcacacgctcgccctcacactcacacatgcccacacccccacactcaccctcacactcaccctcatacgctcaccctcacacacatgctcacacccccacactcaccttcacactcaccttcacactccacacccctgccgtcacacttgccctcacacatgcttacacccccacactcaccctcaccctcacacaccctcacacatacacccccacactcacacccttacacctgctcccacccccaccttcaccctcacacacaccctcacacccccacactcacactccccctcatacctgctcgcacccccacactcaccctcacgcacactcaccctcacacacaccctcacacactcaccctaaaacgtgctcacatccccacactcaccctcacactcaccctaacacacaccctcacacgctcaccctcacacatacacccccccacactccctcacacccgttcacacactcaccctaacacgctcacacacagcctcacaagctcactctcacactaaaacatgctcatatctccacacacaccctcacatgctcaccctcacacatgctcacaccccactcatcctcacactcaccttcacactccacacccctgcactcacactcgcttacacccccacactcaccccccaccctcacacaccctcttcctcacacacaccctcacatgctcatcctcacacacacccacacacccacactcaccctcacacaccctcttcctcacacacaccctcacacaccctcacatgctcatcctctcacacacccacacacccactcaccttcactcccactcccacacatgctcaccctcacacactcaccctcacacactcacctcacacacacacaccctcacatgctcaccctcacacaccctcacatacaccctcacaccctcacacttcacacccctgcactcacacacacatcccaccttcacactcaccttcacactccacacccctgcactcacactcgcactcacactccacaccctgccctcacactcaccttcactcacactccacaccccaccctcaccctcacacccctgtcctcacactcaccttcatactcacacaccaccctcacacacactcacacacccccgccctcacatgctcaccctcacgtatacacccccacaccctcacactctttcacactccacactcaagcactcacactcattcgcatactctactccccaccctcacactcgcactccacatccccaccctcacacacccgttctcacacattcacacatcccaccctcatgctcaccctcacacacccccaccctcacatgctcaccctcacacatgcaccctacaccctcgcattcaccttcacactccacactcctgcactcacactcgttctcacactctacaccctaccctcccactcaacttcacattcacaatccacttccccaccctcaccctcacacccctgtcgtcacacattcacactcacaccccaccctcatgctcaccctcacacacacacccctgccctcacatggtcaccctcacacatgcaccccacacccttgcattcaccttcacactccacactcccgcactcacactccacaccccgccctcacactcaccttcacattcacactccacacccccctcacttaccttcacactcatacccttgccctcacaccttcacactcacaccccaccctcacacccttaccctcaccttcatactccacacccctacactcacacttgccctcacactccacatccccaccctcaccttcacacacccctgccctcacaccttcacactccaccctcacaccctcacacactcaccctcacacccctccaccctcacacaccctcacatacacccccacactcaccctcacactcaccttcacactccacacccccacactcacactcgccctcacactccacaccccgcccttacactcaccttcacacagtccacacgcccaccctcaccttcacacacccttgccctcacaccctcagactcacatcccaccctcacacacaccccaccctcaccttcacacactccacacccccaccctcactcaccttcacactcacacccctgccctcacattcaccctgactcacaccccaccctcacacaccccaccctcacacaccccaccctcacacaccccaccctcacacaccctcacactcacaccccaccctcacactcaccttcacacactccacacccccatcctcaccttcacactcacacccctgccctcacgttcaccctcagactcacagcccaccctcacactcatcctcacacaccctcacatactccatcctcacactcaccttcacacactccacacccccaccctcacactcaccttcacactccacaccttgccttcacactttcacacacccctgcccttacactcaccttcacacactccacacttccaccctcacaccttcactccacaccccgccctcacaccttcgcacacccccgccctcacactcaccttcatgctcacattccacacccccaccctcacactcaccttcacacttcacatccctgccctcacactcacaccactgacctcacactctccctcacacatgctcacacccccaccctcaccctcacactcacacacatcctcaccccacaccctcacacatgctcacacccccacacgccctcacacaactcaccctcacacacaccctcaccctcacacatgctcacaccccaccctcacactcacatgcttacacccatacactcacaccctcaccctcacacatgctcacacccccactcacacttaccttcacactcacacatgctcacaccccccactgacacaccctcaccatcacacatgctcacacctccccacaccctcacattcacacatgctgacacccccacactcacacgctcaccctcacatgctcaccctccacacacatgctcataccccacaccctcacacacaccctcacacatgctcacaccccacaccctcacactccccccaaactcacaccccatactcacatactccacaccccatcctcacacttatgctgacacccctaccctcacacacccgactctcctccccccacaccccaccctcacacatacgtccccaccttcatacacatacatacactcacatcactcaccccacaccccccacaccctcacacaccccacactcacgcccctacacactcccacaaccacacttgcatctccacttgaatactcatataccccatatttacacatacacacgccaccctcacaaccatccacacacacccccagactcacttccacatccccacacactcatacatacacataaccccacaatcacacaccccacacacccccacattcacagtcacccccacagtcacacttacatcctcacactcccactgatgcatactcccacaatcaaacccacacaccaacaccccccaccacacggacatgcaccccccaccctaacacgctcacagtcacacacgctcacacccatgcacacacaccacacacttagactcatttgcacactcagaccacactcacgctcatacactctcctggcacactcaccctcacctcacacatggactgctgtccaccagtacaggtggaccctgtttttttgtcacctcagatttggccaactgatgccgccaaggagtctaaaactgccccttctccaccatggctgccctgaccagccagttttggccgtgtccccagtgggggtcacctttccacgggatccaggacacgcgccaccttgcgtccgagaggacgaactgaaggccgtggcggcggtacgcagaaatgactcggttctcttaggaagggcactctgtggccaagcacgaggcatctgcctcgatgtgacagcggctcaccctcacgtagcagatctccaagaccaaaaccagttgctcacacctggatcttaattcccatgtccctccatgcccctgggacctggtggccagggaagatggctgagatggggccccctttcccagctagaagaagacagagtgaggacagcttggtctcccctttgcactggaagccccgcaacctcctggacactagccttcacctggccttgcttgtcgggtccatggcacttgctcccctcccgccaccacctgcaatggtgtccttcagcctaatggtgtccttcagcctagccttcaccctgctgatccccacacaggcccacagccactctgacgtctactgggcctgtgtgccagccaacctagaagcaggtgccagggtccatctgccccagctgctctccgaccccttcatttcctcctccacatcaagcttaaatggtacatggtctttccaaatggagagagagagataggaaggggagggagagagaggactctgagccttcaaggttggtgccttgacttggggcggggtgtacacaaccacgtgcagcaccttgtcacatcagggagggagtgtagcctgctggggaacacgagggaggagcctgggttgggtgaggccagggatgacaggagagatggaggacaggagagatggagaatgggagagaagggaggacaggagcgaagggaggacaggagagatggaggatgggagagaagggaggacaggagcaaagggaggacaggagagatggaggacaggagagaagggaggacaggagcgaagggaggacaggagagatggaggactggagagatagaggacaggagagaagggagaacaggagagatggaggacaggggagatggaggacaggagagatggaggacaggggagatggaggacaggagagatggaggacaggggagattgaggacatgagacatagaggacaggggagatggaggacaggagagatggaagacaggggcgatagaggacaggggagatggaggacaggagagatggaggacaggggagatggaagacaggggagatggaggacatgagagatagaggacaggggagatggaggacaggagagatggaagacaggggcgatagaggacaggagagatggaggacaggggagatggaggacaggagagatggaagacaggggagatggaggacaggagagatggaggacaggggagatggaggacaggagagatggaagacgggagatggaggacaggagagatggaggacaggggagacggaggacatgagagatagaggacaggggagatggaggacaggagagatggaagacaggggcgatagaggacaggagagatggaggacaggggagatggaggacaggagagatggaagacaggggagacggaggacaggagagatggaggacaggggagatggaggacaggagagatggaagacgggagatggaggacaggagagatggaggacaggggagatggaggacaggggagatggaggacatgagaggtagaggacaggggagatggaggacaggagaaatggaagacaggggcgatagaggacaggagagatggaggacaggggagatggaggacaggagagatggaagacaggggagatagaggacaggagagatggaggacaggggagatggaggacaggagagatggaagacgggagagagaggacaggagagatggaggacaggggagatggaggcaggagagatggaagacatgagagatagaggacaggggagatggaggacaagagagatgaaggacggggagatggaggacaggagagatggaggacaggggagatggaggacaggagagaagggaggacaggggagatagaggacaggagagatggagcacaggagagaagggaggacagaagagatggaggacaggagagaagggaggacttgggtaggcaccccccggagcaacggcagagtgttgagagcctggagtatttggttgcagagaggagatgaggctggaggaaaggcaggctggatcaccattggccttgaacaccatgctaagtttgggattgataaaagccttaaagagaaatataaagtctctaagagaggatattccctggccatgggaatggcctggaggaggagagaatgaatccaggcccaggctcatgttctagaacagcgatttgagatgccttctgggcataggctccacaggcctcagtggccatttggatggggcaggggtcagaacgaaggagaaaccaagatccagaagtttcaacttggctctagtggcaccacccccgagcttggggggaagtgatggaggactctagtctttaagcattgagtatgagatgcccatgaggaagacatgaagaaacgtccttgtgtcagaaatcagtgggactgagaaggggatatgtagatttgggaggaggatgaccccacaagacagaagagggtagtgccgacggcagagacctgggtggcacccaaattcaagggtgggcagaacaaatggcaccccaaaccctgccctcaaaaagagaaaggtcagagaagcaggaaactgggagagaactgtggcttagccaagaggagagggtttagaggaggaggggcccatggctggacatcccagagagcttgaggaagacggctgctgaggacccaggacttgaaagagggcagtcctggttcaacgacctggaacctgtggctcctctgctcgttgaaggccaggaccgaggcttgtccagctttgaggttcccagagggtccagccagggacaggcctatggcagctgtctatcagtgtggacctccccaagcctgaggtagacctgccgggctctgggtccagctcctcctgcggtgccagagcccaccccacccactgtcctctcccacagcttcccagcagtgtcattgcctccctctcctagccccttccaccaccacagacacaagcccagctctcttcccatcacaaatcaaccagccccaagcctccctgggcccaaatcccgggccagctctgctgtccctctttcctgcacagcccggatctggagagggctgtccacacctcctccccactctatgcttttgagccgctgcagcccagctctgatgaccaactgttcttgccaaggtcacagcttgctccattgaaagtccatttgcctcatcctgtccgccctcttgctggccttctggaggcacctcattccctcctgcttgtgtctcctttgcaagctccttttttgcccaccctttcccatgccgacatggcccctgccagcctccgacctgcactcttctcaccacacaccttccccaggtgaccctccacctgggtgctgatggcccccagccacttctctctcgagttccgatgcctttgctatacatctaactgccttagtatcacctctggtggttttcaggcacctcataccttgcgtgcccagaaccagccttccaagtccctctacctgcagtgtctgctcctgggtccccgttctctctcagcaagcagcacctgcactcgtgtggctggccagcccacaggctgggcttcatccttgatggctccatttccttcatgctccataatcaatccaccaccacaaccatcaatgctacatgcaatgcatgctccaagggtgccacctctctgtccccaccagccctggccaccaccctctctcctataccactgcctcctttcttcacaaaacagccagtaggagctgtccccaaatccatccaggcttaccactccttccagcctagaggtcccacttcatgcttctcccactaccatcggagcgaagccctgcattccttggcaggaaaggcccagggcaccatctgcccttgccacctccccagctcatctccctccaattcccactgatccccccatttcctgctgcactccccctccagccatgccaaaggtcacctggagccttgcatccctgccccagcaccaccccctctcctgtaagaccagctcctccactctaccagaaatttgcaccaaggtcctgtccttcggaggcctgtcccacacccctcctctggacctggggatctcacccacttctgctccagggcacttgtcagactgtgtgtactgcaatggccttttcacaagcacagcccccatcatccctgcgcgggtgaggaccacatctacctcatttgtcaggacatccccagcaggtgcccaatacatattcattagctgcacatcagagagaccagcgaggccttctttcctggggcctgtgatcctcagattctagccttgactttcccactccaggagttcctgagcacaagtttaactcaatgctgggctcccaaaggaggcgggacacaggcagtgcctcagaaccttgatgggcgcatacgctgcccaccttctgagaggagtgactctgctcagagcgggagaggtgggcaggacacttgggtcttggttctgctcttgttggaactcgccaggtgaccttgggcaagtcactttctttccttcggaaatagtcctcataacctgagacacggcagagcacggtcacatggcgggcatcactcgatcctcccatcaaccattttaccatcgtccccattgtatagaaaagggaaccaaggcccagtgggttcattgacatggccaagaccacccagccagcaattttaccacgcagcaccctgttcccgcacatcatctaaacacttttagatgatgccgaccaaggttttgttagcatcttccctctcccagggacctgttacactgcagacaaataagaatggcatcactccccgcccagcccttccagccagcgctggggtggaaccccaggtgttgacagctgtagagaaatgccggggaagagccagggtgggaaaccggaacaccatgatgggggtccctggggatatagtcctgcttgcctggtctgctggcctcttccctcctccacccaaggcagccctttggaggcctacgccacaggctgccctttatcaggggagcaagtgaccaacttccctgcctgttctgaggctgcaagacggtccactgctggtgggtctggcagggctgacttatggagtaatttctcccagtgtctggaagcagctttctgcccatgcctggggtcagggcaggacagaggctatggggaggggtatggcgagaccagggtcttcatggatggatcttttcattcttatgctgtggctctaagactcatggactcaaaggaaaagaaaaagatccttaaacaaccccttgatcaggagggtcttacaatcttcactgaatacagaaggaagcagaaacagagaggttgagtgtcttgcccaaagtcacaaggcagctcaaaagtggtgacgcaaggactggaccccagatctgacttgtgtgccctgaagagcagcacagtatgatctagtgtgatgtcctctcctgcccccggcaacttctcctgcaatccccatggctggtgatactgagctgcctgtgaaccatcagcacatgatatcttgggttgtagcagacccacagcttctgctaagcacaaaggaactcggcacagagcccccaaaggacgtgacacgttcctctgctcaagatgtcaaagaggggttgtggtggaaattgcatggcatttcaggcaaggtgatggaggaggttgttgttcccggactctgaatataacaaaagatggaaagaagctgctctgccatgcagtgggctccccgtcactagcactgtccacctagagaccagatgaataggctatgaggtcttctagtagtaggtagtaggtagaatagcattattctactactcctagctagtgggagggaattcatgacgtctacgtgctcaggacacgtccagcacaccgacagagcggctttgggtggattagcttgtgtatgagtgtcataacattgtaaagtggatatatttagttcacttggatatatttagtttagcatatttgttccagtaaatataagtggctatatttactcctaagaccaagtggaggctcagggcactagagggggatgggctggcaacatgatcaagcaaagcaggggaggcgtaggaggggacgcggtggggactgtggtgacctgggaggcagggcatatccctctctgaaggggcagtggctattcctgtcctgccaaatgtcacatgaagttgttacatcttccagttttttcaatgaaaccacagattcagatttttaaaaaaaaactaaaaatattagcaaactcttacactgggtgccaagcacgattttaaatgctttacatgcattacctcattaaatcacatgacagccctatgtgatggggctgtcatgattcccatttacacaggagaaaacagtcccagagaggttaaataacctgcccaaggtcacacagccagttaatggagtcagaatttgaactcaggtcacctggctacaaggttcatgtgcttaactgctgtgcaattctgttttttaaaaaacactgtgtaagtcaaataaaatacaagaggcggatccagcctggagctaaacttctggctcaaagtaatttccccaaggtcatatagctagtcaataggggcatgtctgaccttcaagcccgtgacttttcactccaccaagctgcattattttctgaaatgaagggatgaactcaatggcctccaagttaccttcttaatctgagattctatgtattaagctattctgcatttatattatgacttttccacctattattcatatttaattagaaaactcttgcatctcttccaagtctggatattttaaaggtttgctgcatttctgattttattatgatctggttgccaaatatgctttcctcccagggggcacacttcttgggtgtagtcagtcatgcaaagcaagaggaagatgtgacgagcaatgcacacactgttgctctgagacccactttggcgggcagcctgtgtccgtgaagtgaggctcagggccagttcccagaggtctggtaccctgggaggtccagccatggtgagctggctggcttgtccgcagtgacacgctgctcttcgagtgaaactcacagaagaatggatgtctgtggaaagagaggaaagtgccaggtggtacagcctgctgagctgtgtctctcttaaaaatattcagtggccaagaggtagtagacacatcccctggtggaaagtaaactggggaggccatgtgggtcatggggaaagttcacactggtttctgggtacaccccagattctccttttgttggggttctgcagaaactacatcatgtcataacgctcaggctgggggccattaggtgcaccctcagggacaggccactgtgccaggaattccacggcacgcaggcacagagcccaccagcacagtctctgttctaaacagcgacgtgagctgcaagcatgtgaatttactcaacagtatttcctaaggtctggtctgagcctggcgctgggccagggccagaaatataaagctaaataaaaccctgaccttggtctcaagtgtgactaacaggcacttaaaagatcgtaaagcaaagagatggaaacagtaatacagacaatgagcaaagtgctacggatgatgagaggaggaaccagtgggggtgggtgtcaggtggcttctgcagaagaaacacctttgtctgagactttttgggtgcacagggtcagacctgagactcctgttttatgagtctccgcctgagtgcagtgtggaggatggtgtgggtggggaggtctggaggccaggagaggctattgtgactgtagagagcccagctggacagaggcgagggcaagaggaaagaggacctagatatgagacagttcagcagtggcccgacagaaataagaggggagagtgggtcaaggatgccttcttatacaccttccagaaggattcttgctgatgaggcaagctcttgtcattttgcaggcttgctacctacagtggcattttcaccatttcctgggttttactattgtgatttttttaatactaggaaaacatcagctcccagtggcagcagctgggaagatggcagcagctcaggggtctaatgcccagcacagctctaagaatagcaaacgcctttattctacagaattggatatgataggtggaggtcctgtggagtgacttctgggtgacgaagagcagaggcctaagagccagcaagcaggcaccaagcctgggctgaagccagcttgggtctgtcaaacacagccgataccccatttctgaccagatagtggggttagggaggcaggcaggaatgggttgaaatgaaatgaaactgtcagaggagtggatgccttcactgcgaacattaggtggagttgctccagccatgagcagccctggcctgcagggttctagaacagtgacttccaatctgtgctccggattcatggggcatgggggtggggaagccgagcagtggggccctgggtcctcctcccccacccacagcagctctggattgcgttggttttcagagtgagtatgtatgtaaactgaactttgtaaaaaggagttatgtgaatgtaaaaacaatttgaaaattactgttagagaacattcatgcttggaagttccttaaaacctctgatgcagagaagcctgctgcatccttggattaggccattttcaggtggatcccgtccacaccctcccacaggtgcatattcctccggcaccaggggactcacagtttcccagcagctcctgcgacttctgggcagctctctcactattaagctgaagttgtcaacctgtgctcacacccatgctctgagctctgggcagtccagctcctccttcacacaagtctccaaaagccatgatgctgctcgagacttctttcctccagtctcagcatttccatgtcctcaaacaattccacatgtgagaaattctccccaaactgtccatcttctcccagaatggcccagagcacagaagccctcaggtggggctggacctagcccaggccgatgcaggaccatggtctcctctttccactattccagcctcactcccttatgtcccagacccagaatggggaagtcactaactagaccctgaagaggcgggagcctgtctggtgctccacaccacacaaatggccagagctgggagggctgaggcctccccagaccacctgacctcacagtgaccaggccctcgctatgtgccacacgctttccgtaggatatctcctttcttcttggttaacatttatgaacacttcttcttctcattattatttttgctaaaaaccgctaaaaaaagtcaaccagggtcataggtgaaacctttcatcacataaaaataaacagctacaatttgttaagtgctgactctgtagtaggcactttttacagaaattatatcgtagaaaccttggtacaattctatgatgacagtgctgagtacgaatagcaggtattgaggcagaaaggccagttggagactggcttagaaaagcctcagtgcccggctctaaaattcagccagcgtcttacaggtggtgaaggagaggaaaggaaaggtgtactgtcagaggtgggacctgcggagctgcagctggaagccccccattggggctgtgcggggcagcagccagagaggacactgaccaaggctctctctagtagcagctgacactatgcgtacaccaggtgcctggccaacgctgggctactacaacctgagacctcggtgttcctggctgcacagaaacacacatatgctgaggtacacattaggtaagaaaaggctgtgaacagttttaaatcctgcaatgagctcaaggtgtcagcaccatgaaggccgtgaaacagtttttgatctatctgaatggggcaaggtagccagggctcatgaaggcagttggttggcatctcttgcagctgtccttacagattaaacctgaagaacactgggttggggcgtgggggaggatacatgctcagaccccagagttactccaatctggaaaggagacggatagagaaggcattctaatttctgcatgacaacaggcaccttcttaccccataccccaagcagatctgttccccaccagttaagattacaggagaaacagggaccaaggaaaacctgtctttggacacctcaggtcatatctgtgaccactgtctcagcctcctgggaggtagctcagccaaaaggcagaaccaggcatggaggaagatccgggctccctttaagaaagagttttctgaccccagggctacaaacttggaaaaaagcaagcctgaatggtagtgagctccccaacaggtctagtattcaagcccagattaaatgacaatgtaagtctggggcaaaatagattctaatggtaggagctgggctggactccaggtccagcgggtttagctggactctaaatggacactgcaaccacactggtgctccagacataaacagccagtaggtgagtgggtgggaaaacaggaaggaagggagggtgtggtcacggctcagaggactgaggtggcctgtctgattaggacgctgcgagtgcagtggttaggcatggggtgttgatgcatcagactgccgagttcaaatcctgcctcctccgaccagctgtgtgatcctgagcaagcacccgcccatggagggtgtgctgatgctgcccagaggagaccagctatggctgtggctgtgggatggttttactattacacctcccagctgttattctcagactgagccacctcttccaatgaaagccctatttctctaatccactctatggaaatgtgactttcccaactcaaagtgggttttccttgcagcgagctatttagggatgcctgttgtgagtccttttgtggaaggaagaatccctttgtgagccccatggctgccctccagtgactggtgagtctgtgtgttgtggccgtgacaggctgtccacatcgcctccctcctgaatccccacagcagatctgcaggcctctcagcagatcaccctgcctggaatgctctccttccctctttctgatgaagctccagttctcccctgagctcagatccaaccccagcttctcagaagcttcccctgaccctgagatgggtcatgctctccaggtccaccttttctatgggcagtagaaaacagagctgggcttaccagacagaactcctgaggcggaaaccagcctctgtcccttattagctgtgtgaccttgggcaggttacttaacctctctgtgcctcagtttcttcatctgtaaaatagggataatgtcctatttcttgacctgtgggtaactgggcacaattccataggtatgttcactctgtaataactcatggttgtatacttatgacttggattgttttttgtatgtatgatctgtttcaattagaaaattactacaaaataatagcatatgctccaagaggtgttgcacattttacttagttaatataggttatgtgcttggaagagtgcctagcaccgagtggggctcaatcagtatttgctgtatctggcactctgccttgatagcactcattacagtcagattcattcttcaatagtggaaggaaaaccaagtgccccagatttcaataggttcagaagcctggagatgtctccctcacccacctcaaaagcgaagctaatggtttcgtgctaagaggctggctcaactgtctagccctggcaatattgggaccagttgatggagtaagaagtcacgatggagtctctctaccatctcctccttctctccagccatggccaggtttgcggaggaatccataacatgctgatggggatacagaagcccttggaagctctccaagatcacagccaaggggaccatgaacttcccaggacccccccgctggaggatgatggaaatgaccacactcatgccaggatggggtccgaggcgcaggaagctcctcacagagaagattcctttgtgcccatctctcctgatgagagtcttgtccccaggaaggtcaatattccgatgaagtagaagaggagcagcatgaggaagaggaagatgatgaaggtgacgaggatgtagaggaaagagaggatgcagacagaaacatcgtcacagagccacagtatcctgcagaggcagaggcagtgcaaggggatgatggcagggaacaaattccagggatgaagacagagccgccaacatggaatgtgaagcatttcagcttccaaactttgacactgaatacagtgctgaagagcaggcttcagttcctcctatgacacatgatccgtatgacacggagcttgaaccactcttccacttttaaaatggctatcagtgggatgcaggatcatggtccagattaacaatacgcagggggcaataaaagcctcaggaaagttaacctaactgttaggtttctatcgggataacggaggcgcaaaatgggtgacatgtttagaagaaactccaagatgaagaataaaggggtttgcttatctgcacttgacaaacatgaagcaggaatcccttggtgagatggtaggctggaccatgcgcactatagatctgtaagtagcccctcacctacccgctgccttaaatgtctgaccactcaaagtgggggccaaattagtgtcctcaccagcagaaagtggggtcgaggagtcaaggcacagccacgagctggcgtgattcagctcctgctcctgcctgctgatcctgtctcatcttcccttcagttcaaagtacttaatggtttgggcagttcttagcatgacagatggacagatggttttcacggaggtaggcagggtgaaaaatgtggttctgaaaagcttccagagcttgtatgtaaagatcagactgtgagagttgtcactgctggcccggctatccctcaggaaagccatttctatgaaaacttgtcagagattaaaggaggtggtaaccagttagcagagaacactttgtctcttcccagtcacatgtgggtaactggctgtgtaacctaggcccaggcccttgccctctctggtctccagccacctcactgactctacaaggcctcatagctccagggggtgagcatagacccctcaacacctgggggctccttatttaggtccttcctggtgtatccatattgagactggggctagaccctcttgagagctgcacagtgaacctgaccacaacccagatgctggaaacgagaaagcaagatcagaatagggaaatgaggtggaggctgctatagacgtggctctttggtctcctccaatgtaagcgcaggggaagtggagatgcttcttcgccgtgttgaaagtttttcgttgactgggatcagcacctcctacaatggtccaatctcctgctcagtctttgtcatgctgttctcctcaggccttcatatcttggagctggtggccttgctgttgttcattccagtcataagggctcctcctggtgctgcaagccataaaggattttacaggtcctgacacagccaccaaagggtcgtctttatcttctgttggagtaggaagcaacacctttattgatcagagcaccatgccacctttatgatcaagatgaagaggaacgtctctccagccccaaggtatgcctgtacctcgtggctaactggaccccacactgctcagccattttctgcatgggatagacagcagcagccgcaagaacacaaacgaacatctgtgatcctctagcactacagtgcattctcctcactccaggacctcctcatccttactagaaaccagtgaggggggttatgtcagtcctctttttcaagtgaggaaatggaggttcagagaggtaaagtcacttgcctgaggtcacacaaccagtgggcaggaaaagaagggcaccaatcccccctctttgaattgattaaacaccctctggctctcatggttgaagatgttgctagtgagagaactattctctagggcatggaataactggacagggagggggatgtctctccacagcaaaccctcaccataggccccagtgaagcaccacgaccacctctaccaccatcactaccatcaccaccaccatcaccgccaccactatcatcgctactaccatcaccaccaccactaccaccactactaccaccaccaccacctctaccaccactgctaccatcaccaccaccactaccacctgtaccaccaccgctaccatcaccaccactaccaccaccatcaccaccactaccactacctctacctccactgctaccatcaccaccaccactaccacctctaccaccaccatcaccaccaccactaccaccaccaccaccaccaccaccaccaccactaccacctctaccaccaccatcaccaccaccactaccacctctaccaccaccatcaccaccaccaccactaccacctctaccatcaccaccaccaccactatcaccgccaccaccatcgctaccatcaccaccaccaccactaccaccaccaccaccaccaataccactaccaccaccatcactaccaccaccaccaacatcaccacctctaccatcgctaccatcaccaccaccaccactaccatcatcaccactaccaccatcaccaccaacaccacctctaccaccatcgctaccattaccaccatcaccaacaccaccaccaccactatcgccaccaccaccatcgctaccatcaccaccaccaccaataccactaccaccactaccaccaccatcactaccaccaccaccatcaccacctctaccaccatcgctaccatcgccaccatcaccactatcaccaccaccatcatcgccaccatcaccaccaccaccactaccaccaccaccaataccactaccaccaataccaccatcgctacaatcaccaccaccaccacctctaccaccattgctaccatcaccaccaccaacaccactaccaccagcatcaccaccactaccaccatcgctaccatcaccaccactaccatcaccaccaccaccatcaccatcactaccatcaccaccaccaccaccaccatcaccatcaccaccaccaccaccatcaccaccactaccatcaccaccaccatcaccaccatcaccaccactaccacccctgccacagccaccaccaccaccatcaccaccatcaccaccaccaccaccaccaccaccaataccactaccatcaccaccatcaccactgccaccaccaccactaccatcaccaccaccaccaccaccaccatcaccaccatcaccaccaccaccaccaccactaccatcctcagcattcactggacattccagtcctggccctagtcacagagaggaacagtaacagggtctcaccagagccttgccatgcagaaagctgacagttggaaaatgcagaaagtagggctcccagttaatggcagtgaggtgtgaaggaaaggacacaggctttgaagccaaacacggctgagtgtgaatcccagctctgctccttacaacctgagtgaccatggcccctctgagtttagtgcttacttctgtgcctggagcatgtaagtccttcagtcaacagtgactgcagatggggtggagggtgggcagcagggcgggtgactacagctggaacaggctcagtccctggggaccacgtgctgcacctcaaccagtggtccccagaggtgaagttgttcgaggtccctcctgagtgtgcaaagtgaggactgtagtggagaaggcggggggctcaagtctcccaggagctgcctctctctaccccaatctgtgctcgaatcagctcccttcatggcctgagagtgggaaattcagggcacagaaaagcaaggagtgctcttctcagcaggctcagagctgacagagaagggttcccgagacagaacagatgcagctgtccagaggacctggcatcattctcagaacagacatgccaggaagtttctaagtgaggagcccccaggtgtggagggacctgtgctcatctcctgaagctgtgaggccttgtagagtcagcaaattggctgatgaccagagcagacaaaggccttgcccaaggtcacacagccattggcagcagagccaagactacaaacctagacttctgcttcttgaagcagggctgatgtaactgggtgtggccttgctacagatgaccactcactccttacatgcctccctgcatcaggcctggtgcccagtaaagaaatggatcaatgcattgtctccagaaagcttgtaggcagctctccagcagcactggcccggcctggatgcagtgtcacttgcaaatactacttaaagcacgtgtagtgcctttcagagaagccatcagccaggaggcagccctgtgactagaatcaagcccagatgcagtcattccaaatgacagaaagagaacagcacttgctcacactgactgcagatctacgcagtgctcatcgggagtggtgggaggtgctgaagtgtcctctagtctcctggcttttcatgacagccctgtgaggtagagagagctgtccctattctgcagatgtggacactgagctaagagaggcacagtgacttgccctcagccacacagctagtaggaggtgacaccatatcacactgaagatcatcctgcccaggcttgcggatttaaacttccatgttttaaagcatctacggattttattaactgtaccttccctgcctgtgggctcaaaagatggccagcagaagaagcatagtttgcctgaagcaaacagaaaatagtaaaagtcaagctaagggaaaataatcagtcggtcttggggtttggaaggatagctgttgacaagcaggcagtggcagggttggggagggccagggaggctccagggaatgggggtgcctggcctgggctttgaagatgaagaaggggaaatggccctgcaggtggaggggatggcaggagcaaaggcacagaggcagggatgcttgggatccaccgagggaatggcttggctggtagagcgaggagcccgaggaggtggcctggggccaaggcagcctccggcactctggagggacctggggaccagcacagactcctgctgggccaggcgttagggccaaccatgtggcagagttatagcaataccaggctttggggatttatttaaaaaagcccacagagcatttataatttacaataattgacaataattttcatgtattcattgccactctcccctcacaaaagtgagatgagtgatgtggcctcttccatttgatggaaaagaagcagatatcctttcctccacactccacggacaccttccacctgaccatgggctcccaggcccctcccaggctgcccactgcttcccctcctctctggccatcccccactccagcctccctagcacccctttcctgcacggtgctaatgctctgtccagcctccgacctttgaccctgccagttcctccagatggaacaatcctccctccccttccatccccatgcctttgttaactgccccaatcctcagacctcagctcgaatgccaggtcctcagaggtgctttctgagccttctgtgaccctcccaatcaatggcctcatgtgcaaagcagtccaggaggtgccagaactgggctgcaggactcagacaagctaatgtgtgtatgtgtgtgttgagcattgacatgtcccaagcaccatgcagtccttagaatgacacatgctgtggtagcgatcactctccccaccctgcagatgagaaagggattcacaggggcattaagtaacttgcccatgaccacatgcctgcgctcttggctcccagccactcctgccttcatcctgtcctgccagcttcctccaggtgctctgcaacctcagctttgtgtgtctgtctgggctccaagctgctcatactgcacttttttaagcaactctttttaaaattgtggtaacaaatacacaacctaaaatgtaccacttgaaccattttgggtttgtttttttttttgagaccgagttttgctcttgttgcccaggctggagtatagtggcccgatatcggctcattgcaacctccacctcccaggttcaagtgattctcctgcctcagcctcctgggtagctggtattacaggtgtgtgccaccatgctggccaattttttgtatttttagtaaagacggggttttaccatgttggccaggctggtctcgaactcctgacctcaggtgatccaccccacctcagcctcccaaagtgctgggattacaggagtgcaccactgcgcccagcccttgaaactttttattttccaactcattattttattttattttattttattatactttaagttctagggtacatgtacactaagtgcaggtttgttacataagtatacatgtgccatgctggtttgctgcacccattaactagtcatttacataaggtaatgctatccctaatgctatccctccccctgccccccaccccccaacaggccccggggtgtgatgttccccatcctgtgtccaatgtgttcattgttcaattcccacctatgagtgagaacatgcggtatttcgttctctgtccttgtgatagtttgctcagaatgatggtttccagctgcatccatgtccccacaaaggacatgaactcatccttttctatgggtacatagtattccatggtgtatatgtgccacattttcttaatccagtctatcattgatgggcatttgagttggttccaagtctttgctattgtgaataatgccacaataaacatatgtgtgcatgtgtctttatagtagcatgatttataatcctttgggtatatacccagtaatgggattcctggatcaaatggtatttctaattctagatctttgaggaattaccacactctcttccacaatggttgaactagtttacacccccaccaacagtgtaaaagtgttcctatttctccacatcctctccagcatctgttgtttcctcactttttaatgatagccattctaactggtgtgagatggtatctcattgtggttttgatttgcatttctctgatgaccagtgatgatgagcattttctcatgtgtctgttggctgcataaatgtcttcttttgagaagtgtctgttcatattgtttgcccactttttgatggggttgtttgtttttttcttgtaaatttgtttaagttctttgtagattctggatgttagccctttgtcagattggtagattgtaaaaattttctccaattttgtaggttgcctgttcactctgatggtagtttcttttgccgtgcagaagctctttagtttaattagatcccatttgtctattttggcttttgttgccattgcttttggtgttttagacatgaagtccttgcccatgcctatgtcctgaatggtattgcctaggttttcttctagggtttttatggttttaagtctaacatttaagtctttaatccatcttgaattaatttttgtataaggtgtaaggaagggatccagtttcagctttctacatagggctagccagttttcccagcaccatttattaaaaaagggaatcctttccccatttcttgtttttgtcatgtttgtcaaagatcagatggttgtagatgtgtggtgttatttctgaggcttctgttctgctccattggtctatatttctgttttagtactagtaccatgctgttttggttaccgtagccttgtagtatactttgaagtcaggtagtgtgatgcctccagctttgttctttttgcttaggattgacttggcagtgcgggcttttttttggttctatatgaactttagttttttccaattctgtgaagaaagtcattggtagcttgatggggatggcattgaatctataaattaccttgggcagtatggccattttcacaatattgattcttcctatccatgagcatgaaatggtcttccatttgtttgtgtcctgttttatttcattgagcagtggtttctttgtaggtctccttgaagaggtccttcacatcccttgtaggttggattcctaggtattttattctctttgtagcaattgtgaatgggagttcactcatgatttggctctctgtttgtctgttattggtgtataggaatgcttgtgatttttgcacattgatgttgtatcctgagactttgctgaagttgcttatcagcttaaggagattttgggctgagatgatggggttttctaaatatacaaccatgtcatctgcaaacagggacaatttgacttcctctttttctaattgaataccctttatttctttctcttgcctgattgccctggccagaacttccaacactatgttgaataggagtggtgagagagggcatccctgtcttgtgccagttttcaaagggaatgcttccagtttttgcctattctgtatgatattggctgtgggtttgtcataaatagctcttattattttgagatatgttccatcaatacctagtttattgagagtttttagcatgaagtgctgttgaattttgttgaaggccttttctgcatctattgagataatcatgtggtttttgtcgatggttctgtttatgtgatggattatatttattgatttgtgtatgttgaaccatccttgcgtcccagggatgaagccacgttgatcgtggtggataagctttttgatgtgctgctggattcagtttgccagtattttattgaggatttttacatcgatgttcatcagggatattggtctaaaattctctttttttttgttgtgtctcttccaggctttggtatcaggatgatgttggtctcatagaatgagttagggaggattccttctttttctattgcttggaatcgtttaagaagcagtggttccagctcctctttgtacctctggtagaattgggctgtgaatccatctggtcctggactgtttttggttggtaggctattaattattgcctcaatttcagagcctgttattggtctcttcagagattcagtttcttcctggtttagtcttgggagggtgtatgtgtccaggaatttatccatttcttctagattttctagtttatttgcatagagatgtttatagtattctctgatggtagtttgtttttctgtgggatcagtggtgatatcccctttatcattttttattgcgtctatttgattcttctcttttttcttctttaggagtcttgctaatggtctatcaattttgttgatcttttaaaaacaccaggtcctggattcattgattttttctgaagagtttttgtgtgtctctatctctttcagttctgctctgatcttagctatttcttgccttctgctagcttttgaatttgtttgctcttgcttctctagttcttttaattgtgatgttagggtgtcgattttagatcttttctgctttctcttgtaggcatttagtgctataaatttccctctacacactgctttaaatgtgtcccagaggtcctggtacattgtgtctttgttctcattggtttcaaataacatctttatttctgccttcatttcgttatttatgcagtagtcattcaggagcaggttgttcaatttccatgtagttgtgcggttttgaatgagtttatttatttatttattttttcattattactatactttaagttttagggtacatgtgcacaacgtgcaggttacttacatatgtatacatgtgccatgctggtgcgttgcacccactaactcgtcatctagcattaggtatatctcccaatgctatccctcccccctccccccaccccacaacagtccccagagtgtgatgttccctttcctgtgtccatgtattctcattgttcaattcccacctatgagtgagaatatgcggtgtttggttttttgttcttgcaatagtttactgagaatgatgatttccaatttcatccatgtccctacaaaggacatgaactcatcattttttatggctgcatagtattccatagtgtatatgtgccacattttcttaatccagtctatcattgttggacatttgggttggttccaagtctttgctattgtgaataatgctacaataaacatacgtgtgcatgtgtctttatagcagcatgatttatagtcctttgggtatatacccagtaatgggatggctgggtcaaatggtatttctagttctagatccctgaactcacaccagttagaatggcaatcattgagtgagtttcttaatgctgagttctaatttgattgcactgtggtctgagaggcagtttgttgtgatttctgttcttttacatttgctgaggagtgctttacttccaactatgtggtcaattttggaataagtgctatgtggtgctgagaagaatgtatatgctgttgatttgggatggagagttctgtagatgtctattaggtccgcttggtgcagacctgagttcacgtcctggatatccttgttaaccttctgtattgttgatctgtctagtattgacagtggggagttaaagtctctcattattattgtgagggagtctaagtctctttgtaggtctctaaggacttgctttatgaatctggttgctcctgtattgggtgcatatatatttaggatagttagctcttcttgttgaattgatccctttaccattatgtaatggccttctttgtctcttttgatctttgttggtttaaagtctgttttatcagagactaggattgcaacccctgcttttttttcgctttccatttacttggtagatcttccttcatccctttattttgagcctatgtgtgtctctgcacatgagattggtctcctgaatacagcacactgatgggtcttgactctttatccaaattgacagtctgtgtcttttaattggggcatttagcccatttacatttaaggttaatattgttatgtgtgaatttgatcctgtcattatgatattagctggttattttgcctgttagttgatgcagtttcttcctagcatcgatggtctttacaatctggcatgtttttgcagtggctggtactggttgttcctttccatgtttagtgcttccttcaggagctcttgtaaggcagtcctggtggtgaaaaaatctctcagcatttgcttgtctgtaaaggattttatttctccttcacttatgaagtttggtttggatatgaaattctgggttgaaaattcttttctttaagaatgttgaatattggcccccactctcttctggcttgtagggtttctgccgagagatccactgttagtctgataggcttccctttgcgggtaacctgacctttctctctggctgcccttaatattttttccttcatttcaagcttggtgaattatcaaattgtgtgtcttggggttgctcttttcaaggagtatctttgtggtgttctctgtatttcctgaatttgaatgttggccctgccttgctaggttggggaagttctcctggataatatcctgaagagtgttttccaacttgtttccattctccctgtcactttcaagtacaccaatcaaatgtagatttggtcttttcacatagtcccatattttttggaggctttgttcatttctttttactcttttttctctaaactgctcttctcacttttttcattaatttgatcttcaatcactgataccctttcttccattggctattgaagcttgtgcatgcgtcacgtagttcttgtgccatggttttcagctccaacaggtcatttaaggtcttctctacactgtttatcctagttagccattcgtctaatcttttttcaaggtttttagcttccttgcgatgggttcgaacattctcctttagctcagagaagtttgttattaccgaccttctgaagcttacttctgtcagcttgtcaaagttattctccatccagcttttttcctttgctggcaaggagctgcgatcctttggaggagaagaggcactctgatctttagaattttcagcttttctactctggcttttccccatctttgttgttttatctacctttggtctttgatgatggtgatgtacagatggggttgtggtgttgatgtcctttttgttgatgttgatgctattcctttctgtttgttagttttccttctaacagtcaggtccctcagctgcaggtctgttggagtttgctggaggtccactccagaccctgtctgcctgggtattaccagcagaggctgcagaacagcaaatattgctgcctgatcctacctctggaagcttcatcccagagggacacccgcctgtatgaggtgatagtcggcccctactgggaggtgtctcccagttaggctacacgggggtcaagaacccacttgaggaggcagtctgtctgttctcggagctcaaacaccatgctgggagaaccactgctctcttcagagctgtcagacagggacgcttaagtctgcagaagtttctgctgccttttgttcagctatgccctgcccccagaggtggaatctacagaggcaacaggccttgctgaactgttgtggactccacccagtttgagcttccccagttgctttgtttacctactcaagcctcagcaatggtggatgcccctccccctgccaggctgctgccttgcaggttgatctcagactgctgcattagcagtgagcaaggctctgtgggcatgggacctgctgagccaggcgcagaatataatgtcctggtgtgccgtttgctaagaccattggaaaagcacaatatttgggcggcagtgttccgattttccacgtacagtctgtcatggcttcccttggctaggaaagggaaatcccctgaccccttgcacttcccgggtgaggcgatgccctgccctgcttcagctcgccctccatgggctgcacccactctccaaccagtcccaatgagatgaaccaggtacctcagttggaaatgcagaaatcacccgtcttctgcgtcgatcacgctgggagctgcagaccacagctgttcctatttggccatcttggaactgccctgaaccatttttaagtgtgcagttcagtggtattaagtacattcacattgttgtgcaaccattaccaccatccagctccacgactgtccagctccagaaaaatttccattttccaaacggaaactttgtatctgttaaacactcactccccatctcctccttcctccaagacctggcatccaccactctcctttctatctatggatacgactagtctatgtaccccatatcagtgaaatcatacagtatctgtcctttttcgtgactggcttagttcacgcagcatggtgtcctcaaggttcatccacgtgtggcaggtatcagaatgtccttccatgttaaggttgagtggtatttcattgcatgactagaacgtattttgtttatctgtttatccatcagtggacactggggttgcttccagcttttgactattgtgaataatgctgctgaacacaggtgtacaaatatctgagttcctgatttcggtattggtggtatgtacttggatgtggaattgctagatcatatggtaattctatgtttgtgatttttgaagaactaccataccgtttttcacagcggctgcaccatttcacgctcccaccagcagcgtacaaaggttccaatttctccacatccttctcaacacttattttccatgtttttgataatagccctcctagagggtgtgaagtagtatctcattgtagtttggacttttatttccctcatgattagtgaggttgaatgtcttttcatgtgatgattggccatttgtatatcttgtttggagaaatgtccattcatgctttttggctatttttaaaattgggtttttggattgaggttgttgttgttgagttgtaggagttctttacatattctggatatcaagcccttatcaaatatatgatttgcaaatattttctcccattcccagggttgccttttcattctgttgatagtgtcctttaatgaataaaagttttaaattttgatgaagtccaaacttatctattttttcttttgttgcctatgcttggtgttgtatccaagaaatcattgccaaatccaatttcatgaagttcttcccttatgttttctcctaagagttttattatagttttagctctcacctttaggtctttgatccattttgagttcatttctgtatatggtgtaaggtatgagtccaacttcaccttttgcatgtggatattctgcttttgcatcattccttggaaagactttctttccccattgaatagccttggcaaccttgctgaaaatcatttgaccatatttgctagggtttatttctgggctctctgttgtattccactgaactatatttctgtcttgtgtcagtaccacactgtttcaattactgtatttttgtagtaagttttgaaatcaggaagtgtgagagctgcaacattgtcctcttgcaagattgttttggtggttcaaggtcccttgctcttcatctgcttgttcactgttatacccccaacacctacaacagttggcacccaattaatatttgatgaatgaaaagtaaactatctatggcatctgtgtcatgtgctaggtattagggaccaagaccaatccgctctggtccctgcctttaaggagtgacaccctgggaggaggtggctggataaactgctggctgaacaaaacagcagtgtgtttgatgacagaatgcacaagttcagagggacacagaggtgggcaggttgactctgatggaggggtgggtatgggtgcggagggagatgagggcagtttcccagagggtgaaaacactgcactgggctttgaagagtttactaggtagaaaatggggtaggggcacctgcacagagggatagagtgtgcaaaggcattggggaatgaaggcgcaggctctggaaggaagcaaccagcctggagtcacctttggggggatggcagggagtggggtggtgaggttgaggagtgatgggcagggaacccaacctgtggggcccagagcctcgtctctctccaggggtggggggcagaggggcagccccagagggcttgacttctcccatctattacagagggtgtgccgggcacccaggtcagctgacccagtggttttggggaagaaagagaataaaggacaaagagtaagatcttgtttcaacggtgaccccagggtttggctttgccactggggagagattcacagccagcgcttggtgaggcatggcgagaacccccacccagcgagggctcctcacttgcactgagaaaacaagccctgcaagcctcacagtggcctcacagtagtgaggtaggcgctgttctctcccagcttacagacgaacaaatggagctacacggaggtggaggaatgtgcccagcgaacagtaagcggcagagctgggattgaactgggcactctggcaactgaggcacctatttctttcctgggcccccatttcctcctaagtgaaaggggagggagtggcctctcaggtgccccacctcctccctgtgagtcctcaggagagggatgatgccccccggcccaggcagcattgggaacattggagcatgccctatgctggacggccagtcctatctgcagagcctgttggagcccagccacctcctcactcctggaccttcctgctctggacctagaacttgattcccatccaggtgtctcatggttagactagcgtaagctacaaccctcaggaaaatcacagagcttagagcctggtcctgagctcgccagctacacagccccagaaacttctgaggggagccctggggagatgaggatttggggaagcctagatgctagatctgctgacattctgaaagtttgtaggagcttgactcctcctctttgtgacagggtagctcctcttccttttgtgtcagcctgcacccctcctggcctgctcttgggggaacatggcccctgaagactccaccctgggattcaggctgaataatgctcacattgcagaggagcttccctcggcctccaggcccttgtcagctgcctccattccttgtcactttccctggggatgcaggggaggtgcccagcctacccttggctctagtctctaaaaactttgtccagccccctggctggccacatttggcccagtctgccaactgcacctgccagctggtcacaaggcctaacccatagcctggcttctccctggctgccgtaggctctttttggctctcatgtgcagccctgtcagctgtcaccacattcttgggagcctgcctgcccagtaagcctgtcccactccatgctgccccactccaagactgctctgtcttctgctggctgctgggccccagcacacacctcccttgactctcttgacagctgggcctgtccatcttgggcctgccagccactcatgtcaacagatgaccccatccatagcacagatccaaaattccgcttggagctttggccccgctgcctcctttggtccaaggcctttcaccacctctcctggcctcagcagactccacttgtccagaagtctgcctggctggctcccaatgccctctgtctcttttaaagtcttccctcaattcctggcttccctggtcccccttcttctgagtcgtgctgtattatcatttaaggtttttatttagaaacatcacaaacatacaggaacatttttatcctgaaccatctgagagcaagttgcaacccaacgtccatttcccctgaattcatcagtgtgtatttcctatagccgaggccaccccaggcctccctggcaggacactttcctcctttgctcaggatctgtctccacggagggatgcccctctcaacctgcttggaatcctctggggctgaatatccctctgcaagggagccgaaggcacattaggtttccaacctgatcccaccaccacaccatctccttgccatcaagacagccatggaaggatggcacatgcttttgtgtacacttatcacatgttgcctcctacttccttcctcctgttggcatatactaagcgggggtcaagatgctggcttccatcattaacatgccatgttaatgcctccctgggctacagtttccttactggcaaatgaggaattacgattaagtgatttctgaggattcttttctaataataacagctgagttttatgaagcacttactatgtgccacgtaccgtgagtacttcataggtagcatcttggttaattctcataccaaccctctaagatataatcacagtactgttatctccatcttacagactgggaaaccaaggcacagagcagttacataacttatgctcaggcagccactcagagattctagattttcatgcaggtggtccagttcagagtttatactctgctgaaaagtaatgggggcagggggtggcactatccggaatttattatttgcctgaagaggcaatcagagaagtaaatattgataattcagaaaaagaggtcaactttctacatgccaagtacattacacacaaatgccatttcacttaatctgcaacaactttgagacacagcactatgattattctcattttctagatgagaagactgagccagagaggttaaacaacttttgtgtgaggcgcagggccaggatttgaacccaggtgtgctgttgtcacctagtgctaaactgggacacatgccgtgctcagagggcaggtcttcaaggatgcaggtcattggctgtgactggcaacggggttgggggcagagtaccaggccctgggcaactgtttcatgcatctgatttcattttatactcccagcactcccgagaagcacctccacccacagagcagggaaagacactcagccacactaagcagggaagatgtggctggagcttcatgcacccttgggatgcggccaggctggaaaacctctggcaccgactcacagaggacctcattgcctcccggggccaggacttcaccccgtggactgcaaggaactgctgaagctgctgggttgggtctcctttcttcatacaccacagcggaggcccctcctccaagagactccaggctgtgggtagagaggtgctttctctctcatccaggcctctgaggccagagcaccctctggagacttggcatctcctttgtgctcctcacctcacctgcaggtgttccagcaagctgatacccagctctgggctctggaaggaaagaattcccagcagatgcctcacctcaaaccagggtacacggccacggtcctgcccaataagaagcatcctgcagcaagctcagatgaggtcctttgaccttcaaggaagatcagcttcctccttatggagacaaggcttgaaggagcctgcatagctccctcacccaggccttttcggtagactctctctgagcagcagctcccaggatttagtgccaagctctgctgtttccagagctggaaagaccctgcacattcacatctggacaagccagagatagttcatccaaaccacatggcaatcattcatttcatggaagagaaactcacaaagagcaattgcagagctagtaatggcagctgggactcaaaccccagtcctccagactctacagcccaagcctcattcttacatcttccaattgcaaatgagaaaactgtgacccagaaagggtcacacaaagtctccagctccacggctcacaccacatgacctccctccctgcagaagacctcatttcaaacaatgcccgaagatggaaaaggtaaaatgttcttgtgatttgcagctaagaaaattcaggtggacccacactgaaccccattctcagacactccatctgtccaacaatccatatgtcactttttttttttttgagacagggtatcactgtcacccaggctggagtgcagtgatgtgatcatggcttactgcaaccttgacctcctgggctcaagcaattctcctgcctcagcctcctgagtagctgggactataggcacacactaccatgcccagctaattttttttttttttttgtagagacaaggctttaccacgttgcccaggctggtctcaaactcctgccatgatctcccaaagtgctgggattacaggtgtgaggcaccatgcctgacccatattcactttgcattttagttttcattgttactgtgcatgggtcaatgcatttacagagttggtgcagacttttctctcttctatgatgtgccgtccacacatggccaccaaagacacacaaagacagcatctctctcctccttgggcagaaagaccaccttagcctgaagaaaatcagaatcacgctagtggaggcaaggaagaaagaagagggaaggaaggaaagaactatgaaggaggaaggaagactccctttgctgaacacttgtatactttctgtatgctggacctgggataaacaagcccatgttatcttactattagttctcaaaaggaccctggaaacgggtgtcattatctctatttagatgaagaaactaaggttcaaagagcaaaggaactggccagtaattactggaagtgaggctagaatttgactctgaatcagttcaaagcccaaagactttctacaacactgtcaggttcccacctgtgcctccaagtcctagaagttcagggaagtgccaataggctcctggggtctgggggtggggctgagagggtgacctttcttgaagagttctttggaagaatgggctgcatggctaaaaaatatttgaataccaccttacaggcagtctttaattaaagatagtgggaaaaactttcttccttttcttttccctttccttcccttccttccttcctctctttctccttcctcccttcccttcccttccttccttccttccttccttctttccttctttccttcttttccttccttccttccttcctttctttctctctctctctctctctctctctctctctccctctctctctctttctttctttctttcttttcttttgggtataataaacctacaaggaagaggggaatgggataggagactaacagtaaacttttggaagctggaaagagatgaatgactggaagagacagaatcccaagcctgcagcagggaaatctgggaaccaatctgatttacatcccaggatccctcaaagcctctgcaggttggggtggagggaaccaaggtaaggacgattggtggaaagtcttgttagaagctgtcagactcccatccccgccccaactccagcagctcaggagactctccccccacccaccccagagaaagcctggaggtttcttctctgcacaagttgaaactgagcccttttgaggggggatgtcaggcacaatgagggcatggcaggggtgccataaagaaatagtgggggtcgggcgcatggcttatgcttgtaatcccagcacttcgggaggctgaagtgagcggatcacttgaagtcaggagtttaagaccagcctggccaacatggcgaaatcccatctctactaaaaatacaaaaattagctgggcatggtggcaggcacctgtaatcccagctactcaggaggctgaggcaggagaatttcttgaacccaggaggcggaggtggcagtgagctgtgatcatgccactgcactccagcctgggcgatagagagactccatctcaaaaaaaataaatagataaaaattaaaaaaaaaaatagtggggaggaagtgaatgcaatgcatacagactggctgcagagacccctccttcttcccctcctccctgactttttcctgcggcttccagaacatgggaagcagaccctttaaccaagagggagactgagtcttcatagggattgattctgctcaagaagaaaggcaccactgttgaagactccccgacgaaacagccccggcagtcagctatggggaactcgccgtcaaagagcctcactcatcacttccaatcatctttgagcccctccactcttaaacatgagaagacaccaaaggctatcagatgtctgagaaacgagaccaaataaacacacaataaaggggcacttgagagaaacagaaaccacgcaggaaaaaaacctaaaaacagaacaagaacaaagccaaaaacaccaagtaacattaataacaactaacgttaatagccttagagagataagatagtagagtctatcaaacaagaacaggatgccattaaagggacattcaagaaaaaaaaattcttgaaaactgaaaatgtgacagtagaaatcaaaaactccaccttgggaggctgaagagggcagatcatgaggtctggagatcgaaaccagcctagctaacatggtgaaaccctgtctctactcaaaatacaaaaaattagcagggcatggtggcgggctcctgtagtcccagctactcgggaggctgaggcaggagaattgcttgaatctaggaggtggaggctgcagtgagccgagatcgtgccactgcactccagcttggcaacagagcaagactccatctcaaacaacaacaacaacaacaacaagaaaaaactcaatagaatggatggagacaaaaatggagggacgtactcagagaatccagcaaaaaggcaaagcaatggaaaatgtgacagagggtatgaaaatcagagaaaacagataggagggccaaggcctgaataacagcagttccagagagagagaagaaacagaggagaggagataatcaaagaactcaagacattttcttaaagcagaagtcccagggtcaccagactgaaagagccactgagtgagaaaactgacccacaccaagacccatcactgtgagacgtcatgttctagggttgtagagaagatcctaagacaggaccctaaagaaggcaacaggactgagaatggacttggagcttttaagagcaacccaggaagttagatggcaatggagcaatgtcttgacaatactgaaggaaaatgatttccaccccagaattctatgatagatttcaatctactgcaaaatagaataaagacatttccagcattttcagatatgtgaaggatcaaagtatttccctctcatgcatcttctctgaagaagaccacactgaaggatggtctctgtaagatgaggatgaaaaccaaggaaaaggaagacccaaggttctggaaagagaagacccaacacaggaggcagagaggacctccgggagtgggtggagggagctcgctggatgagagtgcaccaccatggagaggggagccccggggcagtcaggagccaccagacaactcagcggagcccctgcctcagcaagacaagatgcacagagcgtcaggtgctgctgaacatctccaatgtcttgaggggaaatttgggtgaggcgtgaatctggggttgaattagtaacaaatgtatagaaaacaaagtgcagttaagcacacatacatacaatgattatacacagtgaaaacaggaaaggaaagtaatcatggtttactttatggcttggctgtgaattatttatgatacaacactaatgagaggatagggaggtggccggaggtggaatgcgaatggcaaaggctttggagcctgcagataatgctgaagctgagaagccaagtcatgggcaacccaagcacattatgtagagatatggcaaaccaagacaatctgccaaaagagatgaaaggtactgcttctgggagtggtgaccggtgggtgggtgggggttgggcagagagaaaatgtggggcaaagagaaagagtactgctgtttcccacaacaaaatctatggaaatatttgactctttaaactccagacatgtgtaactttgataaaaactgaaagacacacacacacacacacacacacacacagagagagagagagggcaagcgagcacatatgcctctgttctctaagaagctgctttacccacaggagagagacagagagaagccagcttcctcctgggagcccagcctgattccccaggacagaaacagaggccaggatccaggcagacagtgtccaggaccagaggatgctacatcctcgttgtagctctcaggggactaccaggggctgcccgagacccccctacccaggaacctaaggctgtacccgcttgaaaaaaagtctccttttaaattttaatacgaggcaaagagatcttccctgacagggctcagagctctggaaggctctgggtccagcatactcagacactcagtctgcccaatgatcaatatgtcttttttctttccacttcgcttttcacatttttttttaaccatccatgacttgggtttcacagcacatcatcagttgtctctgatgaccggagtgagtgttccctgggaagtcctttgagtcctcagaggaaatccagaaggccagcacagtcaccctaactagaccaacacaggagatttttcttgaaggatcatctttatggagtaacaacttttccaagagtctaagtgattttctgggtacagaaattttccactctggtttcaaaatagtcattcacaaatgcatggtgggtgaagacctcaagcccataggtggcctggaatagtgaaaagaggcctggaatggggctgagagaatcctccccactgcccacccccaaaccagcatcctctcttcctcctatcatgaccagggaagtgtcttcttctcatcaatgcccctgcaggtccccagggctttgctcctgccccctgccccttctctccttggcatcatcacctgccccttgctagaaggcattccttgcagcaaacacacatgaggacttctcagttcaaacacctgtctgctccagctcacactccctccaggcactgcttccctgatttgtgctgctttcctccacagccagtctcttaggacaacgcttacacaggcacctccactcctcattttggcccataccatcagggttccatcactatggaaacagcgcccatcagtcaccagtcacctgcacagggccctgttgaatgggcacgtgccacatgcctgtcctcaccgggctgagcctccttcctccttgaacattctcttctcttggcatccaggattcacacttggctgggtctcttcctgcttctctggcgattcctcctcaatctcttctgcagcagtgtgtctgtctgccctagaaatgctggtatcctgggatcagtcctggatgcctttttcttttctttcttctccatctcccccaagatggcccatcttggcccatagcactaaattgcatctatacactgacaactctgaagagtgtattcagcctcaggcctctcctctgagggccaggctcatctatccaattgccaaatgtctccctgaacatctccacttggcctggcatctcaaaagtcacatgtccaacaagttttgatctccctgtccccagacctatttttcacttccctcctccatcccttctcaccccataaagggcaccaccatctactcagtggttactacaagaaatacggtagtcagtctcaagtggaggcttctctctcagcctccatagtcatcagaagtcctatagctcctctttccatcttcactgccatgttcctggtctaaaccattgatgtctcacctgggctttcaggatcctgctcttcgtgctgccctgacaaccactactccttcccaaagtctgggttatattccccaggagagagggggcaacaggatttggaggtataaagaaaaagaggaaatagcccagtgtgggctcatgtgatgggggctggacacttcactccccagcccattgggccatgctcagagctgcacatctacatttctggggagaagcctgagaattaaagagagagcaaggtgctgggcctcagggataaggcagggccctgatagcctagacccaccccagaagaagagcagcccctcacccagagctgagaacgtaggacccattttctcggcttctagaacacaaagggctctgctcagagaaggccctggcctgggagctggcccacgagccatccctttctggcattatgtatttcatttttaccttgaacacctgcagagcagaatggtctgcaaggaagagtccttggctcccaaccccagagcctgccccataacagaggccatctgacttcaccttccccagaccaagcctgccttcaggctgatggatgggttctcactggcctggtttcgccttcgttgtgtccttgatccttcctgagacccagagtctcaattctgttcccagattctaagagctgcagagttcagggacctgccctctcacccaaggtctcagtcaatcctgagcacattggaggaagattccttcatttaatagatattccccagcactgcctatgtgccaggcactattctcagcactggggacacagcaatgaacaaaacatagttcctgccctctcacagagcttacagtctggtggaggaaacagaagcacactagtaaatacctggagaaaaataaagcaggaaaggaagaggataagaagtgccatggagtgtgcaaattcatcgtgggtagtgtgggaaggcttcactgaagggtgatggagagaagtgagggggccatgagagtctctggaaaaagagctccaggcagagagcacagcaagtgcaaaggccctggggcagaagcttgtcttacaaagagcagagcttggccaaagcccagggagcagggcgagagccataggcagaggtcagggaggagctggagccggcacatgcaggcccgtgagggcttcgggggacacggcgtaggagcggcagggtgtgtggaccttaacaggatcactcttgttgggctgagaacggaccacagtggggaaggtgggagcaggtgactgtaggacactgtgatcacccaggtgtgagctaccagtggcctgacccagaggttgggaaaaatgggcagattctagatacggtttcagggccaagctgccaggatttgctaatgatgtaagacagagtggctttcggtccaagcatctagaaaaatgaaactgcctatgcagaatgtccatcttgcttaactgaatgagtgactttgccgctctccttcagaagatgcctttccccactgatatggtttggatctgtgtccctgcccaaatctcatgtcaaattgtaatccccagtaatggagatggggcctggtgggaggtgactggatcatgggggcagtgtcttatggtttaacaccatcccctcttcatactgtcgtcactatagtgagttctgagatctggttgtttaaaacttgtgtgacacatccctcccgctcttgctcctgctccagccatgtaagaagcacctgcttccccttcacctcctgccatgattgaaagtttcctgaggcctccccagaagccgagcagatgccaggagcatgcttcctgtatagcctgcagaaccatgagccaattaaacctcttttctttataaatttcccagtcttcagtatttctttatagcaatgcaagaactgactactatacccatctttgaccacttaaaagactttaaagagatataaagcaagtgtgggtaatgggcacagtttgtctacctatgttatacatttcccaacctccacgccaccaaccctcctgtggtatgtggttttgctactgtttaggttcttagagtggcttactgactttattttttacacacctatccaaaaggctccaacttattaccacttatttaattcatagtttaatcaatttgttccccaataaatacacagaggtaacacatattcccaaagacataattctaaatctggagttcacagcaaaatgggactaggcacagcagatgattaggctgaaaatcatgctacacttctgggtttcaaagtccaagaagaaatggatttgtaaaaaaactattagaaaagaaaataatctttagattttttaaaactaacactattctctccaagctactatttcatgaaacacacaggtatgtgtgcacatacacaggcacacacacacacacttcaaaatgtacaaatgcactgtcacaaaaacgtgctgcgtacactgcatgaactcttaagacttggataaaaattaattcagctatagaaatagatgagatagaaaagtacactcgttaaaaatgtaaccccttcaactggaacagtaatgaattaaataaacttttaaaataatttctttaaggaatgtcaaagaggcctgagacacagttctgcagtatgcgctgtgctgtggacaaagggtgggttcactgatgtgcaggtggaccgcctcccagatacgaagttggatgcatgacccggagttcagaggagaagtccttggagatagggatctgagtgtcatcaacctgtagatggtgtatagatcacgttgggactgagtttagaggaagagcacggagcctggggctgggccatgtggagccctaatgttcagagatcaggcgatgatgggactcactgaagatggtgagaaagtgtaaccagtcaaggaagaggaggatcaagaaagaaggtgatagggtttgtctgtgtccccacccaaaatctcatttgaattgtaatccctataatccccatgtgtcaagggagagaccaggtggaggaattgaatcatgggggcagtttcccctataccattctggtgacagtgcatgagttctcatgaaacctgatggtttcataagcgtttggtagttcctcctgcatgcatttttccttcctgccaccttgcgaagaaggtgccttgcttccccttcaccttccaccatgattgtaagtttcctgaggtctccccagccatgtgaatgagtcaattaaacctcttttctttataaattacccagtcttgggcagttctttatagcagtgtgaaaacagactaatacaggcagtgtccaggaaaccaagaggacaaagtcctgcatggacgagcgaaggattgactgtgtcaaatgctgccgatggctcaggaaagaatagaagtgagaactgactactgacttctgcaaggtgagggtcatcattgacttggataagagcagcttctgaggtgtgaggagcccaaaggcccaccttgaataggtctgagagaagccaggaggaaagatacggaggtgagcaacacagtcaccttcttctggagtttttctttaaaggaaacagagaaatctggcaatatggcccttcagccaaagtatttttaaggtggaaaccttaagtctgggtatgcttaaggagcactctcctggcccaggagagtggcaatggctggagtgaggtactggggtaggtgaggtgggatgggagccaatgccctcccataggaggtgcagcagctgagtcctgcagcacgcagggtctggcatggactcctgggatctcaccatctgaacttatcattcccttcggacataagccccaataacacaccacccaactgggcttggtcagccaggtggttcctatcaattccagtctcttcctcttccgtgtaagcccactgggctgaattcccagctttccttgcaataagtgaacttgagttaagacaatatagtcattactctcaaggaacaacataactttgtgtgtgtgaaaacaacactgcttaacaaaaagccattctaaacaaccaaggcaaatgcacaggtgctgggtgagagagccatcacatccctgatgggcactcccaggggctgcctggaaaatgcgggctttgttcaggtgtggaagtgatggggaatgcagagggggccatgtgccaggaaactagtgcaataaacagagactgatgcattgtgtgtgcaaagcattaccccaggacccaagtcaagaagggacttgggaggagacagaaatggatcttagcaccagtgttatgacagaagtaacacaaagaactacagagtgtggagggatttgggaggctcgttagaggagcagggctgagtattggcttttgaaggctgggtaggatttggcaatggcagggcccagcaggcagcaaaaggtgaagggcgacaggaacaggtcagattctgaggccagcactcacaggctgagtttaaactggatcctgtaggtgaggcagccacagacggctctggagaaaagcatgacacaggcagaatcatgtttagtgatgctcagtggcaccaactttggagttctagagatagggtggccagagcagtggcagagggagtaaagagaccacactgagtcactgactacttcatgcagacaccaggattggggtctaactggaaagggggagaaggcgtccaagacaatgttaaggttctgagtgtgaagggctgggtgtgtcatctgagatctggatgtggaaggagatgctgttggtgggaagtggaaggcttggtttgcacatgctaagtgtgaggtgtgaatttcccaggcaaaaatgctcaggaggcatcaaaaccagtgtctgcagttcaggggtgaggtcctggctggagacccagatgtagcaatgtcggcacagagatgaggcctggggctaaggagatgggtgacactaccaagggagaatgctcaaggcaagaggaagtgagtctcactgatcaggtatgggagctgccatcacacctgtagcaggtagactgctgggcagcgtacccttcctctccacttgtctgggtctcgcccaccctctgggcccggccccacccactccgggaagccctctctagctattccatcccccaggcatccttcctttgctgtgagcttctcagctctggccatccccaccttagcagtgggtcttgtgttgccaccttggtgtagtccccaagcaccttgagggcaggatgacagttaacccccatgggacactgcattttctgacacagagcacccaaaaggcactgattaagtagatcctcctccctgatgaattaataaattgatcagtcactgaaatggaggtcaagaaagaaattaaggcaagtttaattagagattaaaagactcatatagcatctactcttttgtgtctggcttactgattcatgatgaactaggtctacatgtatcaacatggatgcacgtcaaaaacactgttgagtaaacataacaagttacagatgtatgttaaaccaatttgaatagtcatgagcactatatctaccaaatatttcaggttctcccaagcacacggtaggaatgcacttctctactcccatggagctaggtgaggccatgtgacttgctttggccatttaaatgtgagcagaagcttctgggtggaaccattgttttcttcttcctctctcagcctctactggcctggatctaaggaacagagctccatagcagatccttctcaaatgtgtacaggagtgaaatacatatgtttgttgtattaaaaaagaaagaaaaaaaaggaagaactgagtctaaggcaaaactgtgggattgcagaggagtgtgcccagtgattctgggtgtgggcactcttggcaatttgggggaacaagaggttgtaaggctggtggaatggaaggtcagcatctctggcctcgtccctgaaatgccagttatgtggcaaccaaaatgccctccccctccttcaccatttccaaacactctgcggggtgatgccagccccaagagaaccatgaatgtagaagaatcaccagaagtgagagtgggaggcatggtcccagcttgagatagccaggctgggggaggaaaggatctgacactataatcagttccatacgtgctcaaattgcatgtgacaagttgaaagggagaggataccttccatatctgacagaacagatgggactgtcccagacagagattgacaaaatggatatactagtagtaaaatgcaccaatgtccattttttgagcagctatgaattatagccttcatatggggtctcacaaggtcctctgaaaatcccacatgttattttcccccttttacaaatgttattctcccccttttacagataaagaaactgagggcgggagagctggggggctagtctcaggcagaacagaggtaagtggggcagagatgacagaactcaaccgagaggattctgaagcagagcaggtgggactaagtgaagacctggaaggaggtggagagggagtaggacccataccagctggaggaagagaagaggacttgtgggtgatgttccccctccttcagccattgcagaccgtgtaggtagagacatccagcagggagctgggcacggagtggctcctgccagctgcctttctggaggctcaggcttcctgaggtctcagagcacctgcctctcagggaagatgcgaacctccccgggcacacacagactgctgctggggcaagctcctgggacaccaggaaacactcagcagccctcagagaccacagagaacctctgaagcaagaaggaagagggccagtcgctgtgagcaggcgcttcatcaatcctgcctctgtgtggcctctaagggatccagtggcatgagaacacagagacacacgagggcgctctaaccaaacagcaggaggacccgcgtccctccccacacggaaagagggttggcattttcaaagacctttggttcagtgttttttcaacgcagctgctattggtattttaggcagtaggtttcaggggcatttgctacccctggcccccttcccatcattgactaccctgctgcccacatttccaagcaccctctctcctgagagcccctgctggtcagtgccaccagaagatgccaactggtggccctggggagggtggcagtctctgttgtcccccaaccttatggaggactcccgtgcctcccacgctgaccctgtgagttaggcgcttgcaggtgctagaggatcagaggcccccagtgacagccatgttggccccagctcatggggactgtcctgcacaggaagcgcattttcctctacgttgttgtccttcagggctgtgcaggaccaggccaccctgatcacaccagggacacagacacaggaccctgagacagaacgccatgggacctgctcacagacacccaaatcccaggaagcaaacatgtggccacacaaaacacagctggcacaaaacttccacaaagcacgtctgaaacacggcacccttccagagcccagacagtccctgaagctgtgagctctgaaacgtttagaccattcgtttcccaaagtcaagcatcaaaggtgaataactatgaatgagattcaaaatattcaccaaccattgagccctgggccccagccagtcaggatagggaccagtggaaacacctggtgcatacagtgtgcagtcagccctgcaaacagcctagtcggctgagcccaagtgccccatgggaaaccagacatgccaagatggccattgggcagtacagagatgacttttggagaatacatgtcaagagagacagaagtctggacatttgctgggatactgggatggcaactccaatgcaggaactagaaacctggccaggatctgagaaaatgaggggctggagaaagacccagacctctccagatcctcaacaaatacccagcatcacccatccccaccaagaagccccacggcattcttaaacagaggggcctgagagtcccaggaaggtgatgtctgctgaaaggcatcgctgggaccacagggcacctgtgggcagagcccttgccaactgagccactgctgcccgtgaacaccaatgggcaccagctcttattccacggaagcagacgatggaaaccaaacatgagtcttaccctccttcgaagattttgatcctcgccggctcccctctctgggaggcaggagcatcctcctccggctcccctctcctctcttcttccttctccactctagctagatctttctggccttccggggaaaccagtgaagggaggtgaacctggcccaccgcaggaatgacaaaatcattgctggttaaaagtgcatcctcagtcacgaatgcaatgctaataatcatgccttacacagtactgcacaagtacacatatgcaatcttcacactcccccatgaagaggtgctattagctccactttacagaattaaggaaactgatccccagagagaattcccttatccaaggccatgccattagttggtgttacagctggaaccctgtctctttcatgttaacctcccataagacctgtgtttgttctctgtcttttacactagtctgggaactcctggggacaggtcctcatcttggtctccttgggcaccccagaaccccatacagggcctgtctcagagaagaggcttaaataatgttgaacacatgaacaaggctccactctgcctttggagatgaactggtccagttcttgtttatagatcagaaagctaaggtcacccagcgagttaagggcagagctgggagcagagcacaggtctcttgcttccaggatcttggccctcctgagctagtaccaaaggccaggagctgggctgaggaccctgaccagcaggacgtccccaattccaccatagagacaggcacagagaggctgtgcaggctctgggctgttagtcctgcaggacccacgctctttacagagccacacctcagtgatgagagctagcttaaggggagagctggcattggctttgtgcttcctggacatcttccactatcccaagaacacgtcctgtaaacactgcagtgttgtcaggggtgggtgcacttttgcctagggagcagaaatgctgtgcttaggggctgggagtgagaatttcctcctacttcatgccactgtcattaaggtcatgaaaaaccatgctgtttccatccagtgaatgaagcaaccacatttcctgatgctggggcaatctaagaacggcagtcccctttgccagccaccacacctgcccccacaaggacagcatggggctaggtagaaaggtgactggctgggaatcagggagtctgagttccagcaccagataggccatggcacactgggctgccgtttggtggatgacttcacctctctgggcctcagagtctgaggggatttagaccatcttgaagatcaattccagggcaacttctgtgactcagtgaccaccaaataatctcttcagatttggaggaggggagtggaaaccgagcaagaatctggactgctgctttggcagaaggcagctagttttctgcaatacccttgggtttccagagcctaccatttccactgcaccccggcctgagatctagactgtccatgtaatgaccaaggtgcctcccacaggcaaacagactacttctccctcacagcctgccgtgatatctgggccacactggaggaggctggtttgggtggcagtgtaccactttcccaggaaacacagtgttggaactgagcagggaccagggatccattttagcttttgatgacaacaatatgaataagtatagttaaaaatacttactgagtgccagtgtggcatacactgttctaagcacactccgcatgtcttaactcatttaattatctccacagtcctatgcgctaagtgttattattatccctattttacagaggatgaaactaaggctcagagaggtgaagttattggcccaaggtcacatagccagtaggtaaggtagtgggattcaaacctgggcaacttggtacctgagtccttgttcttaatcactttgtgacagtgctgtgttgttgtcaaaatgattcccaaggaggaaaaaggaaagaatgtggctacaaagtggactctgaacaagctggggtttctccagggtttatacgtggaagaaaagatctatgaccaaacaaaaacatcatggggtgtcctagacctgcatgaagatggtttggaagagcttcaaaatgctaagatagacctaaggactttttcagaactactaacagagaatggaagccgcaagctgacaaatgtcagctcagtacagtaaagaaccttcttagagcactgtccaaagatgaattggactgcatcatgagatggtgagttcctcttgctggaagtatgcaagcagagaccagagagaggtgtagttgtataaaaggccttaagccatagaccatgtggttatactaatgtaccagattggtgcaattctggaaggaaacatgccagtgaaccaaacagaatattccaagaaaaagttcgcaggttttaggagcactataaataaataattgccgaatccaaattaacacttcctttctcttaaatggcctgtaacattttcagtcattagaaactagaggcagcttagataattcaaaagggcattggagtaaaatctagttttgatctaggctctgccatttactgtgtggccttgtgaaagttacttaacctctcttgtgttttggtctcctcatctatgaaatggtgatattgcaccctaactttcaagttggttgtgaggagaaaagtaacatttagcatagtacttggtacataataggtatccaaaaagttagcagtatgaataattataacagcatcttgggagtggccacagctagtaagagacgctgaagaggaaattagcaggacattaacacaaaagtggaaatcttggtcagggatgtctgtagactgacaaagacatctagggaataaatttggaaaacagttctgtgaagaacatccagtcaagctaaggacaaattcaatgcacaaagttcactgaatgacaaaaggggaagatatgagagcacaggaaattatagaacacagttgtgctcacttatctacaatatgaatttggtttagggaatttagacctaatttggtcagagcttctggtctgaagacacactaataaacattttttaatttgcagtcaacttttaagattttctctcctcaaataattaaaagaagaaaaatagactctttggagtcagataggtctgggttcaaattctgggtttgttcaacatttgccagattatcttgacctttctcagactctgaccctcagttccctaagctatagaagggagatggttatgttacttcagaggtggaggtgagcagtgaccagattcaagggcccagcacagtgtctggcaccatgaggctgctcagtaaacaagaccagctgttattccacaaatgccaagtcagcacaatccaaatccctaggctggccttgtcagggtatggtggtggcttttgtctgacatttgaaattattgaatttcaaacttgctgagctttcaggggacgagttcattttatagctcctgatgtagcctcagatcaaaggcaatgaaagcgtaaacattagcgtttcttgaccacgtagcacaaataggtcaaactgtgagtggcattgccatccactggtaaggagggatactgcagctcagctccatttgctgtcttactcccagaaaaggaagaaggaatatttcaggagttgtttgtgccaaattctagaatcttggaaatgggaagatttaaagtggtactagagaatggaaacagcagatgtaagaattaagaaaagcaggaaaagactaacaagacaagggatatccatataatgaaggagaggtaaaaagttctaaaattgctacaggcattcctgttagccaagttttccaactcagtcttttggaaaatttcttttttttcttactgagactgtatctttgatttcacaacagaaattcatggcagagcaggatcactttatggctaactttattgaagtgtatctattccaatgatatgagggatacagtgacaaagaaactcaataaacatgtttccttgtaaggtgaccagtctcagctttcagagaggaaatctgactactagtctggctctagttctgcaactggaacctgaggatactgtggctttaaaagctcgccaagtgcttttgcaaatcagtgatgagaagaaaaacaaggctgaacttacctctgtcatgcggggcttgcgggagctggatggcacaagccttcctgcctcaggatgcggagctgtggccatggtgtatgtctctttgctcactttctgcttagacctcaggagggacaaagcagctttagtggaaacccccggaaggttggggttgtacaaacttatgcaccaaccagcgtaaacagaggacctcctatctgcatgctggatgtgatttggcttaatgtagtttaaatagcaccaactgacattagtggttgtgtggaggctggggaactgcagtaccttctttgagtccgtaccttcttgtgacttggctggtctggaggacgtttctgacagaggcagagagctcggaggtgccaaggaggggagatcaggttgttccttggaatcttctttcttcacgctcagtggggtcaaccctcttcggtgaggtttgccagatggctggggatattccttcaaagcttctgagcctggggctgtcccatgggacaatgcagggtgagggaggggaggaatttcctttgtgtcagatggatctgaggacaggctggacagcatttctagctccctcctgccttggccctggttgcctaagtgggatttctctggcctcttcccatcctcggtgctggtaaggaccacactgcatggttttaccagctcaagtttttcatctgccttggaagcctcctcctccttcactcttttttgctgctgggtttccatggtaagttcaaggctgccagctggtgaaaggacacgtttgcttccccctgctgttgatgaactcccctccaggctcaagatactctctgatgacagggaagtgccttttctttcaggtaatgtcacaggcactctcaggtatggagttgggaaagctctgctttgctcttcacttaacccagaagggccgggcccaacctcatgcacatctgcaccacatacagtcgtcccctttgatgggggttcctcaaacttgggaagtgccacagttgctgagctgccttgggactgggtgaccaagatctgggaaagggtggtgtacattgcgctcccataggacggcatattggtctgaacacggacaggcacaaccagggacaccatggtgtctggacaggcaggcagggccagtggaggagctgatgtaggtgctgaggagctggctgggggagccacagggggtagccggatgtcactgctgtactctgtgctgggggagaggccagcacttcctgttgccagtggggccaggctggttttgatctggggcagatggctttccacatcaccagggagctgaagtgcaaactgggattgcagaggcaggaaaaacccagaagacagtgctgaggaggtcgggtatggcatggggaggaaggaagggggctgcctgaaggggatgttggctgggtgaggcatgagctgggggagatggagttggcctgggtgcagaacagtaggctggagaggaagcggtggggcttgaaataaggagggaggaagtgggggcatggagtatggtgaggacaggaggctggacatggcctgggtggagaagaattctggagactgtcctggctcatgctgcacgagatgctggaaggagaaaagggagactggtgggggcaggtatggcttctcatgcaggggtgtctgggcaacggggtggtggaacacttgcagtgcttctgtgtagggcacagtgggccccaatgggggcctgtcctgccctgggcccttgcctcccgggggtccaccatgtgaggtggccgcagaggaaatctgggacaatgagcttttggcagagggtttactggatgagggctgtggttcttcgctctcctgtcttcccttgggggcaacctccaactcagattctggaggcctgctcagagaggcctgtctcaccaagaagcattttcttctctctggcggggccacccgcgctggtggagccactggggctggagcagaagggcctgtcaaggacaagctgccatagtcaaaggatttgctgcgtgtctcggtcatgtgggcagaatgggaaacgttggggctctgctctgaggctgacctccgcatctctcgggcatgtgggtggtggctggggacagtcaacatgtgggtgcccaggggtttggggcgcatgtcagatgagggactgggggcctcggctttcccatggtcatccctctcaaacgaggctgagcggctggacccactcaaagagacattgctttcctggctcgggctgcgagacagaggcacagaggactcgaagctggactcccctgatgattgggccatctctgccaggcgcaacctcttctttttgggtggcagcttctcagctgggagctgggcaagtgtctggctgcgctggggccattggaactcctcagtcttctcaggttccttagggggcggctctggctctgtgtccggccggtcaggctcctcagttactaggatctcaggaacctgaatgttgggctggcggaccaacttaggctgcagggagtgagcagagcgtccgtgtggggcaggtgggggtgatgggaactgggccagaggtttgtcttccccttccaagccactcggctgctcgagagaatcagatttctcaaaggagctggtgtgctggatgacagaaatttctttggacgttgttctcctctccttccctgattctgaaccggaccctggcttgggagtccttggctggaagcccgtgggtccctccaaggagggcactgatttacttggttctgctggtgacttggtggactccaggggaaggttccgagcagcatcagatggcccggggctgccaaactgactttttgtggactcaaaggcaggtggctcttcctcgtccccaaggctcttctctttcctcctcttcctcagtggagtgagttccagggtggttcccagtttgtaatgcatcatttgggaccacggctcatgctcaatctgactcttttcagcttctggagatgtgtgggtgcctgcagagatgggctttgcgatctgaagctctgagcagtagtattttttgtgggcttcgtagttatcccttttcttgtaccgagcaccacatatgttacattcgtagatcaccccttttgttttcaaacccttcttggtctttttggtaagctcgctttccttgggttccacttcgtccgagggcttggaggctgtgtctttgctgcttgggccaggctcctcagaactgtattcccctcccaaaggtaattcgattgccggctggcgcttcagcatccgggggtgggaggtaaacacgtgactgctgtggctcagggcttcggagtcggtgatatggtcatcgaaggagtagctacctcggaaggggtggtggggggtgctgatagtgcaggcggcagaaggcattgagtggcttctcaggagaggcacagggggggcggtactgggcgggtgctggaggctcagcagtgattgttcaggcttggttttctcactgtgggatgacaggggctcccggtagaggctggattttggggactccatgctgctgcgcctggacagtgagctccgccttggcttcacgctgtcgatctcgctggtgtccaccacggcctcgttgatggtgatgagcttcgtgatgtgctcgatcacctgcgtccggggtacagacaaaggcaccaggctgggcttgtcttcggtggacaggggcaggaggggctgggtggaggtggctgtcagcatggcggtccgctgtcctattcgcccacacttgccaaagatgatctcagcgtaggacttggcgttggtgtttggggggctgacctgctgctctgcactctcggagcgagagaaatacccagactcagtactccctttgctgcctgggctcagaaacgcctgctcatcgatcaccttcttcctctcgcttaagcggagggccagcttctgcttaatcgtgtgggtgtcttcaggtttatggctcagggggtgctcagatgagggttccacaaatggaggggggtcttcgagtgactgggctgtgctggactgggacagggaacagcgttcgtggctggaactgtggctcccagagctgtatagcccgctggagagaaggggctgcttgggtcttggggagagctctgcagggtgaccagaggtggcactagtctcctcttcagaatctgtgctttctccctcagtgggctcctcaaactcttccccagggatccgctccatctccagcccatgtgggtacatctcgccacccatgcctgaggccaggcctgctttgatgcggtgggcatgggacttcctgtgcttgtagagattactcttggtcttgaaggagaagccacaggggccgcaggggtagggcctctcacctgtgtgtgagcgaatgtgcttctggagcacgctgggcttggcacagggccggctgcagtactggcagatgtacttgcctggcttctggggcttcctctccttcttgtgtgcctcttctgtgggcttcaaggagacctgggaaggacgaggcacgaagactttggggactccaggaaggtcctcggggggaatgatggaagcgtgggaaggaaggagctggctctgaggatggagcccaggggccacgaaggagccagagggtccaggtctcatggggtcaaccagttgccatgtggacccctccaggagatgctcaggtttgccaggcgacatgaatgctggtgtcagagggtgctgcggaagctgtgagatgtggacggatgcttcgatggggggccttttggggggcttctgctgctggcccgttttctcctgagagccttccctaagaactgatgaggggcccgggaagggctgcggggctaagagctcttgggcggggctctcttgggtggcagctgtgccgctgcctgggtatgggacgctggaagaaacactggtctgaatggcctctcctttggtcagccgcttccggggacttccctcagccttcttggtgcccttgacactttgttcaggatccatgaccttcacaaagacttcagatgctattcagggagagtcagggcgggctgcatttatgaataatcccagtgtcccaaggaggtgtccagctttggccacattggtcaagagctgtgggagccaaacccaagacggctttgggagttttttgcaagtgtcactggctgtgagtggactcggagcaggtcatcagggcccacgctattctattggtgaggcatggccctctactttgcagacagaaaacgcaccagcactttctgcctgaatgtctgtcgggaaaacgtcatgaaggatgtcagtattgccattgtattgtttcagctggcagtggcaggtggcccccacgagtcccccgtgtgctatgcaaacggttgaaggttggagacatctgtgtccatggcccagtcatccctggtcctggcacaagagatgccacgctggatgctgggggtggctcttctcccctttagttctgggttggagatcaacggccttggaggagaaatcacgctcttcttctgtgtgatagatgtacacacacacagaaatacacacacacaaaagagaagacagagttactgggactcatgcacagcctgggcagcccagactcggtgccacacctggctgagacccctcaaaagttaaccagggaaactcaagcagaaccacaggctccggctccacatgtccaagccctgcaattctttcctcccccgctcccatgtcagtgttgggtgacctgaatgccagtgtgtttctgaggactgtggccatgtgggatgctgagaacagaaggcaaagtgggctctgggaactgcagggtggttagggacagaggcctgggctctcatctctgttttgtgatccactctgagtgggtctaagctctctaagcctcagttgcctaatcggtaaaacagataacaaatcctgcctcgactgtgcctcggagctgcagtgggcccaatgacattggagatgcagatgctgctgggtgaactctggatggggccatggctggtgcaggagggaagtgcctgtggtttattcaggggtgagttttccaaggggtagattattctcaggttagtatttctctctggccctgggttctgaaagtgtccacaagggacatcattcactgctttttaccccattgctaacccgcaccccagcccatgtttgaagacaaaactgcaaactactgccacagcctgtgagaacttacaatctgacacagctgtgaccatttgcttgatccaagcaattgccaggaggatcattctggaaggttcctctggctttgcagcctttccttgtccagtcagtgccctggggatgccatggaaatatggggatcattgccctcaagtggaggagcaaagttggtctgcatatagccccaagtgtgtgcctcctcctagggccagctgcaagcagggcagtctcagcttcctgggctcaggtgcatcctcagggccctcctccccaggaacagggtcggaatcccaaggctggagtcaccatggactccatctcacccaaccacctgactttggacatcatgaagatggcttactgaaggtcccgtgttgctaacaggcagtgttgccacctggacccaggcctcccatggccagagtttgttccccagccccttctcaggtgtccatcccctggcatcccttggcgaggccctgggtgagtgatgagcatctctgtgcttgctttttctcctgtgagcatgccctacccccggcatcctgccctcaggctcccctcatgctcacactcttcgtttcactaggtgtgtgatgatacagacttgaaaatgccacttactacatttttgcaggtgctcagaagacgaacaagtctttaagactcaaataattgtctcttaaagggcagggccctcggacactgtgatatgctttggaggagcaggtgatttgatcttttagctaaaaagcatatcctctaagttcactccttttgtgtgccttttctacttggtgctacaaagaattcaaagtaactataacaaaaccatatttatagaagaatgacaaactataaatatgagaaaatcataaataagaataacaaatcagaacaaagaaaatggaaataaggcaaaaagtcaggattggtgggataaaaagagtactgctataccaataataaggacttatggtgtttctataattcagctatatatttatatatgagcttcctggcagccaaggagaaaagggagatttggtccattatggagtcttatagccagacaggatggaacatctaagtttcttgcaaaactttttcatgtagcacttcagtcaggagcagtgaatgatgcaggagatcatttatgtcttcaatgacacccctctggtcattgaatacagtgacggattcaatgacatccctctagtcattggatatggtgcaaatacagtgattgatatttgtcaatgaaagactgtgtatcagcagagattctcctatgagcagtcaaaggcctcctgtgacttgtaccaaagcaggctgagtgtggggaagacagacaaatctcatttcattagattacatctcagtcaacagggtggccatataagataccatccaaactgggacacttggagaatgaaatgggaactactaacagtcatcgaggaacaacaggaataaacaaagacagtcccaggcaaaccaggacaaaatggttacccttacaattaatatttgccttacggccaaaactaggcataagtgccaactgtctctgggtgtctcatacatacttttgatctcttctatggagactaaagttacaccgtgatcttctgatagattcttagagactgactgtctagtccattcctctcacttgacagaagagactgaaggctagaaaggtgatatgattttccctgaaaatcacacgggaatggtggcaggactggaccatcctgtgcctcttgaccccccagccaggactgtctcccacctcaattaatagaagttctctgtggcttctgtggcatgatgcgcactgcagtctatggcccctagtcctatggaagcaccggcatggccccaggggacatcgctgtatccacggcaagagggagtaaggaattgtctagcatctgaacaatagagttgccctttcaacctatgtcctaaccacactgcagctgctggacagaagaaaggggagcccagcaaaggtcggggaactcgtcctggcagccttaccccaggtcttgcttacctaagctaaggcgggcagaagtgctgagccttctaaaaatcagacatggtagacatggtttgcagcacagagagaactgctctttgggctgggctgggcctcctcagcctggctgcactgtgatggagaggcctttgggtgctatgtgtggataatcaagggttggctatacttactattcttattgatcctttcatgcaaggatctgagagcagccccaaaacaccagctagtggtaagctttgcttcttccgatggatggatgggaccctgcagcatgactgggtggtgaaatgatcaatctgagtgggggtcagctggccaggcaggactctacattgcttagtcctgccttctcccctcactgagccacaaggctctccttggcaggtggtggagcgcccagcagctggggtttggtgcaattcccagggccaggtgggaggggcagggtagatgaaggagacagtcagatgactgctgcatcatcagatgactacagggccagcactgcctgcccagggtcagtgtccagcctgcacctgtgggctggacatggtgtttctccaagcagaggcctcctacccacacttctgagtggggagcaaaaaggccacaggagcaccgttggctgccagggcgcagagtgagcgaggcctgtgagctggaggggccaccctgtcattctgcacaacaggcatctgagccatggtggagggtggctagcccaagccacactggggcttggacttctggactagtgctctctgccagcctgctctaccacaccatgacaggtctgaagtgcttaagaggaggggcagggggagaagggcagccaggaccacaggtgcagatgtaggggaacctgcaggacctaaggagacttctgtcttggaatggattccaaatgtggtgcggcataaaccgaaggaccgttctaatgactgtgaccaacagacactaagaaaatggttcttttctaccttctgtggttctgagggtatgtgtgaaattttaacacaaacttgaagtgataaagaaaagagccacttttccagggaattggtgagagcacctgtaaaagtcaccagagaaatgggcccaggagctgggccaacagaggcctgaaccccagaccagaagaggatggacagcctctactgatggtcacagaatgggccatgaggccagtgagagctctcgctcagagaccagcttataaccctgaggggaacctgagcttcagcagccaactggttagctcccacttcaagaagcttcctttggtctagctgtgggagcagcccaataggaaggagatcgggacttgctggggttggagccacaaaagcctcaggggagtgggaagtaatggaggagcccggggccaaggcagggaggcctgaagctctggaaccaaactggaaagcaccttctgtatcgaaggcgtcaggacaacatgaccatggcccagggtggacaccccagaggacatttccagagggcaggtgggagatgggctctctcaggtagacaattccaccagtcctggcaggaggccagcttgaatctgccttgggctctagactgaggagctggggtccccggtcaaagttagataaggctggggcaagataggggcaggggcctgatgtccaaggagctgttaggctaagctggccccaggctggtggggcttaatacagctctttgcttgtaatttacttacacacacacacccccacatatcccaacatgccaaaatctggtcaaaaattttactggcagtaataaaacatactgatgtcaaaaatataagaaaactttcctattaactttaatacctgggaacccagggcacaaggccacaggctgaagaggaggcactcagtaaatattcttatttaatgacctagcaacaaagccagtgccccttctaaaaatctctgtgtacaacactctgtgtgtgtgcatgtatgcatgtgtgtgtttaagctggagcagaattcttcacttgcaaaaaaatactaaaagtggctgtgggctcaggtggtggcaaaacaagccagatataagcatatgggtctggagactaacagggattggtagtcaaagagtcacagaaggatgtctgggcaaagagagaggccaaggtcaaggcggagctctggctgggaacagggattgtggcagagactgaatatttcttccattagccagttctctttcttgtagtaatcaaaggcccccaagctgggtctatggccaccagctagaggctgcctttcccagcctctcttgcagctagttctggccaatgatgtatgcaacttctaggccacagccagaaggaaaagtgcttgccctccacctctccattttgtcaggaaggaacatggatgtggtgggggtgagccaactgtgaccacatggacaagaacatcaccccaaggaacagtgggacaagaagacaagaagacagtgtgaagcaaagccacctgcccctgagagagacatacatctttgagcttgttacttggtcccttttggagcagttgaacaaatacactaactcatccaggggattggagtgtgatgttggtgtctgggaggctgaaaagggtttgccagaacccaggtctaggtaagtggggacacagggagaggtagcaacacagatcagggtttagttctaaagcacaagacaggcacctgtagcaaggtaagcatccagccactaaacccatgcatgcggcaacacagcacagcgactcccaaggtagctttgagactcaggcagcctgcagctgaaccctggctcctccacctcctaactgatggtcccctaatctggacacccctctaagccttagtctccccatctgtaaaaagggacagtaaaactgtcatgtgtggtttaaattgagttgactcatataaatctcttggcatggcacctgacatatagtaagcattcaataaataataatcatcattgctattggagaaagcatttctgtggaggggctgtcatggctgtgtggaaagatctctagactagattccagtcctggctctgctgcttttaggctgacaggctgtcataagactgactggggttaccatgtatgtaaagtcccgggcacacagctggtgctcaagaaatgagaaccaaggttgaattcggaggtcaaagcagggcccccacagaaaccagtgtcacactgacccaccaggatattgggagagacctgagttcccctaaacaggggaagcattggttcttgagttgggcagagccttggcctgcatgctggagccaagtggtcctagcagtggggataagaacacaggcaggcgatcaggtggtgaaaggtctgatggatctgactttatgggatacttttcagattgaaggcttcataccaacccagggcacaagctagaactgataatcatggatgaaaatcatcacgatcctggcacacagctttccaggccaccagatccatcttcctgactccatggaagccacactagatggttctcctactgagattgagactttgcagcctccaatgtacttcttggtcactggattttcatgagataatgaccattcagtgaggaccatggcagagcggctctgtcttgtcagtgtcctgaattctagcctcgattactgccaaatagaagagtcacatgagcacattcctgtcctcaaactcacaacacttgcatccctcttattgccatttgattctgggagacactgactcccagagaagaggcatgaccgacccaacgagagcgggctgggaagtcttcaagccaaactaaagacatttctgagtcctccgatctgctgtttgaggtcaattcctcctgaagagcaggtgctgcctgacgctgacttgacctgcttgggagctctacaggggcagagaggtctgggctgcaggtgggacagtgagtagcacacctggtgagagccagggggctgagcacctgggtctcctcaccacaggcagccggctgcctccctggcttgctttcttcaactttctctgggggttggtctgtgggtttcttccagcaagggcagatcaggaggcctggagtcaccttggctgccatgggtccggtaacctgtggcaggaagccctggaacacacaggtctactgtgtgaccctaggtaaggcactttcctctctgggcctcagttttcccttctgcaacatgaaattgggctgaatgatctcaagatcacttcctttctgacaattttggattttgaaatctaagaccaggtgacagtgtggccaactgaaaaatactggccacatttcctagtttgctcaggctggctgcaatattgaccttaagctgaggagaattccacatggtaacttatgcctcaaattcctgttagaccttggtcaaagtgagcatccatctagtgatacctgctaatctttgtaaaaggcaaccctccccgtgggactgactgagaggtggactggcaaggtcaggcccacctactggcccaccatcctcttggcttctctgggggaagggctggggaaggatcctgtgctggcctgagctatagttgctgacaccaggcaacctgcaattgttggtggaagccctgccttttctgcagatgcttggctcacctataacattctaacctcactcaggtcagggtatcccacagcattgacctaccagcaatcagggggttctgtgcagagaaaactacccctgcccagggatccgcatgtatcccagcaagcagcccaggcctcctggacaccggcttctgccagtctaggccctggccaggtcctgacctgctgaccctctcttgggctgtcaccacctccacccctgtccccagccatgtcatcaatccccaaatctggttgtttctgtcccctgcctctcctttgggcttgggttcctacccctagttttgtcgagaccagaagttccaaagaccaacgacagaacagaaatgctggggaactttctccttcttttaaacgaaaattcttaaatgaaaaattacttgaaaaattttaaaccactgcagaattgtaccatccttggctctttcccctgaatctccctgtccccacatgcccctccccagagaagctacagttaatttaatatatgttcttcccgacgtcctaatgtatttatattgatctgcgacttgttttttttctttttttaaatctatgtatggatatctaggtttacctctttctttttgcgggcagcagcactgtattccatttttggctgtactcaaactcagccagtcccttactgatagatatgaaggttgtttccagctgtttctattccaagaaatgctacatagaatatcttctgcatacttgtatgagtatatcacaggctaacctcctagaagggagaatacttgattaaaggggatacaccttgaagcttttcatggggactggcaaatagctcttcaaaaagcagaaatttacacttccgccaatggcgggtgagcactatttccctaacctcctgcctatctggaatataaactgtctctttaacattagctaataagaaaggcaaaatggttgtatttggttcccattgctgctgtaagaaattaccacaaatttagtggcttaatgcaaaatttactatcttatagttcgagtggtcagacgtctgaaataggtctcactcggctaaaagcaaggtgtcagcagggccacttttctttctgggggccctagaggagaatccctttccttgcctttcccaacttctagagggtacctgaattccttggctcatggaaggctccccttccacctgcaaagctggtaacagccagccgcatctttctcataacaaatcattctaatattgactcctctctccctctcctaaggactcttgtgattacattgagtccacctggataatctctccacctcaagatccttaattaaatcacatctacaaattatcttttgccataatgggcaacatattcagtttccagggtttagaatgtggatagtttgggggtccattattttgcctaccacaaagatatcttacgtttcagttataattattttattattattttttgaaatggagtctcgctctgttgcccaggatggagtgcagtgacttgatctcagctcattccaacctctgcctcctgggttcatgcaattctcctgcctcagcctcctgagtagctgggattacaggcgtgcaccaccacacccagataattttcgtatttttagtagagatggggtttcaccatggcggccagactggtcttgaactcctgacctcaagtgatcccctgcctcagcctcccgaagtgctgggattacaggtgtgagccaccccgcctggccgatatcttatgttttaaaacctgtttcttgatctctagagaggcttagcatttttgcataaacatattcagttatttcatttgggagactatttttctggtttacataaactcttttgatattgaagctattgatcctttacatataggttgcagatatcttctctttatcattagtcttagctgtacagaatttttttttgtttccatgtggttaaatgtaccattaatttttccctttatgacttttaggtttcacatccaatattactttttagaatgtcacccaaattttcttctagttccattatgatttattttttccctcctttcctctcttctttcctttccattgtcaccttggctccatctggcacttatttgtgtgtaaggagtgaggtaaagataaagcttaagtttttttactccctagctagccagttgtcccaacagcattattgaatagtccacctccccacctctgaaatgtctgtggtgtctgataaaagcacaggttctagccctattccaaatccactgaaatagaatttgtgggaaagggacccagaatctatatttttgctaattccccatgtgaatattgtaaatctggcatatacttttctactggcatttggggaagctgatgaaattcctccaactgcctcctaatcaccttgcttccaggtttctagccttctcccagtccaccccactccactattcattgtggaaagagaaatctcttcagttgccaagctcaccagacctctccccttgtcagtaattctcagtagctccccaatgcagagagattcagccattggcgtttcagtcctgtcaaaatagggcccacccagtcttcctggcctcctctctctccatcctgctcttacactttgaactctctgcctttacacattgttgttcctggtgggacatgccgagaaaggagtctggagactaattccacagaggagtcagcatacccttgtttgagctgggttttgaactatgggaagatgttgatggtgagatttgcaagaaagagactctaggtgggaggcttgtgatgattaatatcgaatgtcaacttgattggattgaaggatgaagagggtgttgccaaaggagattaacatttgagtcagtggactgggaaaggcagacccaccctcaatctgggtgggcaccatctaatcagctgccagtgtgtccaggataaaagcaggtagaagaacatgaaaagactagactggcttagcctcctggcctacatctttctcctgcactggatgcttcctgccctcaaacattggacgccaagttcttcagctttgggactcagactggcttccttgcttgcagacggcctattgtgggacctcaccttgtgattgtgtgagtcaatactcctcaataaactcccctttatgtatacatctatcctagtagttctgtccctctagagaaccctgactaatacaaggttcaatgtacgcaaagcacagggggctggaatgtggccacaggaaatgtttcagggctccaggcaggagccccacgatgtgctgggatggcttctggacactgggaggtgtttccacacgtcccctcctaggccccagaatgacgagataaagtcccaaactgtgaagcctcattatgtcaagcagatcttctaacagagctgtggtcagtgactgccctctgaaagcaggtggaaggcacaactgggtccccatggggtgggcaagggcgcactgctgctgctgggctgggccatgcttccagggtgaccagcccctcataccctctgacctggattcattcatggaaaacaggcacaacctagagtccatagatagcctgtgttggaaggaagaggttttttgctaatccaatgggtcaaacagtgctgttcccccaagaagcctgggatgtctgccttgagccaggcctgtggcttaaccagttcatcagtgtcttccaggtgaacctgcctccccctggcctgggcaggaactaggctccattcagatttgcatttccagtgcctgatacagaactccacactcagtaaaatattaaaaatatttaaaaacacttaactgaccacctaccatgcccaaacaaaacaaacatattgattcttacacatcccctttttatagatgggggcagggctgaggctaattgcttcagatcagacacaaaaaggcaaaggcaggatttgaaccctgagtgctggccaacatccaggaaacccccaagggccctgatcttggtcagaatgaccgagtggatcctaccttccttccctgtatctgagatcctccaggaagtcttccctggttaactgcagccacctacatacacttgcatcaaagtcctccctgcatgcaagtcactctgcatgaccatgttaaccttagggctgagtttcttgttaactgctttttccctcaataatgaatggtggatttttcactgtctgggaggctcttaaatcatttcccttggatgactggtctctgtgttcctacttttccttctcctcctccctcccaactccaagacctaaacagggcttggaatttctgcacactggtcaaaaagcaaattctatcgaaagcaaacagaagcctaggcaatcctagacgagttagacccggctggtatttgtcttcctgttagagagctcagggatccaggtgaaactgatatcaccaaggagaatgaagtctcctgtgacatccccatagaaagcaaaaacacatttcacagtcaagatcaagcaatgatgtagcaaaaactctactctgccagacttgcagaggcccagatttcccctgattgtctgtgggcataataattcagaggaagatcatctaaaccaatgtcctgtgcctagacggagcaaatgaactctgactatgtgccagggctgttcttagtatgttacgcaaattcactcatttattcctcacaatgacccttcaggcgggtactattatcattcccattttacaggtgaggaaactgaggcccaaaatcacaaaactgataagtagcagagacagaacctgaacttggaccatcaggtgactcctgcagtggtgaccctcaaggcagccaggccacaccagcctcacagagaggacacagatttgaatcacagtcctgacactgcaggtaaccaaacactgtttttagcagccttcctttccttcataagggctaagcttgttaacctttttttacctttctcctggaaaagtatcgacagtgtttaagccttgcttccattgagaccaaaaatgaactgacattagctgctacagccttacctcacctacacacatctacaaacaaggcccagatgcttgtagctaattcacctactaagttatctaatgtaatgtacatagctagctatccacctacctatctcattgtttatttatatccgatttttcccatgaggattaaaagaggcatctggacacccatgagaactcagtgggcatctatgaacttaactcaacctgtttatcttaaatggtccaggaagtgcttgtgggtgaaagagcttagggaagaacaaagcctgaaatgagagttgcgcaggcccagcaggcttgtcttctggccatttgtgtccagccagtctctcatcaacaccgcctaagagagacccaaattccacatttgctgcagtggcctgatctcttgtcagtttctggcaggtctctagtggttcctttgatggcattttgtttctatacacgtgactgtggcacaaaaggcacacctacctacaagcttcctaggtagttaaggttcttgtgtctactatggagagcaatacatagaatacacaataatatatacacacacacactataagatgaaccacagaagaaaaaatgactgggagactgggtgacatacagagtgtagtccaacagaagaggtggcgactgcctgtggcttctgtcattcttgcccacatggcaggatagatataactgtatagtaatgataaagcagttataacgatcactctactgcaactcatttcttcatttctccactcagtctgcaagtactacgtgggccttctcaatgccaggccagtaagatgaaaacagacataaatcataggccttactataagctacagtaatcaagacagtatagtatcgatacaaagagacacaagaagatcaatggaaacagagtagggtaaggaaacatactcccacacatacagtcacatgatgttatttatttatttatttatttatttagggacaggatctcattctgttgcccaaactggagtgtaatggcacaatttcagctcactgcaacctccacctcctgggctcaggtgattctcccacctcagcctcccaagcagctgggactacagacacgtgccaccatgctcggctaatttttatatctttttttagagatggggtttcaccatgttggccaagctggtcttgaactcctgggctcaagtgatccacccaccttggcctcccaaagtgttagaattacaagtgtgagccaccacacccagtctcagtcacctgatttacaagaaaaatgcatctgatagagaaagtaatggtcttttcaataaatggcgctaaagctattggatatccatattaaaaaatgaaccttgacccccgatatcataccatacacagaaaacgaatgtgaaatgaataaatgataggcctgaatacaaaagattaaacaataaagcttgtagaagaaaacaagaaaatatcttcacggaacttggggtaggcaaagatttcttactcgattgacaaacgcgtaatcacataatcataaaggagagaagctaaattgtgcttcattaaaatttaaaacttctgttcaacaaagactctaataatagagtagaaagacaaaccatgggttgggagaggatatttgcaacacatgtttgaaaacaaattcctaaaaatgagtaagaaaaaggcagtcaacgcacctgaaaatggcaaaagttaactcaaaatgaatcaaagacctaaactcagagataaaactatagaactcttagaaaacataaggaagaagcttcatcacattggatttggcagtaacttcttagatgtggcaccaaaagcatacacaacaaaagtacaaatagataaattgcctacatcaaaatttaaaatcttctatgcgtgaaaggacaacatcaacagagtaaaaagacaagaatgagagaaaacgcttgcaaatcatatatctgataagggattaacatgcagaactccaaaactcaacaacaaaaagccaagcaaaacgatttttaaaaaaatgagcaaaggacttgaagagacgtttctccaaagaagatctacaaatggccaagaagcacgtgaaaagatgctcaccattaccaattactagggaaatgaaaaatcaaaaccacgaagataccacctcacacacattaaaatggctacaacaaaaaaaagaaaaagaagtatttgcaaggatgtagagaaagtgagtggaactgttgcactctgctggtaggaatgtaaaacggtgcagcctctatggaaaacactgtggtagttcctcaaaaaataaaaaatagaattaccatctaatccagcaattccccttctgggtatatactcaaaagaattgaaatcagagtctcaaagagatatgtgtacatctatgttcatagcggcatgatttacaacagccaaaggtggaagcaatccaaatgtccattgatgaatgaatggataaaaaattcattcatgttgtagcatgtgtcagaatttccttctttaagacggaataatattccattgtgtgtatgaaacttgatgacattatgctaagtaagataagccagccacaaatgaacaaatactgcataatttcacttatatgaagtacttagagtaatcaaattcatagagacagaaagtcaactggtggttgccagaggctgtgggaatggggggctgttgttttatgggtatacagtttcagcttttcagaatgaaaagtaatctagagattggttgcgcagcaatgtgactgcttaacactactgaatttaaaatagtaaagttggtcaatgttatgtctattttaccacaatttttaaaatagcaaaagattttaacaggcactacaagcaagaggttatctaaatggtcaataagaatatgtcatgaagttttcccctatgttttcttctagaagttttatgtcataaagttttctcctatgttttcttctaggagttttacagtcttaggttttacatccaagtctttaatccattttgagttgatctttatgtacggtgatttttatgtatggttaatttttatgtaagataagaatccaatttcattcttttgcatatgaatatccagttttcccagcaccatttattgaagagactacccttcctccattgtgttttcttggcacccgtgttgaagatcagtcagcatatatactggatttatttcgggttctctgttctgtttcattggtctacatgtctgtctttatgtcagtaccatactgttttgattagtgtaattttttatgctttgaaattaggaaatgtgaggcttccagctttgttcttgtgtcagaggattgatttggctatttgtgttttttgtggttccatataaatcacagaattgttttttctatttaggcaaagtaatgtaattgagatttttatgggggtttcattgactctgtagattgttttgggtagtatggacatgttaacaatattaattcttccaatccatgaacacaggatgtctttctctttgtttgtgtcttctttaatttctttattaaatgttttgtagtttccagtacacaagtctttcatttccttagctaagttcattcctaagtattgttttaggtgttattataagtgacattatttttctaattttcttttcagctagtttgttgttagtgtatagaaatgccactgatttttgtaaatgattttgtatcctgcaactttactaaatttgttaattagttctaatactttttaatggcatctttaggattttatattattttgtctgcaaacaggaacaattttacttcttcctttctgatttaaatgtctttaattttttttcttgcctaattgctctggctaggacttccagtactgtcttgaatagaaatggcaagcaagggcattcttgcccttagcttcttcctgattttagagaaaaaacttttccgtttttcaccactgagtatagtattagctgtaagcttgttatatatggcttttattatgttgaagtactttccctctagtcttagttttttgagaactttgatcaaaaagggtgtgttgaattttgtcaaatgccttttctgcatctgttgagatgctcatgtgattttaagtctttattctgataatgtgatgtataacattaattaacttttgtatattgaaccatctttgtatcccagggataaatcccacttggtcatggtgtatgatccctttaatgcactatttggtttgatgtgctagtattttgttgaggatttttgcatctatattcattaagaatattagcctgtagttttcttttcttgtggtgtctttgtttagcttttgtatcagagtaatgctagcctcataaaatgagtttggaggtgttccctcctcttcaattttttttggaagattttcagaaggatcaatgttaaatctttaaaaaatattttggtagaattcaccagtgaagctatctggtcctgggcttttccttgttgggagttttttgattactgactcaatcttcatattagttataggtctgtttagactttatatttcttcataatttagtcttgtatttttctgggaacatatccatttcttttaagttatccagcttgttggcatagaattgttcatagtagtctcttatcctttttatttctgtggcatcagttgtgatgtctcttctttaatttataattttatttatttgagtctcctctctttttttctagcatagctaatgatttgtcaatttaaaaaatcttttcaaaaaaccaactcttagtttcattgatttttttcctattgtttttgtattgtttatttcttctgtaatccttatatctttccttctgttaaccttggccttaatttctttttctaggtctttgaggtataaagttaggttgcttatttgagatccttcttctattttaatgtaggcatttatcacaacgaactctctgagtacaggttttgctgaatcctataagttttggtatgttgtgtttttgttttcatttctcttgaggtattttctaatttcttttttgatttcttctttgacccaatggttgtttacagtgtgtcatttaatttccacatatttttgaattttcaatttccttctgctgttgatttccatttctatttatttatttatttttattttttattttttgagactgagtctcgccctgtcacccaggctgcagtgtagcggcgcgatctctgctcactgcaacctccacctcccgggttcaagcaattctcctgccccagcctcctgaatagctgggattacaggcacgcactgtcatgctcagctacttttttgtatctttagtagcgatgtggtttcaccatgttggccaggctggtctcgaactgctgacctcaggtgatccacccacctcggcctcccaaagcgctgggattacagtcgtgagccaccgtgcctggcctatttatttttttagatggagtctcactgtcacccaggctggagagcagtggtgtgatctcagctcactgcaacctctgcctaccaggttcaagcgattctcctgcctcagcctcctcagcagctgggattacaggcacctgccaccatgcccatctaatttttgtatttttagtggaaacggggtttcaccatgttggccaagctggtcttgaactcctgacctcaagtgatccatccaccttggcctcccaaagtgctgggattacaggtgtgagccactgtgcctggcctgctattgatttctagtttcatcccattgtgatcagaatatatatttggtatgctttcaatcttaaatttgttaagacttgtgttgtaacttaacatggagaaaaatccatgtgtgcttgaaaagaatgtgtattctgctgctatttggtggaattttttggcatttatttgttaggtccatttggtctatagtgttgttcgagtcatttgcttctctgttgatcttctgtgttgatattctatccgttattaaaagtgaggtattgaagcatataaaacaatgctcaatacaattttgtcattagggaaatgttaattaaatctacaacacattcaccataacagctaacatgaagcaaacaaaatgacgccaagtgttggcaaggatgtggtacaactggaactcttcttgtgcattgttagtgggaaggtaaatagacacatttggacaattgattggcaaagactaatgccacacacctaccctcagacccagaaattccactcctaagactatatcctatagaaatgcctatgtatgtcctccaaaaaacacaaagaagaattttcatagcagatctattcatgatagccaaaaaaactggaaacagctcaaatgccagcaacaaatagaatggataaataaattgtggtatattcatataacaattatacatagtaataaaaaagaacaaagtactgctacagacaaaaatatatatcttacagatataataataagtaaaggaattcagacacaatagactatatgccgtgtgatgatgtgaatgtggaaactccacaattcaggtattgtcaacgtgatagtattaagaggtgattaggctgtgaagattcctccctagtgaatgggattaggtgtctcataaaagtgcttgctgaggagacttcatctcacttgccctggtacctctcaccatgtaagaatgcagcaagaaggccctcaccagacaccatatgtcagcaccctgatcttagacttcccaggctccagaactgtgagaaataaatttctttactttatagattacccagctttagtattctgtactagcagcctaagacatactatatgattccacttaattaaagttaaaggataggcgaaaaaccaatcttatggtattagaaaataggatagcccaggcacagtggctcatgcctataatctcagcattttgggaggccgaggtgagtgaactgcttgagcccaggaattcgagaccagcttgggcaatgtagggagacctcatctctacaaaaaataaataaaattagctgagtgtggtggtgcacacctgtggtcctagctacttgggaggtggaggtgggaggatcgcttgatcccaggaggtagaggctgtagtgagctgagatcacgccacagcactccagtctgggtgacagaatgagactctgtctccaataaaaaaaaaaaaaaagagaaagggaagggaagggaagggaagcggaggggtggagaggggaggggaggggaggggagggaagggaagggaagggaggaaaggaaggaaaggaaggaagaaagaaaagaaatcaggatagtggtttctgatttctaatggggcaggtgggtatttactccgaaggggcatgaagcagttttctgggtgtacaattgttccacatcttgatgtggttacatagatattacatacacacacgcacacgcgcacacacacacacacacacacacacacacacatacatatgttaaaaagaaaactattccagtacagcggtacacttctggtttgtgtacataactgtatgtatgttatacctcaatttttgaaaagacatgggctttacacctgaaaaatacaaagcttatagggaaagagaaaaaagaaccaaaaagataataaggggtggtagatgccatgatagaaacaggttcccagtacaggttgggagaggctgactcctgggggtggggagggacggctcaccagcgtaggctttagagatacacacactgggctctgaaggatgaacaggatctcaccgagcagaaaaggggatgagtgggagaaagacagaaagatgctggggaaaccctaattgtgtgagaaggtccagtgtggttagagtgttgggtgtgcagagcatagtagtggggggtggggctgagggcatgaatcaaatcagctttcagatttgtttatttaaataaattccccataaacattttttgagtgaacaaatgaaccttctcacggtcatgatacatctgatgtctggaatggtaggacagatgtgttaggatggcagcaagtactgaatgaagagatgtagtactggtgtggttacaaagtccatttcttctcaaattattaatctctctaaaatctgatgtcttctaggccccagaatgccaaaccgtcctcacttggttatggtactgactctctgctgtgaaactgcagagtttttcgcattcaacctctctctcccaatttccttccaccccatctcacaatttttggtggttaccaatttttggtggttctggcagttgcttttagcatcttcaagtaatatacttaaattgcgattttctgatctatcaactttagacagtgtctattcacttcctactatgagcaataaaatttgtccacattctctactttccacttccttccctcctgcccaccttcagatttttgttatatgttattgcttttgcataacaattacattctcatcgacagtataattaagtctactctataggataattctaaaaagtgaagctagttaacaacatcattatgaagatatcattgcctgcgaagccactcagtatgaatggacccatgagaaaggcaagtggttccacgttactgaaacttggtcacaagaagaaaaatggatagcttccttcacttcttcttgaacctcatttaataattattttgggttccttttttgattgatgaaataactccaggaggttttattttcttccagaaaatataggtgactgagtgacaaactttctgaatcttacacatttaaaaaactatttttttcaaagtttgacaggatgactcttagtttatcctccagaattgtgaaagtactccactgtactggagcatcttgcatgactggtgagaaattctgaggtaatttttgagtctctctggaagttttttgttttttatccttgatgttctgaaatttcaccaagatgggtctgcatgctcattttactaattcctgccctaaagtcagtatgatctttctagtttaaaatctgtgtgtgtttcttttttttttatttttatttttaaattgaaatggggtctcaccatattgctcagtgtggtcttgaactcctgggcttaggcaatcctcccacctcagcctctcaaagtgctggattataggtgtgagccaccaagcctggccgtgtgtatttctcaactgagaggaaatttctttggctatatctttcactatttctacccaccccctgactgtctgtggcttctagttctagatctcctagttgatggatactgaacctctggatctatcctccatgggtcttaatgttttcttcttgagactttgctctgctttctgggaggttttcttggttttaacattgaaatgaccaatctggtcttcatgcatatccattgtgttattcagtttttccactgaagttttttccataatgatattttacaatttcagcaagtatttcctttcctccaattgtgctatcttcatagcaacctgctcctctgatattataggttatttcacttacagaggtgaatgaaagaacctcttacttactgttaaggatactactgataatttagttttgggctttcttatattcaaactgtttcctttgaaataagctcttccttttttttttcttttttccattttaggccttctctttcattctattggtttgcttccaatgtttggtgattttggttatccaatatatttatgaatgagggattatgttgtaaagttaggatatgtattaggatacaggttctagctcctataacaaggacctaactgcaggagtggcttagacgagacagtttatttctgtcttatgtgcaatctgagtttaagtggccatggctgatatggtggcttcaccgtgtggacatctttgatcttggtcttctgatatccacagcacatgacttccatctcccaccatcacatccacaccctactcagtgggaacgataaaggggagggcagagctgggagttgcacttgtcatttcagctcacacgagcccatggccactcctagctgctaggagggtgaggcagtgtagtgtttagctgagtggctgtgtgccctgctaaaatttccatcactacagaagaagagaaaaaagatataagtggaatactaactacatagggcttcccgtgaggtgtctcgtctatttctctgaccagttcagtcttgaatgtgagggtggcagtcatggaaaggttccctgcaggagggtgaagcagtgtggcaagtctcctagtaataaccgtggacaggaagtggccagggaactcccacaattgccaaaagaaggacttttctccatggtgggcataatgctatacttcaccctgagacggagctgccaatccttcttctggctccctgccccacatccagtctgctagagaggtctggaatgcccttgctcagctgctgtctcagactttccttagagagcatttgttggggaatttggcggccactggctgcctgcctctttgtgaagaaggcggggaggggtccaactgtacttgctcttctgaagggctctcaggggagaacactgctaacccattccttttctgtgctttgttggctctcagcttgaactatgcttggctcttctgagacaaaaatcactgagacttctggaatcctgggctgcaatgttttctgctctgattgctctgtctgtgcaatctcatgggctttctatcttcctaagatttaggaatgtttccgtcccacggatgacttcctatcttgttttctaatgctgttatgatgtcatcctttcaaaaatggctttcagctgggcacggtggctcacacctgtaatcccagcactttgggaggccaaggcgggtggatcacttgaggtcaggagtttgggaccagcctgaccacatggtgaaaccctgtctctactaaaaataccaaaaaaaaaaaaaaaaaatagccaggtgtggtggtgcatgcctgtaatcccagttacttggaaggttgaggcaggagaatcccttgaacctaggaggtggaggttgcagtgagcctgggcaacaagagtgaaactccgtctcaataaaaaaaaaaaacggttttcactgtcatcataccaattcctagggaagaggtggaggtgggcacttgtgctccaggacttaggaaatcaatgcattcatgactcattggctgaggccaatgtcccttccaggatgtggacaccggaaaggaagatgaacccttcccatgcagggcatcatctcagaactccatggtgtctgcccttagggggaacacttctgatgttcctgaacctgggcccccaccgatgcacaatgcccacctagttccactgagggtaggaacagccagccctgtttgcctgggcagcctagtagttcatggacaccagtcaatgacccgactgcctaagggcgtgcaagcctccgtgtaggcacctggcaggctgtgtttgcctttggaggtggataatcagcaaagtccctgtacactgtcagctaccacagctgagattcagcgagctatctacactaagtgtaccaggagaaagggttccaccccatcctctaaggttgctcaaaggctgtctccaatccataatgacacccctttttaagacccttcagcctccccactagtttaggccccacggcatggctctggaggcctcacctctctcattccctccatctgtgtgttccagccacatggagctggagaattctcagaacacacgccgttcccaatggctgaaatgccctttccctcctagacatgtggcaaactcctcaatgtcctttaaacccaccagtgatggttaattttgtgtcaagttggctatgccataggccaagacgcttggtcaaacattattctagatgtttctgtgaaggcattttttagacaagattaacatttgaattggtaaactctgagtaaagcagaccgctttccacaatatgagtgagcctcatccactcggttgaacgccttaacagaaaaagagtgccctccccagaggacaggggaatgatgtctgcagactacctttagccttggctcctccttcctggatctccagcctgctggcccatcctgcagattttggacttgaaaagcctccacaactgcatgagccaattccttaaaatctctctctctgtatacacacacacaccacacacatacacaattggttctgtttctctggagaaccctaatacacaacttcagacatcaaatccttcagcgagctttctatggcccccttacactcagccagtcacctctgtaccttagacactttgctgctatcacatgtcttacaccttgtggtaatgtatttgtttacaagcttttctcctcctacaggacagggttcttttaggccaaggagccagtctcattcaccattacatccctaggtgggtgaatttgtgagaacaagagagtactgaggctgatggcctaggggaatcctactggatggtgggaggggcattcccattgagcctcttgaaaggcatctggtaagacaggccagagagggacggttcctgcaaagcaggctaacagcactgctcctgaatatcagtcactggtggggcagtggcccacagccttcttcagctctggtgaggagaggaccccacaggccatggtaccacctgtccagcttctccagctccacccagggagcccggtttaattcaataaatacttactgaattccgagcgcaatttcttgtgaggcattcgcactctaggtcctgatctgacctccagatcttccttttttgacaacatctgagctctcaaaagcactcagggaatgtactgtttgtgtgcctgaggggagcagtcatcatcctcagccttcttaaacttgccctgagaccccccaagctcccactctgtgctccctgaacaagacgatgttgtcaagtatgatttcgtggggctgcatttccaaaaaataagctcttgcagttcatacaggctttcttccattcaaccaggtgaactctgaaaatcccacactgtgagaaagaaggccgtaggctcagggtgtgggggcagaagggtgaccctttgagaaaattactagtgtatgttacactcctgttctaaacaaaggtcacgggttgtccagggaattatgagcaaatgaatgagtgaatggatgaataaacaaacgctaagttgaatggatgataacgtaacccaggctcaagtcaagagcatttaattgaggaaacaggagaagagccagaagataagctatacacgggcaaagggacttccttaaaccaaaggtggtttaaggaaggcaaattccatctcgtaacaaagacacaaactgtggagcaactgggataatcaatcataagaaatgctgatggggacagagcgccatgtgccaggctctctgccgagaacctgacatgtcctcagtcctcagaacgagcctatcaggccggcaatgtttttacatccatctcacagatgaggacacaaaggcaccgaaggttccatcatgcgcccaggggcacacattcaacaaagagtgagactgcaagccaaggcaggcagggggtctgcagtgtgtgtctcaaccacttccccatttcacctccacatgtggctctagcagcctttaatcaaggaagcaagggaaaactcgaatgttgttcaggcctggggatctagagacccacctggctttctcccactgtcctgggcaaccaggcaagtcctctgtgagattgtgctgcctgattccatatcggaaaaatatggtattcactagagttgggtttcggggacctttcccgccctgacattctggatgcttctccctagcctgggaactccggttgcctgaggtcggctcaccccagagcacctgattctggccccagatgaacctcctgactaggtctgtgaagatataaactcgcccttcttgatggcccaggctttttctacaggacccaacctcacctcaccttcctgcctggcagtctggctattccaccctgtgatcccacctccactcctcccgcctccccaccttcctcctcccactcccacccacctgtgccccagctcctctcaccctttctgcctcctgccagggttcaagcccctcccttggcctgctgcccggtcccccatcttcccttctttgttcagccaaatccttcttgtcaccactgccagtttctccctgggacctctttccatctcagacagaacccattctgccttcccctggccggtgtttacacccctgtttcagatggatcataatcccaacaatgccgccttacgttagtgcagtgactacagctcaccaaaggcccctgtagccactgtctcatttaatttcacccaagttcctccttgcagacctcctgttcatggctccaactgccccctaagactgcaaacacaatgtctaacatacttcataactaagaatttcctcaaaacagccctctgggaaggggcttatcacttcgttttgcagatgaggaaacagaggttcagagaggtggaaagtggctgggctggatccacagctcaggactctgattctccgtcccatggttctcaaggattcatggtgttccctgagtcctgcctaggatcagactcatttctgtattcctgagctatcctttgcttggacaaatacggtatcctgaactcaggggaccaggagggtttgctggcttaaaaaatgaattcatcagggcctagaatcatcaccgtcctaagtgcctccttcagggtaccacagtgccagcccctgtcccctcccttcatctttgcatggaagagatgggcagagctgggccctttagggtctgaggtacaactgaagcctcagaagaaccgataaaccatgtttcttgtttgccacacagaaatggggcagtctctgcctctcattgtcccaacctggccctggcagggtgaatgcagcacctccttccaggaagcgcccaaggaagctccaagggacctggacagggcagaggattccctgggcagggagcagtggaggacagccaggagcactgggcgcggagtcagccgctaggggctcactgcctgcagggacactccctccattcccaagagctccaaacccttctgacaagctgcgtcctctccaaatgggtttcccaataggctttggcctgagtgaatgatttctttccagaacaggaacacacccctgccttccagcccaggccactcacagctcccctctccagaggcaatgacagttgtcaattcttgactgcttactttggaacgcgtggggcgggtctcgtgacattttatattgtattccctcactgtactaatcttttcacatgcccatctccccagctacacattttggagagcaggggctgtattttaaacaccttcatgttctctgtgcctgccacatagtaggcactcatgggtatttgtgagtgaataaataaataaatgaatgaacaaagttaaaattgtggaaagcttcagttaatagtttgcagaagtcactttaattccttctgaaaaaaggggtgtattaatttgctaatgagtagaattgtgtaaactttgagtatctttctcataaacataactctttaaatgctgtctagtcatttgattattcaaatattgagatacaattcacataccataaaattcacagggttgtgcaaccatcccaatgatgtaattccagaacacatgtatcactctgaaaagaaatcctgtacccattagcaatcactccacattcccttccctccagcccctggcagccactaattcatctagtttccatctctataaatttgccttatctggacatttcataaaaatggaatcacccgccatatgtccttttgtgtctggcttctttcacttagcataacgtttttcatcatttgcactaaaaatatcagtgtttcctggtgtttctcacagcaccctgacgcccaggccacaatgcctgtgagatcacgcaggttggagctggccgctctgagccatcagggcagtgtggcgtccggcagcagatgtctgtgactgggcagtgcagggactcagatgggagaggtagccacaacatgggcagtctgaggtcagcagcagaatcagaatggtcagaaacagatagcacatgggacggcactcaatattcctccccaaggaacagctgcctgaaaatataattatctggtggtgagagaggcgtgtcaagggccaccagccctgagtctaaaggctctgagtctgcagggagagtaccatttctgagatgatctcaaagctcaacagagggtgcaagtcccaagggcttagatggttccattctaggggtggaaaacaggcagtggccatcccaactgctttgccaccctttctgcctaaggcaagcctcctttctgcagggcttcagttcctcgtaggaagtcccaacaggctgagcagagccaagcatgctttggtcatgtacagtttgtgcacagatagattaactcattagttaatcccctttttgtctttttgcaattttaacttgatttattccacagtagatttgaggtaatttacaaaaacaaaataggaacacaaatttaaaatgaaaaatcaacccaggggaaatgaaagaccagaagggatggaagaagatgggtaagtcacttagaaggccccacatggtagctctcttggggccatggatttagtatacagcagtcagaggaagaagggcaacacagttagctgcacagtctccgtgttctgatgatacgctggccagttcctcagaaaaaacaaagctcttcttggcactaagatctgaaggaaatttcttccatgctgttttaagtagggagccctccatgaagtcatcctcccaatacttccggggctctgacatccagctctgagctaggcaattggctctcccagcatctcagaaggccaggtgggccccaccctttaagtcattagctcctgtttgggaaacgttgtgccatttggtgaccaccgttacaagttttctcagaaataatgccatcgtattgtattgctatttatgtaatagtttaatttactttgacttgaattggacttgtttaaaggttacttcttcctaagcaatagggaccacaggagaaactgccaactagtattttttactgaattaaataaataattttaccagtcaattaaagaacttccagcatgttctcccaaaatcagctcatcttctactcatggtttatgtcctgaacttgggaaatcggcccgtccctcaccttgggatgcactggggctgccccccatctcctccacctggagaaccctcagcctggcttccccatcacaccacgcaagcttagagctagagggcacttaagtggggtctaaagtccacgtttgacaggtgaagatgctgggcccaaggaagagaagggattcgcgcaagaccacaaggccagtgacaggacaggcaccaagactgcccagaaacagtggcagggccggtggacatttagatgtaaccaaaggctgaaactcaccaaaagagtctaacaggaaaagactgtgggcagagaggcacagggcctcacccaactcagggcaagcccggtgggggcagggtaaacccagaaaacaatcatgggatggtaatcccgagttcaggatgacggtcactcctgggagcacaggagaaagggacccacattgtggaagcgatgcagggcttccactgtatttgacaagtcttttttttttttttttttttttttttttttagcagggtggtgagttcactagtgttatattatcatgcataatattgctgcttggatgaaatattttgaaaatattttatatttgttaaatatattaataactccaagactcctttaacaagtgtgttttctctctgctaagatgacactctctaccgcatctcaagtggtttaaccaaaggggagaagaaatgactgatttccacaagagacatgccccaggtggggagcttctgtcacctctccctccactcccaaagcctgtgacatgtggtgggtggatctgagcatcattgtacctgaccaaggtggagtccatttcagacaggtcatggtgtcatggttggcatggctcatacaaacccatgggtctaggaggaaacttagagcaccccaagtggaaccatgtgggctccactgatgaatgccacagcagggcaatgggcagtgctgtagaattaagcccccagccaacatctttgttccccacctgcacaaaggacgtgtcttggcatgtatatttttgcaaacagcagactatcccgttcagttaaaggcagggtaggatgtactttgagatttctaagagggacgcacagagtctcagagtctccgggttgaagggactgccaaggacactgacccaagctcccatttgagactccagccttccttagaggctgctctcaggaggccactcactgcctgaggcaatagcaattactttttttttttttttcaaacagggtataggaagtggggaagatggggagccttttttttttttttttgagatggagtctcactatgttgcccaggctggtctcaaattcctggcctcaaatgatcctcccgccttagcatcttgagtatctcagattacaggcttgtgctactgcacctgctcaatttttgtttttctaaaaatggtatcatcctatgtacattcctcagcactcggccttcctcatggacagtctttctaggctacaggccaataggttgtgagcagttatcctgtaccaggcacagttataagcacctcacataattaactcagttactgctcctaacaagcttaaaggacaggcactattgcaatccctactttaccaaagaggagtgtgaatggccagagggtcaagcaacacagtttgtaagtggtgggatccggatttgaaccctggctgtctgtcttcagaccctgtgctcctaaccactctaccgtactgcctttccaaacagagacaggatctgtctcaatcttgttacagctgaatgatggaccatggtttggatggaatacctttaaatttactgttaagtttgtatattttttgtaagttttcctactagaattttgccataaacatcctttatacacatatctttacagactgatgcattcattgttccataggccggatttccagaagtggaaacatggatcaatgtgtgtgtttttggttaaaatacctatggggcctattgtttgggccatcgtcctaataatgagccatgtcattttcactcactggttttgattctgtcccgaggaccacacagaacatctctgaccctttttctccagacaacccctggggtggttgaggacagcaagtctgtctctcaagtattctgttacccagtttcttcaaaagttcctctgacaagggctgcatgctcctgagggctggtccagatacctcttaaagtgcggcaccgcctggggtgatctggcttatgccccttgctccccattcaaagacacacagagagggacattgacagtgcacaggagatatcaacagtgtttcctgacatccatgatgcacgggagagaaccaagtaggtaggattcagacttctcatcttcacctctcccaaatcacacacatgccttcctgagaaagagaccctttgtgagatattaaagaccagccaaattctactcccacatcataagaaactggagttcactctttaattagagaagatgccaatggctttggaactggacaggcttctaagcatcttttagttcagtgtcttcttttacaaaagagccctggagggcaatgaccgcaccaggctcacatgtcattgggtgtgtggcagcatttccctaagctgagaccagggtcactggtgggtgcatttccccagctctctctgcctgctggttcctaggaaccatcttactagaaaggcgtagtgtaaatattttgctaagcagccaagagaggaaacttacccaggctgagctgccctgtgctgggtgctggccatggacacaatgctcaatgagggccattatctgggaagggagggctgtttgttccgctgcgggatggtgccagagcccggagccaccaggcttgccactctggctgccacacagaagagtctccttgcgctcagcagactctgcggttatgcaatgccgggccaggaggttaactctccccaggccaggagccaagccttgttccttcctgcctaagcatgtccatctgaaaatgctgaaaattgagggcctcagtgtttgcaaaatgtgctcgggccctgaacctgctggtttattccaaagggcgtagtgttgaggagctggtgtgcccatccttgtggctcctggcagcctcctaccgaggcccagtgctctgacagcagcgtctgcctgccatcctcgggcaccactcataggccttgcaaccctttgcctgggtgcccctgtcccgttctttccctttcggtggtgtctggtctaagtcctttcttaagcccgagttctactcacttgttcaaagccttccctgaccaccccaggccccagtgacctgagctcaaggatgagtttcccaagacaaaagggaccttggaagttatctatccacctggcccattttccagatgaggaaactgaggcttgaagaagttgactagtctgagagaagactgaacagatgtgtcagcctggctcccctctcagaactctttctcttatacctcacgtcccatctgtcagcaaatcatgttggcttgacctcaaaatggagctggaatcagaccccttcccatggcccccgcagttgccaccctggtgtgtgactctatcacctcctgatctgtcacatcactgcctcctagctggcctcgggctgctgcccccgccccctccagggcagcctccacagcctccttcggcaggacagcccactcctctgctcaggcctcccagggcttctggatgttgtgcctgcctctcccttccagcctcctctgctcctgtgcccccacccccactcctccagccacaccagcttccttgctgttcccagcaggctgatcttgcctccgcctggaatactcttttctgatacccccagcacttgctcctcgcctccctcaggtctttactctccacccgtcctgactgcctgatttcaaaaccttgacaacctgccagccccgtgccccctattcctttcctgactgccaccttgtcacatactatgtatgttacttaagaagataatatatttacatttattttacatacacttatgtttttaagatctcacaaaatatacagtctatagagagtgtgcatgtgtgtgtagtgacgatatgtttgtctatttccctaccagaatgtaactccaagaggcaggtgttttgtgctttgtcacccagaatggtgcttggccccttatgtctaagtagggccgaaggtaaggatgacctacctctttgaggatggatgaggatggtgatggtggctggggtgtcacctgactggtatgggtgttaggagtgggggaagggatgagtttggtggcatatgtaggctcagcagagggagagccagggctccagggaggtcagctgggaggctgtccgaatgctatatttttggagccatatggaataaacacccagacacctgggcctcagtcccccaaccccaaccagccccggtagagcagctccaaaataggaaattcgcagaggtagccccagagaggctgctcagattaggctgcagtgagcacctaggcatggctggccactccctgcttttaggcatcctgaatttgcacgtctaggaatctccatctccatgtttcaagctctctagtgggtgactcacaggctctgcaggggtttgggggctgcagctgagttcctttgaatatctgttgaatgaataaaagaaatggaaggaaagggggaaaggtgctaaggcagacacaggagaagaggacaaaggcttgggagcactgaaacgaccccagggaggcatgccaaacagagcccgaacagaggcaagacagcagggcttgtcctgacaggtggcacaggtgggtccagtttccactcgctttcccacacctgcagctacgctggccaggagcacaaacctcaagcaaacagaaattttttctcgtgatttcagttttagtttgattgacatttttatttacccatgacatagtttcttttaggatagctggctttattctaaagagcagcccaaactaagtggcctaggtgatttggctgttcaaatctcccttttctgatcctcctgtcctgccctacctctcctctcacctgtctgagcacttctctgactcttccatccaagctttttcttcctagatgcctgtactcagtcctcaagctttggtctctaatcccctgcttttctctctctgcactgctcaccttgacttggtagcagcttccacagctgcacacatcacctgccccacccagcacgccccaatcctgcatttccagcagctctcacattcaatatgcttagtgccccactcatcttttcacccctctgtctctggtaaaccttcaggcttgcgacactagtgctacctctaaactccactctcctttgtcctcatagcacccattcacccagtcactcaccctccactcctaccctttccttcaagcaaacagaaaccctgattggttcaacaattactgatcaaccactactgtgcaccaggcagtgctgggtaccggaggcatttgccttggcctgttcttcttccacctgcggcacctcgaggaccacccgaggccctgagattgggagaggaagcctgttccataactggtcagccccacacctgcaagtaattgacagtgtgaccctgggcaagtcacttgccacgtttgagcttgggtgttcccaattgccctttgggaggattattcattcccgcctcacctgtccccagtccagctgggaaaggcatcacccggcttcctacaggtgacaccagtctgaataatacttgtggtgcacccatagccatggtgcagcctcttcctcccacagaccacggccttgacccccttcagcctcctggcccccagtatgggacagagccctggaatctgcattttaaagaaactcaaggtaattctgttatgggagggtatgtggacacacatggagaaattctggctcacaggataaagtctaagcttcctcaccacccccaactcattgatgaaaacttcgccctgctttccagcattggccccctctgtctcccaagggagggcctgcagccgtggccagactgctctgtccactccccaccctgagctcagcaatgagcctgctcttcttcttcttttgttttgttttgtttttcgagacagggtcttgctgtgtccctcaggctgcagtgcagtggtataatcacagctcactgcagcctccgtctcctgggctcaagccatccacccgcttcagtctcaatatttaggactacaggagtatgaccaccacatctggctaaattttttatttttctagtttttgagatgaggtctcactaccttgcccattctagtctcaaactctccggctcaggtgatcctcctgcctcagcctcccaagtagctgggattacaggcctaagcccccaggcctggtcagccctgctcttctcttatgacttccccaacttggaaagacttcctgacctccctatctctgcaagtctctttcccaccctgcaacatccaactcaaatgccttcaccttcctctatcaagctcagaatctccacttgacatcagttagggccaaacacacagaccatcatcatttcctgcctggattgctggctggcttttgactggctcatatcctagctttctaagctgactgtgagctccctgaggccaaccatccatcttgcagatccttgggttcaataacaaatgcttactgagcacctgcagaaacctatacagcagcaccctgctgggtgtacagaagaggaaggccgaatccctgcctagaggggagcccctctcatggagagacagatggaacttgcatatatgaccagggtagaaataaagacagggtaccacagaatcccagagtaaaggtcctaatgccatggggaaggggcactcagggggcagggaaggaaaactcagaaagagggagcagcacacgcaaaggattaaagtgtgacatgttctgcacaagagcaggggtgggggaggaagaaggatggagataacgggaacaggctgaactgggaatgctgagctaagggtctggattcatcctgtaggtcaagggttggcaaatccagccggctgcctgttttcgtacataaaattttactggaacacaaccacgcccattttttacatattatctgtggttgcttccaggctgcaatgacaaagtcaagagagactatatgcccggcaaagcttcaaatactatctggccattcagagcaaaagaatgctcattcctgccatagacgctggaagctatgggtggattttaagcagcagatagcagggtcagatttgtgtttcacgtttctatcactctcggatcatgctgggatgtgctggagcaggcaagccaggggaaagggaaggtggctgggaggctggtacagttttccaggtaggggatggagatcaacaacaacattgctgttttttattaagagattcattaagagttgctatgtgcccacactgggctgtgccctttacacatattcatttaatctgcagagtaactgctggatatagctagagttgttatctccatcctactgatgaggcacagagaagtgaagtcatttgcccaaggtcacgcagccagtatgagacagagcccggatgcaaacccagtggtccaaacctgagctggggccctcagtgccaagctccagggcttcagtgtcaagcatgtttttggcaacagatcccttcgagcctccctgggaatacacagaacacaaatcctctaaaggagaaaatctaccccagccgagtcaggcaggaagtgggaggcagcagtgtggctattttggagaagcgacacgagaaaccacgaaacttcctacctgtcccgttttgctcccatctgtcctcagaaacaaggctgcccctctccaagataaaaaggtgtttctccccacacagtggctctgccactggtggtgggagagagagcactaagcttagcacacacttgctatttttaaagggctatataaacaaacagggctatgtaaataagaaaaaaatgaggtcatccttttaaaacctaaaaatgtcccttttctatggggtgagcagcacaacctcagaaagcacaggggtttttctatccccttgaggcttctctagcccatggcctccaaaaaccaccaggcctggctctcttccttgcacccactgagtgaagggcaggtggcctgggagtcaggactcctgggtttcattcctgggtctgtgggctttgcctcaaatgcctaaggccaatgtgcaatcccagccaccaccatccagggaacctgacatccaaccccacgccggtctctcacaaacacggcccatgctccaggccctcctcctcctgtgccagccctggtttggcaagctgattctcctggcccctcgggtatcctttttcctccccactgcctcacaccttgacctgttgaatggccacagaggctctctgcatgccgatcagagtgacgtgtatgctccccacccccacttctctgcacacatgtttaccttgctccacgctcttctgcaccttttcttcaaaggcgcgggccagaggtcattaaagcagccccaggagctgagtttgctcatcaacaactgctaggagacttcccaagcctcagcagaagctcacatggcctccctgggttgcgaagagtactatttccactactgactgcactctccacagcatcacctcaacttctcccctccccatctctcctccttcctcctctgcctccaactctcagcatccgtggcccctccattatcctccagtacaaaaatgagaaccaccaatatttgctgaaggggtagtctccaaattgtgttccatgaaagtgtttcagaggctctccaaatgttccacgagcatgttattctaaaagtacagtttgactcctattctaacagaaaacgagcacgtacacacattcaaacatgctctatagcacatgggaacacactgaatatagccaacaagtgctgccggtttaatttggtttgtgcagacctcagatgaaggtctgggtagatcttgaccttcaccgttgaaatgtatcttcagttaggaagagtggagctcttcactgggtatctttgtgttgtcattttttaaattcaggactctatatgcgtacacaaaaccatacaagcaagtacactctgaagctttcaatgacaagacaatgtattatgtggattatcatgaaaatatcataaatgattgtggggcttcctgtctgacttatgtgtgtaataggaaggaattcaagcagttgttggatattgtcactgatgcaaaccagaattcccttctactcctccccaaatgcccagataatgttgaactgaagaccattctgtggctttaaggcaagctgttaacaatctgtcaccattcacatcatgttatggatgttgatttagaattccttggccaggcgcggtggctcacgcctgtaatcccagcactttgggaggccgaggtggatggatcacaaggtcaggagtttgagaccagcctggctgacatggtgaaaccccatctctaataaaaatacaaaaattagctggtgtggtggcatgcgcctgtaagcccagctatttgggaggctgaggcaggaaaatagcttgaacctgggaggcagagattgcagtgagccaagatcatgccattgcactccagcctggctgacagagcgagattccaactcaaaaaaaaaaaaaaaaaaaaaaaaaaaaaagaattccttaatactttgcagtcaagccaaacgaaacaagaaagaaaaaggaatattagatattgcagctgataaagcaagcaatacaatgatgatctagggcagaggtcagcaaacttcttctgtaaagggccaaatagtaagaactttagattttgtgaaacagacagtctcaagcagccatagataatgcatttaaaaaacggtgtggctatgttccaataaaactttaccgaatcaggcagcagcctggattaggcccacaggcaagtttgccaattcctgatctagaacctcagatttcaatgtgtttgtgcatcaaaacagaggtgtcgctaataacataataaatataacgttcataataaataataaataaatgtcaaaaactagacagccaggtgtggtggtccatgcctgtactcctagctactcaggaagctgagataggaggatcccttgagcccaggagtttgaggctgcagtgagctatgatcacaccactatactctagcctgggcaacagagcaagacagtatatatcaaaaataaataaataaagtcttttgcatctgacttaaattagactaagtctaaatggcaataatttggagataagaaataagaataaaaatgagaatttttaaacaatgttaaaaatttgaacttaaaaaataatgtattcataaaccatcattttaacctgttttatatattgacattccatgcaagatttggcttttaaaaatagcttctaagactataaaagtttgaaaactgctcaagtttctcattgctgagaaattgcttccatatccattttcaaatgagatctgtcctctagcttctcattcagaaagcacatttattctggagaaagccccacttcaggccccttctgaagagtggctgtgactccatgtttccctgccctcagtaattccacacatagctgtgcccaagcctctgatggtgctgatgggccaccccgccctccccagcaccggggcgtttgcagcactgcacacctctgtcttgttcggatgccatatatcccagctcctccctggtggctgggagggccgtgccagcagtggccgtgatcacctggactccagcagcaccaagtcagcacctcattaatcacaggcactttcttccccagggagaacacaggcagaggcaggagccaggtttctcgctggaactgacagctcatttccctctgggcaagtcccatactctacagattcttccaagcagctggctgagcccacacggacaaacaaagagtctgggcacgaagcggggggaggggagggaaatgccaagtctgcagaggaccccccatctgtactccctggacagttcccccatgtatctggcttgcatctctcagagggctctgcttctggactagttcaagtatctgttgtacacctcatggaatgaacccagatcctgtcctgagactgctcatgagacccctaaatggctgtgataggcacagaaggaaacaagtgctaagttgaggtaccaggaagtgccccaggatgccgagccaggggcatgctggggcattacagcatgatcgattcctatgaacatgtggacattcctggggaaggggtcatccttggagctgtcattgctcttcttcaggaagcatcttggtggagaaaaaagtgctgggtcttttgtaaccagaggctctgccccttaccatctgtgtagctgtctttaaactactgaacctctctgtgctcagtttccttatgtgcacaacaggggcaacaggaccagactcactgaggtttgggaaggactcgaacctgtctgtaaagtaccaaccatgtgggcagcagcatcggtccccgtgcttcagcctgacctcagggacacagcactggggccagagggcagggcatgcagatggcacagggctgcaactgggagagcagggtggtggcccaactgcccacacacgccagaagggtgactcacgtttgggaggtccttgttaacgtggctggcaacattctaggggccttccccagcaaccctgcgaggcaggtatcactaccagcctcattttgcaagtgagaaggatgaggcagagttggagcaatttgcctcttaaaccagtaagtgcctcacacaaccactaagagtcggggctgggatttgaactcagggtgggtctacactgttaagtaccacaacaaacatcccctcttaaaatgaggctccaatgcccagttcttccttggaatccagggaacgattcctttacctcctcaggagaaccctggtctaggcctagggctggtaggcccaagctgtcatactgtgggcagagacacaggctctagccaccccgaagtccaggcagcaacagcgatgccatctctgagggctgcctgtggccccatccccttctctatacagtgaggaaacttcagctttcagagaagcgaaagagtcactgctcctggcatgccaggctgggaaatgttgccttggaaatctcagctgggcccacagacccaaacacaggcccccagaaggaggccctggagtccccaagccttggctgcatcagaatcaatgtagattcctgggtccccaacccccaagagtctgatgcagagggcacaggtaggccagagaactccctccctccgtccatccctccctccctcccttccttccttcctttgtcataccaggcaccctctttctaatccccagctctctgggtgattctggctctccacaccagagaaaacatccaaggacttgttcttgacccaacaagcttctaacactgcacacctaacctgtactgaagcctgaacatctagccagaaaccacagcacatacctgaagatctaaatgcatatataaacataagctgataccaggcctctccccaggctcatttgatcactatttcgggagctggggccctgctattgaaattgctgaaattccaagaatcattgccccaaccctgacatcttttcaattcttcacaacttgggggcaggtggggtgagaaaggggactgaagacctgctgctatgtctctaactcccgtggtgctcctctgactaggcattgggtgggcagtggtggtcttcagcaagaaccattatgtaggagaagagggtagacctctggctatcaggagcacacagttggactggcttgtggaggctgtggcccctggagagggggctgtggccctttgagaggagctgttgtgtcctttgccaggacagaatggaaactgaggtactgggagggggcggactgcatttcatgggagacagcatgggaagcagtagccagttgctggcactcaaggtctctactcctgaccaaggaaggttgaggactttcacaacaactttcacagaggcaccagaaaggcaacgataacactaataataacaataatacatttttcagaggaagaactaagcaagctcatgcaagacagaccaacatggcgcctggcaagcatattcagcaacagcccccatttcctacctgtgctgaaggcaccacttccgatgaccaaaactgaaacgctgttctctctgaaagccagcattcatgtccactcctacggcagccaccctccacctaggcgccgctcttcccaccagaggggcgggcttgcttggccaggaccccgcgaggctcctccatgaactaggttgaggctgctgggtttgtgcctcgaatcctgcaggagatgattgagaaacatggtcaaagaactttcttggtcaacttttttagacacagaacaatccctgcctggtccctggaggacacaccccccaactactcccaagcagctttacttggtacagggcctgatccccacatccccctactttgcatccaacacttaacttctctgagcctctatttcttcactagtgtggtaggcagaattctaagatggccctcaagatttccggttcccctggtgcacagaccctgcaaagcccccaggactgtgaataggatggatggttgggttatgttacagggcacaactgaccttaagagagggggattatcaagacctggcctggtatgaaagccctttaaaaacagaatttgcaggaaatgccattctggtcaccagccttgggaaaagtatttatggctaagtgctcaaaagcaattgcaacaaaaacaaaaattggcaagtaggcctaattaaactaaagagcgtctgcacagcaaaagaaactatcaatagagtaaatagacaacctacagaatgggagaaaatgtctacaaactgtgcatccaacgaagatctaatattcagaatctataaggaacttaaacaattcaacaagcaaaaaccaaataatcccattaaaaagtaggcaaaggacacgaatagacacttctcaaaacaagacatacaagtggccaccaaacatgaaaaaaatgctcaacgtcactaatcatcagagaaatgcaaatcaaaaccacaatgaaatgccatctcacaccagtcagaatgtctattactaaaaaggcaaaaaaacaacagatgctggcgagaccgtggagagaagggaatgcttatacgcggttggcaggaatgtaaggtagctcagccactgtggaaagcagtttggaaatttctcaaagaacttcaaacagaacgaccattcgacccagaaattccattactgagtatataaccaaaggaaaataagttattctgccaaaaagacacacgcatttgtatgttcactccagcactattcacaatagcaaagacatggaatcaacctacatgcccatgagtggtggatgaggtaaagaaaatgtgatgcatatacaccatggaatattatgtagtcataaaaaagaacaaaatcatgtccttgacagcatcatggatgcacctggaggccattatcctaagagaattaacacaggcacagaaaatcaaatgccatgtgttttcacctataagcaggagctaaacattgggtacacatggacataaagatgggaacgacagacactagtaactactgggtgggggagagagagggagggacaagggctgaaaaactacctagtgcgtactatgctcactacctgggtgacaggatcattctactccaaacctcagcatcacataatatacccaaacctgcacatgtaccccaaatctaatagaaaagttgaaattatttttaaaaagcagagttttctctggctaatcacaggagaggaagtcagagagattagggtctggagaaagcttcatcataccctcaccgccttgaagatggagggttgtatggaaaggattggcccgcagcttccaggagctgacagcaaccccggctgatgaccagcaaaaaacaggacctcagtcctaccattgtagggaactgagtcttgtcaacaccttgaatgagcttggaaagcagaatgttccccagagcttccagatgagaacccagcccaccaacaccttgattcagccctgagcagagaatccagccactctgtaccagacttctgccctacagacccgtgagctaacaaatgggtgttattctaagtcactaaattggaggagatttgttatgcagcaagagaaaactaatacagcctggaaaactgactcatattcaggcatgggtggcaatgaaatacagtaatagacataaaagcatattgtattccccaaatcacaaaataaaacaggccaagagaggcctgtttcagggcaggagctcaacagtgattcctgaatgaatacacaaatgagtattggtttttaataactgacttgccaggctgttgtaaggatcaaataaggaaatatagaggaagatgctttgtaaactagaaagccgaagttgtttcagtcagtggtggcgtggcgtgtcatatccacgccgtgctctttggaggatgctctggtttgcccgctgcaggcagtgtcgtgggatggatgagaatgtggcttccagggccaggtatacctggttcaaatctagcccttccacttctgacgtctgcaacttgagaaagttgcattgccttgctgtgcctggcaagtggggctaagaatggtgagtgccttccagggcccgtactttaatgagtccgtacatggaaaaaggttggaacaatgcctggcacggcccacgtaactgctctgaatattatctcagagtggaacccaataatctgggtctggagtaacccgcacacaggcctggggcactgttacctttctcctcttgggcaccctgctttttattcacacagcctcagaatcacgtttggcaaccatatcgcactgctgattcctacagagcatacaggtcaccgatgcccccctgctgtccccttcccaatgtacctgctgctatgaaacccagccagccccctcctacccccagggcagcatcgcagcaccacacagtggagaggcttgctctgtggctctatcaatcagttcctgattctgccgtccgaaccagcccaatttctcactactctgtgggtttctatcctccctgatctgacctcatgccctccaatagattgcagttattaatcaaaatggccgtgctctcttcctcccagtgtagaaacactcacttctcagaacacgctattctacaaacacaatctacagtttcctacctctgagccttggctcaggcagcctcttctgcatgggatgctactcacctccctctgcaatcgtgcccaccttgctgaatcctgcccatcttccctcaggaggttcagctagctcccataaaactggacctaagttctgcctctccagaataccccaagcacatttgctgtgctcctcctaaggtaaataacagcatccactgtgctcagccacggcttaaagcccttctagattgcatacaactcaggcagggtcattctgactcactccctcaccccgagtatggcctgtcacacacagtcagtgtggaacaattctctttagcgcccaagttggttgtttattcatttaacagatgtccactcagtgcctattttgggtagagccgggttgtaggtgccagcgttaatagatggcaaagatttaatctctatcttcaaggggagcacggagtaggggtagtcaattttgatggtgtctgaatgtgtaagagagagaaaaaagaaagaggatatttaaaacaaagggagtcatgtaagaaaagacagatctcttgacctcgtgatccacctgtcaaggcctcccaaagtgctgggattacaggcatgagccaccacgcctggcggatcacgggttcaagagatcgagaccatcctggccaacatggtgaaaccctgtctctactgaaaatacaaaaattagccaggcgtggtggcacatgcctgcagtctcaggtacttgggagggtaaggcaggagaattgcttgaacccaagagacagaggttgcagtgagccaagattgtgccactgcactccagcctgggtgacacagcaagactccaactcaaagaaaaaaaaaagaataaaaaaaagataaaaagaaaggacagaggacccccaaatggccagaatgttcaagaaaattgcatggtgtccacatggctggaggtgaggggcagcgacagtgggaggtgctgtgtaggggccgggacatgacggtttgacagatgaagtggcctggatgtggtggtgctgtgaagtgaggtcattttcatcagtgaggtcctgcagccagggtgaggggtgtggcttgaggagaaaggatcaggtggaaggagagagacttcttctggctgcggtcgtgaggctggtgtcactgactgtccccagtctccccctccgtggcaggtcagagggctgcccaccacacccgtgtccaggtcaccagaaaaggtcacacacacctgagggcctagatggcaaaccgagcccatttatctccctcttctcccccccgcaacacccctcaaataaaaggagaaatgtgcaaataagaacagatctgcagtagcatcagctggccagaaagtccgagggaaaacagacgagagggagtgacaggaaatctaatcagagcgaagctagcctcacccagccgggcagtgagggcccacctgccaggcaccccaggacttgctcagagctcctccatggcagggcgggctggagtggggtcctgaaatcccccccaaaaagagtggatcctctcagtttccaaaatgaccaaagtgagagttgggcagggaggtactgggagcagaaagtacctccccacacacctttctgccttcaactgcatgactttattatcccaggagcctctctccctggcaaatggcttcactgttcatcacagaaacctcctgaaggacccatctactcttcaatcaacagctggtgccctacgattctctgaatcccttgcctggcctcaaaatccctcacctcatggcttccaccagtcctggactactgtgttccttacacaaccctaaccaagcccccacattgacacacccaccttaaagagaactgctaggcttcagaaaacccaaccttgcctccttcctcccagacaggccaaagccctctggaatcagcaccctcccttcggcaagtgagtaataaactcagctttgccttaccaacaagtttgtagatgatatctggggagctggcatttgacagtctctacaaaaatgcttggaatcaaattgacattcaatttggtatctgcatcatttacaacagggcagacctccgagcttggaggaaaaagggttaaaacccttagatccgttactcagccaagtctcaaagccagagagaagtataaaatagtgtgacacccaccacccacgcatcttttcttaaaaaaaaaaaaaattactcgaggaatcactcaaaggaaataagaattgtaccagaataagtaattcaaaaaaggacaatataggatatccaagaaacagggagaaataataaaagcagaaaaaggtgaagtgaagtctaaacaaatgttgataatcatgatcctatcttgttgggaattagatactatttaattcttgacatcaatagagaaatctgtgtaaaaactaaccatttctagaagaaaagcaagatgcaaaccttttaaaccactgtgtggggagaggggaagggagaaacaaagaaaactctattaatttagccaagagtgggaaaagaaaaattaaacaggaaagaaaaagtgtaataaacaaaagacataaaataagatgacaaaagacacaataatatgaataaattaaattactttaagttaagagaccaggctggataaaaggaaaaaaaaatccagctatatgctgtttggaaataacacacttaaaacaaactgacaaaaaagatggaaatcaaataaatggaaaaaagcaaatggtaacgaaaataatgcgagaaagccaatattaatatcagacaaaatgcaaaaatgttaattaaatacactaaactggggccttttatattgccgaagagtctatttctccaaggagatacaaaaatcacgaacttttactctcatcataaacacagaaccacaaaatgtataaaataagacattcttggaatcacaaggaggaggtaaagaaagaacaggaaatgtcttgagcattattatttgaaatttggtggtataagtaacctccaaagaagaatacaaagggtttgaagatgtagttagtaagtttaacttcatatacattcaagaaatagagaaaacacctttttctcaaatgtccctgtactagactgcaagaaaatctcaaattccaaaatgcacgaattgtacggaccacagcctcagttcttgatgaaataaaattagacattaacaaatagcaaaaaataaaaatacataaacaaatgatgcacatgacaatttaaaaatgcttttctaaaaaaactcttgaatcaaagaggacagcaacgctatcgtaggataattataaatgtacaacattgagaaccctacttttcaaaatctgagtagtgcaatcaaagctgcatctagaagaaaatacaaagcttagatgttttcatgataaattaagaaaggttgaaactaaatgagttaagcacataacccaagaaactaaaaaagaatgaaataaaccaaagtaatctagaagaaatgaataaagttgaaaataaaacgagtgagaaaatgacagcaaccacaactatatatatatatacacacacatatatacatatatagctgcatatatacatatatgcacgtatatgtatgtatatatacatacatatacatacgtatgtatatatacatacatatacatacgtatgtatatatacatacatatacatacgtatgtatatatacatacatatacatacgtatgtatatatacatacatagctgcaagctaagctttctgagaagaccaacaaaatggacaaatcggtggcaaatctgactagcagtaataggcaaagtcgcaaataatcattaagaaaggtgatgtaaacatatacgtgaacattttgaaaaatcaaagagaatttgatacataactgtgtcaatgaatttacaagttggtgattttctagaaaagtataaattgtaaaactgaagaagagggagaaaacctaggtagactctaataactatagaagaaactatagaagagaaggctgtcgaagatggaattccagattagcagagaaagaatggattatttaaataaaagcactaggacaactggctggctgtttattcattcaacaaatatttattaagaacctactatgtgctgggcattgttctgggcactgggaattcagcagtgaacaaaacagaaaaggtctatgcccttatggagctgagagtctggtgaggggagatgagtaacaaacaaatccgcaggtaaaacaaaccacatggcaaatagtggcaggtgttacaatgaaaattaagcagcaaaatgggtacagaatgaggaagggtggagaatgccattttaaatagaatacacgcaccatagacacacagaaatgtatatggattagagatataaacatcctataaaagcaagttcatgaaaataccagaactattaaaatatttctatactttagtgttggaaaataactttcaaagcccgaattggacctcagtgctcttaatggaaaagattaataaatctaactacataaaaatattaagcattacataaaacaaaaaaccccagttaatcaacagttaaaaagcaaatgacagattggataaaaatatttgcaacatatatgaaaaagtgtcaatatccataatatgtaataagcatccacaaaacagtaagacatatagccaataaaatggagaaagaaaatgaacagatcattgcttaagaaataaaaatgtctaataaatatatgcaaaatgctggcctcgttaataaagaatatatttaaaaatgtggatcacttgaggtcaggagttcaaaaccagcctgtccaacatggtgaaaccccgtctctactaaaaatacaaaaattagcccagcatggtggcacatgcctgtaatcccagctacttgggaggctgaggcaggagaatcgcttgaaaccgggaggcagaggttgcagtgagccgagattgtgccattgcactccagcctgggcaacaagagcgaaactccatctcaaaaaaaaaaaaaaaaaaaatcggtatcaccttttcccatttggttagcaaagaggaaagtgattgctaccatcaagtggtggagggaggagtcgtcatcaaatacttctcaaatactgctagtaggtatagatgaggagaatcttttaaccgtgtctaccaaaatgtatgttgactcggcagctttgcagtgtgcacacacatcatcatacacaaacatacacacacatgcacacatagggatgaccactgtagcactattttaacagtgaggatggatgcagccttaatgaccatcagcaggaaattggtttaataagtaaatgatgataaatacacacaatggaatagtcatgggaacataacttttcttaaagataaacatatactcctaccaataacagagattcattgtggctttgtctatgtatcaagctttgtctatgtgacgtacaagcttcagcgcttctcacaggtagtctccctgcccccctccctcaacagtctgccgggtggaaggtgccacttctgcccccattttccatctgaggcctacagaggctaaggcctgaccaagcggtgaaccttggtctgttagactctggagactgcactctcagctgtgacacacacttcctctcaacgggatggtgaaaagcaaaatcacagacacacatctatctgtgtagctgtgacggatggaaaggacctgggggatgcaatcttgtcctggagggcactgcagaatgggtggggcttgaaacatgcgttcttgtttctacatttccatactgttctttttttaagcactaagcatgtatcacttttgtaatttgaaaatgatataaaagtatagagacagaaggtagaataggggttgtccggaactggggcagagcagaatggggggtcagtgtttaataagcacagaacttcagttttacaagatgaaaacagttaagaggccaatatcttaagtgaaacaactaagaaacagaaaatcaaatactgcatattctcacttataagtggaatctaaataatgtgtacacatggacacgaagtgtggaataatagacgctggaggctctgaagttgggagagtgggaagggtaagggatgagaaatcacttactgcatacaatgtacattatttgggtgacggttgtactaaaaacccacacttcaccgctatgtaatatatccatgtaacaaaattgcatttgtaccccttaagtttatacaaagaaagaagagaaagaaagaaagagagagacagagaaataaagaaagagagagaaagaaagaaagaaagaaagaaagaggaaggaaggaaggagagagaaagaaaggaaaaggaaagaaagaaagaaagggagagagagagaaagaaagaaaaaggaaagaaagaaagggagagagagagaaagaaagaaaagaaagaaaggaaggaagtaaggaagaaaaggaagaaagaaagaaagagaaaagaagagatggatggtggtgatgggtgcataactttttgaatgtatttaataacactaaactgtacatttaaaaatgattaagatggtaaattatgttatgtgtattttaccataataaaaattgagaaactgatataaaagtgtcttctttttagaaaacagttgaacagggagggggctactaggggtagaggggcccatctgcaaggtggcacccacccagggcaggaaggaccagggccagctcctctgctggccccacccaaaatcatgaggagggagggcccttgctctccactctccaccaacacatcaaagcaaggcctttgccagcagctggtaggggccgcatccggtctgggcactgggggttggcatcactgcagctgacaaagggttaaagaaaaatcctggatgcctggcaggggccagcctcactgggtcataacagctgttttccaagggctggcagggaggcaggggggctttggactctggcactgggcctcacacactgatcctaaagaaagtggagaagaaggctggccctgaggcccctgccaccctcctgacaccctcctgacacgtggcccttccctccactctgaacggaacgtctgcagaaggggccggcacatggaaagtcaaatttgatctgtgtggggcagggaattgtgggatgaatctttctattttcagttttatttgttattgtggtctgtgatcaataagaaaacatgaaaatctaagacatgggtcacacatggcagaatcatatggaataatcctggtggttcatgctgggatactggcaaaggggtggatgggaggggaagagagagaattactggcatgcctcatttacccagcaccacagaagtagcatggtatagcatagcgagttggccttaacatcatcagaaagacatgggttcagaccctggtttcatccattactagctcactttcctcatgagtcagaagtgaagactctcaccccctccctgggtttgccacgtggatcagatgcgacaaagtgtatgtgaaatgagtatgaacccagtatacaaaaggcactcaataaatgcctgtgcccttcttcagttatggtgggacaccttccaagtctctctccctctgtcaatctctcctccttctggcttctgttttggggtttggggttggctctgtgacccacctccctctctgtggtcagccttccggctctcactttcctgaggggctcacctttgtttcagcggagtgcgctctagtctgagaatgctgtgacatgcagctgacagcctggaggctgccttgggaaccttcccggtccccagctgtgttctccagacaagaggcttctctctcacatggtagctgactcacggatgagtgaggcgtccccaacaaggagagtgggcagagagacaggcaatggagtccagtcattgatagcgacaagacctgctttgaggatacccagaaatgttttccaggaaagacagggcatttaaaaatagagaatggtgatactttccattgtatgaaggagcaaaaaagaagaacttcaagtacaagataacatattccatttagtggcaggtaggaatatactgtctcataaactctacactgggatttggcagaagaaaagttcatggttttcaggcactgcagggacaaggaagggaggtgttgctggtgtatatggggagcacccagcccaggagtcgaggagaataccggagtggcgggaggaggaacagacgagactggaggagctgcacttggagatgaaggttctgagagctgctggggcgggggttggggggcgggggaaggtaggtgtgggaggagcagtgaggtcgcttcctgctatatcaggccacacctcgcagccctctgtcacagaaagccccctggaactaggcactctacacaggggagcagagaagacaccgtgttccctctctgggtgcaatagaaatcccatgaggcagccccacatttgaggtccagctgcacccagctaagtgaccttggacaagacactctccatcactgggctagaccccagggtgcaaaggtgaagaagaccttgtccatgtctcaggctgtgatggatctagcagggaagatagataagaaaatcagtggttctggccctttctcccagggagcccaaaacctgagctgcttccccgcaagaaggcttctaaatctccccgggttgtagacacagaagccagaggtagaggaagaacccaacatttgttgagtgtcttccacgtgcaaaggctgtccctgcattttttcacagtcatactaatgctacggtcaggctccatcatcaccatctgacaactgaggaaactgaggctttgaaaacagagagatgtggacagccttgcactgcaggagggcccaaggctctggcattaaataaaactggacattactggtcttagacactgtgtggccttcttcgagtccttgaccacctgtgagtctgtttcctcacctctgaaacaagagcaagagtgcacgccctgggctggggtaagaacaaaatggtacggttggcttcccagaaaaatccaccttctccctcttcctcttctggttacttctgatcttttagctttacttatgtttatgattatttcatcttctaaaataagaagataccagatcccataacaagattgctgcaacttattcacagcaaagcaggtggaggcctcgggagatcccggggactacagaacctccaccactggcccacagtaggacaggggcagggagtaattcatgcctactaggaagactgtgataacaggtgtgtgtttttggaggcagaattgctttctgcccacacgacagctgcccccttagctaagaggggaagcctggtgacccagggtcctccggggacccagccaggcttctggtctagatctcaacctgccccactcctgcccagtgctaccccatcttccaccccatccccacctccaccagttcagagattcagccagacagaaaggctgtgccaaaggaaattgtgtgccacagggcccacttggtctgctgtggtgttcttcctttttttggactttgtggctgtttgagtgggtacctttttccatagaaagtttccattgcatcagttatttacattgtcaccacctatatgtgggctctggtttcgagtcggtgaaccagagcaggccctgtggggcccaacactgcttacagggggtgacaggagccagttgctacggcaagaggacctgcagctctgggtcaaccctcagagccacccccaaccctggcaggtccactcttagtgtgctcagtccctttgggatgccatttttagggtgagatttaagagaatttaagagcacaggctactaggtttgcatcccgcctcctccacctcctagctatgctctgagttattgacatgacatctccgggcctccgtgaactatcatttgtaaagtgggaatgacagtggcgcctacctggctggactttgagaaggactcaatcaggtagtgcacataaagtgcttagaacagggcctggcccaaagcctcaatccatgttaatgaatggacaaggatttcctgcccccaccctggctcagaccctactgcccatcctctcttgtgtgaaccaacagcaacagcgtctgcactgtcctgcccagcccaccgatccatagacccagacagactgtcctgatagccagctctcaccaagtcactcctcgccccaaatcccaaatccttcagtggttctccttagagagtaatgtctgcactttacaaatatgccaggctgcctcggcatcaacactcccctgcaaagccccgctcttgccaactgccatgctccacattcatgcctctttgcagttgtctctgtctggaatatttctctccattttaacgtggctaaatccaacccacaccagcctgggtgagcccacctcataggcctcctcctccacaaagccctccatgactctactctctctctggccaggaatgatctttcatttaaggatttgatctctttgtcgtggtgtttaccttctctaccttgtatgggtgcaatataatacatacaaatgtgtgtgggcatcacagacaaaccatctgatctctgaggacaggactgggatgtgtgtgatgcatccgtgtcactcacagagccttgaacataattggtgactgtgagtgaataaatactgaattctctcaatttactaaccccgtcgacagggaaagctatttgggtgtgtgttggtgaagatcaatctgcagcccatcagtgtccacatgatcctctcggttcttcttgagggacccggcagactggggtgtcagccaggggccaggacccctaggggctcacagctactcagactctgagtctcagcatgggaccttgcatctgaggcatgtgtggaagtccaggaaccatcactgacttcttctccctcttcctcagcctccaccttccatatgtcaccaggttctcagtgaatcagctccctaagttcctacgcccatgagcccctctccaccctaccgccaccgtcttggcctaggcttcagcatccttgcctcctccctggtctccccatgtgactcccatccttttctgggtcttctctccatgctgctgccccaagcggtacttctgcatcacagctctgattaggccacaatgcttcttgccacttctgatgcctgctgactgccatcagaaacccagatcccctaggaaggtgctggagtgtctctcttctctaacgcttctaaccctcatccagagctttggtgtaacatcaatcacactgtccagcgacatttattcccctgcacacgggtcttcctcgcagacagggagtgccttcagggcaagaacatgtcccgtctgtacccccagtgcttggcatgcagtcagcctgctgtgaaagcatgctgaacagacgagtgcatgaataacaatgaattaaacacaccaccactgccctgccttccagtgttgccctgacaccaccatattcaggacctcatttttgggaccaagcaacaggtgaagttactaaagtgacagatacacagtctgcctggaccaaaggttgccccagggcacttgacatccctctgtctgtgctgcagctcccagaacccctgatggcctaatgtcagcagggcagatgcttgccctggtgttagctacatggcctaggaacctggagacggacagaggtcttagggtgtttccagaaggaggggaaggaaagtgaagggcgttccacctctggtcgctctgtaccaagaccttccatgttgttaccttcccctctgcccacccccctcaccccctccccaaattgtgtctgccttcccatcctcttttttttttttttttgacagggtctggctctgttgcctaggctggagtacaacagcacaatcttggctcactgcaacctctgcctcctgggctcaagccattctcccatctcagtctccagagtagctcggactacaggtgcgtgccaccacacccagctaatttttttatttttgtggagatgaggtctcactatgttgcccaggctggtctcaaactcctgagctcaagtgatccacccaccttggcctctcaaagtgctgggattacaggtgtgagccaccgtgcctggcaaaccttcctatcctcttattcctcaccagggtcacctccctgtttccctgtcaggctgtggccacctattgtgcctgaagtagctaaactcatggacctatgggacagtacgtgtggtgaggaggtgggtgaacaggacctgggatctgaccacacccctaccattaactggccacgtgaccaagaacaaatcacattctcttctaggcctcagtttcccctcctctcaaaccaaaaacctgaacaagtctgtctctaaggaccccttctgtttaactccctgtcaggaggttgatttctttaccagccagaataattctttctaattaaaggaaacaaacagagagaacgatgtgtctttctctgctgctcctgaaagccaggatggcctctaactctcagaatataagtcagatccccttttgattactgaaggaatgtctccatttggtggcaatcttcatgcccatataacccagggatttaaagcacacttgcatatctgttcttttttttttttttttttttttttggatgttaacaattgggtaagctaggcctttatcattctcattttgcagagtgaggctcagggaggtgaggattatccaaagtcccccagcaagcaagagggagaagaggaactggctcccaggatattataccacagctggcccaggtcgttggcctaggagctggcctcacccaacaggcaggcaagatactttaataaaacaatagcacacatctccctgtatttttatacaagctttcttcatgcatgcagaaacactctgacgcatgggtacccaaagcttcacagtgagctggtgggatgcctaattcctagaagccaggctccacccagacccaacattccagagaacaggcaatactgagaaccatgctttgtccaggcagagaatccttggttttgaacactccagcccctgctgctatcccaggcctccaagcccttgaatcgaatccaggccagcagaagctctgctgcacaagacagggcaatgccttgttcctcttggacccccaggccctgctggctgcagggctccttctctgagactcccaagggagggctgactgcatgtgatctgaccgccacacagggagggagagaagatgagggcctagggccctagaagagaaggaagtagggttgcaattctaggcccttcttccaacctggctctccctcttattgctcatggtcttgtactgttactttaagaacatattgatcctgccttccatattttactgggaactccttaacagagtctccacagtaggtcctccacatgcacctgtgcagtgcacagcctgcacaaccattcacaacctatggcttctggccatcccctgcatagtatgtatcaccactgtaattaaaaaactaattgcataattacttattctgccttcacagaatataaatcctcaggggagcaccaggccctgtttgtcttgttcccaagctgtagcccagcctccagcacggtgttaacagagaataggtgctcagtaaatacatgctgggctaatgaacccaaccaaccattcgttcatgcattcagtttgaaagagagtgaacctgccctgcaactgaaggtgacaggcctctgttgtggccccagctctaccaatgtgtgtccctgagcaaggcatttccctttctaggtctgttccctcatctataaaatagtgtggggtttactctccatgccacatttgcacgaccccgaggaaaagcacctccttaaattttgcaccccgggcaccttgctcacctcacccatcatgacctgaccctggttttctacattttcctggttttgtccagacctgggcttatgggagatgctcggtgaagtcaggagaagggggcttccaggcagcattcaggggatgccaaggttgggagaggagtttttactcctgggctgtatctctgggagagaaaaataacagacagcagtacttccccaggagagcagtgtcttcaaaggccttcttcatcagccttgtttaacctccagcctatggagaaggaaggagggaagggttggctcaagatccaagttaccaagtgtcagggccaggggcaaaccccaggcaccctgtgttcagatccagacccttcagcatgcggacacagcctggctcccatgagtgcggggcacaaccagtttcagccggcagaggcacacacagtagcagaggaaggagatgttccttgcaggagatgggacgggagccttgagaaacaggagggcttatggagaaggatggggtggcattcctggcagaagagatgatgtctgcacagtgtgcctgcaggagaccatgttcaagggtctatgaccactttcttacttgcagagtggtctggccaacggggacccatgagggtgaggcacaaggcaaagctcagatggagataaaacagaagagcacgactacagagtcctctgcctccagggcactccaaggacctcttccccatcatggcctcagcctccctgttgtactgcatactttagttttgtaaggcttctgtaacaaattatcaccaatttaagccaaacttaatggcttaaaacaacacaaacttattatctgagaggtctggaggtcacacatccaaaatgggtctcactgggctaaaatccaggtgttaacagggctgcattgctttctggaggctccagggaagaatctgtttcctccttttccagcttctagaagctgtactccttctttggctcatggcctcctcaaagacatcaatggccaggtcaagtctttctcacactgcaacctcctggcactgactcttctgcctctgtttaccacacttaaaggcccttgagattccactgggaccttgtgggtaatccaggacaatcaccctactctaaagccagctgattggcaatcttaattccatctgctaccttccctcccctttgccctggaacccaccatactcatagacttcgagaattaggatgcacacacctttgagtggggcattattctgcctttcacactgtgtgaggcacatctcctccaaatggggttttggaaggaaggtggcccaggatgagagagatggggtggatggtgtgggcaggagagggaggcaggcagacacacactcaccctcctggctgcctgcttagcacacatcaccattgaaaactttgtcatgtttccatgctgaaccgggcacaagctgtttccacagtgactgcaagagcagaagcagagccagaaataaccccactgacatggaaagcctccccttcccttggtactttgctctctccttctccactctccccatcatagtatgggaggttccagtgggttctaagttggaggcccttccagggcacgctgaggccttggggaacactcctcctgcagcctggctccagcagggggaacatagggatctgactgtggggctgggcctggtcacctcatttccacaccactgtagtgagcttggagtctcctctcctcagcctcactgcctctgagccacaagtccctacaaagtcccaatcgctccttcttggatctcttgccaccaaacactgggatccgcagaacactcttggtctcttgggccagaagcccatgggatgttctgatctggccccctccttgggcctctgggaggcccctgactggtgaggccctgcctggtgggcctgggacccactctcacaagccctgccagcccccagcccagtccttgctactggtgagccttgccagcctgctcagtctccctgcaccaggagccctatctgggaagctgggctcaaaccctaccttctccaaaagcccctctttctacaggttttttccttagaacaagatctcacccactgcaggggctgaaacatttgctgaaatatatagaccaacgaatgcccgggcctcaccatccataccactccctcatatggcattgtgtctctatggccctgggaaatgtcctccacgactgtttaatttctcatgtctttcatcctagtccgacaaaggaaaatggagttaatgcacctcctacctgctgggcactgagcaaagtattaaacgagcatgcatcggcacatttcatccctcacctccactcaaccatcatcaccaccatcttacagagacgcaactgacttgcccaaggtcacatagccagaaggtggcagggcccagactggacctctgtgtgccagactccaaagcctgaggctgcagccaccatgtcccactaggggggccaggggaggagacacagagatgatcaatagcaaatgctaaacgaaatgtgtccaatttgcctcctagaaagccctgagcagctcaaggtgtctccaatttttgtctctttgtatgtattgggatttggcctaagattttatttgggttttcaaaaagttgggaggatatggaggggggttacatgaatttaaaagttcggaggacatggactgtaggccaaccccatccttgtaccaatggcaagaccaaggcatggaagtggaagtgacttgcccaaagtcatggcctctgccactgaagccagtgaactccacttgtttctcccacccattccttgatggagaggacatcgtatgctccacttagcccttggcactgcttggcacagaatttagagtccaatgtggtatgggtcctggatcctgctttaacagtgctgcatagttgatggcttggtagctcaagtgctcagagcctctgcgtccttgtctgcacagcagagcctgtgtggatttattcgagaaggcatagacctgctttggatcatataatattaggatcacgggtaacagagctgggccctgagccacttctacgggaagatggaaagagctctatatttagactcaaaagcctcaagtagagtcccagttctgatgctcatcactttgtggccggagcctcccacttgacttcattgagtcttactctgggagacaaaaatgtctcccataaggggttggtatgaattgaaatgaggtaacacatgtggaaacactggaggcataagaatcctctgggttgcagaatcccaggctccaccttctcccactgtctgattctacagctgcggggcagggcccaggaatctgtatttccccaatcccctcattccccaccatgattctgttgcagttagtcaacaggccacactgcaagaaatccctctaaaaagggctcaatatgtgtttgttaaatacacgaatccttgaacatctgttgagctgcatatggctgctaggagacatgggccgaaggaaataagtaattttccccaaatacatttcctatgaaatctaaatgatgggaattgggttggggcttcgaagactaggagatgatgcaataatagcttccttctccaaagagctcctccccttagatggggagagacctggctggagggtcatgcccagtggctcaggatcaaatgcggggaggggtgctctggagacggagtcccctggggatgagttccagaccctgttctcttcagcatcttcatgaagacaggaaagaaataactgaaaatatgctcattaaatctgcatctggcacccaatttggcagggttgccaaaattctgtaagactagaattaaattagcaaattgcaagtaaaatgattttaagcaggcatgatggaattcatcagggccaggtggaagctcatgggggaagggagtcaggaaagcccacatccccgggggtgggaaagcctggccgggaacggaaacggaaaagaaacaaaccggcaagcagaaatgacccaaatccttaagattcacccttggaatgtggtggtgacagaggcagccccacactgcaaggtggctagaggctccttctgggagccaggaggtgtggctgggcagcacccggttaaggatggcagctcttcaaaagagggtcaagaagaaaggacccgagggactgctggggaatgggaggggtgggtcctttagactggcggccccacaagggcagacacgtgggcggtgacagagcagtggcatgtgttgacactgctgaagcaccattgcgtgcttactgatctcacagtcagggaaaaacactggcatgggcatggcgggggcaggggaggtacagactctgaggaaggaagaagaggctagaagcatttcctgggcgcttgctaagtgtcaggcactgtgttaaatatttgtcaagtattataatctcatctaatcatcacaataatcctgtaatgtaaagagtcttcttttctctttattttcttgggttttcttttttgttttctgggtttttttttttttttaatgaagagatatttaaagtaagaagtagacaagtcctgcttcatcctctcaaagcctatttcccagatgaaaccaccaagcatagttcactgggcttgttcccaggctgtttctctgagcgcagaaacatttctacatgtgcatacacagacttaactgtttaacttttcctgtataaaaatgagattgtcctaaacatattacacagaaacctttttccagttaagaatacattctgaatatcctcccacgttaagacctgaaggatcatttctttcttttgaaatggccacaaagtattctctggcacaaatgcaccataaattttttaagcattgtctctgctggacactgaggtcatttccaatttctctctatttcaaacaatgctacaagggagtacctttgtacacatatatttttgagtacatatttttctatagccagggaattgctggaccaaagtgggtacagtcagctctatctgtgggttccacatccatggattcaaccaatcgaggatcaaaaatagttggaacaaaaattccagctgggcgcagtagctcatacctgtaatcccagcactttgggaggccaaggcaggcagatctcttgagtttaggagttcgagaccagcctggccaacacggtgaagccccgtctctactaaaaatacaagaaattagctgggcatggtggcacacgcttgtaatcccagctacttgggaggctgaggcaggagaatcgcttgaacttgggaggtggaagttgcagtgacccgagatagcaccattgcactccggcctgggcaacaagagcgaaactccatctcaaaaaaaaaaaaaaaaaaaaaatccacaaagttccaaaaagccaaacttgaatttgttgtgtgccaaggactatgtgatccacataaatgaagtgatatgtaggcaatgtattaggtatcgtaaataatctagagatgacttacatatacaggaggatgtgtgtaggttatgtgcaaacactacaccattttatataaaggacttgagtagctgtggattttggaaccctcagggcatcctggaaccaattccccatggataccaagggatgactgaatatgcatttataattttcattgataccaatttagattctcaagaccctttggcccttgccagtactagatcttctctattttttaaaaatttttttacattttgccacctctaggcagtaacaatctcatttttaatttacaatctttggttttttagtggctagagcattagtcatatatttatgggccatttttatatctgtgtactatctgtttatcttttgcacatttttaaaaacttggctatgtttttagttagttgatagaacaataattttctaactaatagttctttaaataataactaatacatagctttctatgcacctggcactcttctgggttcctgacaaacttcacagcattgactcaaagccccgagaggtggtcacagcagtccatgtttatagccaaggaaagggaggctcagagatgtcaagtaacttgtttgaggtaacacaggtcagataagaacacgccagagtctgaaggactagctaagccaaccacttcatcacgagttagttctttctgaagccttcccatatgtcccttgccatctaatccacagagaaagaaaattcccccttaaaatttccctctctgttatttatcctttgcttcatttgcaaagcctttaaaagagtattattctcatatgccaggtaagaaactgaagtccagtttccaacgagaggcaatcatagcatggaattggcccctaaccctgatatgcctggggacgtgcctggaggagtgaggagaaggatttggcatggggcaggatttacacatggggccgaggatcagggaaagtggaggctgaggcagggcccaggatggcaagagttttaaagagcaggccaggcagtctacaggactcaccctacgagcaacgtggaggggtgaaaagctgggacaaggagtcaggtgaagatcggcctagtgagaaatcatcatcaaatcagagggtgtccccacctcaccggccatttccactgaccaggcacactgaccaataaagaagcctgccctgcggggtaacaaacacacctgtgtatatgcaggtgctggcaactctatgtgtgaaagctatacatgacaaaagggtttttggtctttagtggcattttaaaataaggttcttttttagctcctaaacaccaatgtcacatgtgggtttctgggttacaaacccaccattgatttgtcacatgagcttggttaccctcgtctcaatgagcacacacaatacttctgcctcccatgagcaccgcacgtagggaagggaaaaggatcatttgcatgccatttttcttctgaggataaaagaaattaagctaacaaagtgggaaaaaatgtgagaaactgacatgctgaaactaacatgcagaaataagttttaagtcactgtttattcactttaatttttttagctttgacctcagataaccttagcatttccccaaatgtttttctgtggaactcttctccagctattctgtatgtgtctaaatgtgtgtgcgtgtgtgtgtgtgtgtatgtacataacatatatatataacatatatatatatttgttctctgatcaattaatcttaaaaagctgcacacagtacccacctctacacacacactcacattcacaaccctcacacacacatactattttgcagatacccaatgcacttctgcatattaaagactgagaactcctgcaggataagggtctttaaagtttcccaaatgtacttggccattggactttcattttctccctgtaacacatctttacaccccatggcacttgtggtctacaaacacaccatgggaaaagctggacttctttatttcataagatcagagcttgcttaaaataaagagcccagatatcctacccttttaaaaaacagatgggttctaatcaacccatgatgatgatggtttcctgcccacctgggcatctggtgcctctcctagatttcagggcgacaccaaatgttcgcatgccaaggcaagaaaccgttaggaggccaggtgtcctgcacaggctaagctgtgtggctcagcagttgaagggtgggtctggatcaatcccttgctcagtggctttcagcccaagggtccccagagactcacctaagccaactcacttgttctgtgaatggagaatgaggcactaagcctcaaaatcccctggcccctgttctctttcatccactccatgagacacctctccctgggcctaaatattttctactgcaaaaaaaaaaaaaaaaaaaaaaaaaaaaaccagattacctttaaaggcctttccagccctctgactcttctgactctgttctccttgcacctactccttcccagctatcgtcactgcaattcattatatagatatatagtcacttgatatagctctacaagtaaaactatgtttctgtctgttatagcatcaagtgaaattgagttggtgaactttcactgaatacaaagggcatacttggcctaggttaaaatgtaagttatacggtatacatgaaattcacgtgggggcagtccctggggaaggaatctccaatagaaaattcctctgccagtgttgttacaggcactggtttataattttgctccttctcacacaggcaactcaggatagttgcttaggatgaccagtaacagagatttaattacttaatgactctttatggctttcctaagcaacccttaggaggacagctagtggaagtgtatatggattcattcatttatttttaaataaaatgttcatttttggaatagttttagattgacagaaaagttgcaaagatagaacagagaccccatatagcttctactcagtttccttccatgtgaacatcttacataacaaggtatatttgtcagaactaagacattaacattggtacattactagtaactatttcaccagtttttccactaatgtcctttttctgttccagaatccattccagtatacaacatggtattaagttgtcatgcctccttcatctgtggatttattattgttttcaagaaatagacaccattctctactgcacgcagggaggtatgctgggtactacagtggatcccagctgccctgcagggagaaacacagtgtccagtggagagcaagtctgggtttgagtgtccattctgcccctcatttctgacacagtcctgggcttgtcaccccacatctatagttctcaggttcctcaactgcggtctggagataataccttctagcttgtgagagagctgaatgagacagtctacatggaaagacattttgaaggcttaaagccctgtcccatgcagctattattattattaaagttgctgtaacgattatcattaagcatatttgatacactgtttccaaagcaggacagcccagagtctgagctgtctgaccgagccgacccttccagcttcaaatgagatgtttccatagacctccacgtgccccatagagaaaggaaattttccttagtctgttcagttctacacttcctttatggctccattcatgggtcaccatatcagtgataccttctctgaccatcctacagcaaagagcctctgaggccgcgcgcggtggctcatgcccataatcccagcactttgggaggccgaggtgggcagattacttgaggtcagaagttcaagaccagcctggccaacatggggaaaccctgtctctactaaacgtacaaaaattagccaggtgtggtggcgggcacctgtaatcccagctacttgggacgctgaggtgacagaattgcttgaacccaggaggcgaaggttgtagtgagaagagattgtgccattgcactccagcctgagtgacagagtgacactccatctcaaaaaaaaaaaaaaaaaaaaaaaaagagagggagagagagagaaaagagcccctgaatccctccccacggcattctctaacttcccaccctgcttcatgcttctccatggcactgaacccatctgacacattccctattgccgtgttcctttgttcacgattggcctccctccactagtttatgagctccctgagagccccagttgtggtctgttttggtcagtgctgtaccccagtgcctagagcagccctgacatatagtgagggctcaacagatgtctgctaaatgaatgactatatgcttggttttactctgtaatctcttgcttccaccctggtaacttgaaaacaactctttacacccaaacatactgttgaattcaaatcagagcaaagctatttggtaagcaggtggctcagagccctttgggtcttctttaagaaaaaaaatagggtaatgcctttcttttaatttaattcaatgtcatgaacgtttctttgcctgcctcctctcccatgagtggctctgccaattagaaaccacagtctcttccttgtccagagcctgtctgctggcctcctcacataatcaattccaacagagtccaggctagaaaaagctggtaaaatccccacagccccacacgcagccagttcacttccttactgtattcactcagcacttgcacatcaaaggcccatggacttctcagagcaggaagaaacccaggggatccctcaggccagcctgcagctgaggacattgtggttcagacaggggagggaactggcaaatgacacacagtagttagtggcagttccaggaacagaacccaggactcccagctccataccctggccccaattcctttgtgggctggaaccatctccccatgcccgcctttcaccaaggaacacgtacgtgcttattacctggagctctaatctgattgtctgcccacccctgaccattcctgggtatttgaacttgggcactgatgggctgagatgactctccaaagcagcaatgcaccaggcagcagagttaagagccagacagaaaggaaacgggggttgcatttgttcagagccaggtactttacatgctcatctcaactaacactcacagtgccctgaaatgaaggcattataactacattttataaatgaagaaaatgaaacacagagaacttaaaaatgcagcaaattacacagtgagaaaagggcaggaccagcatcagagtcaagttcctcctggtaaggaagcccttgttctcctgcccgaccactccatcagaggcccaaaggcctagacagcactccagagcctgttgggctgggtccctaaaaacaacaaaatattcctctggggaagtaaccagaatgatcccattctagagatgaggaaactgagatctggagaggaaatacaacttgcacatggccacgtggcttgtgggtggtagatttgctcaactctgagcttcttggggatgcagactctctcctagtgcttagcccagagctgagcccccagaaggaccaatccactgttgaataaatgaataaatgacagcgtaaggtgagaagcacaacctcccgacactcccacaagccgggtgtttacaccccaattgacccacacggtggcctcaggagcaagagaccaggctgatgcaggtgagcacaagcctaaactcacactgatatccaaagctcacatcctcgtctctgagcccatcgatgtcagaggcatgggaagtgatgctggccctggtccccattcagccctcagctctccatggagcaatggttatgcaatgaagaggtttaggaagatggcggagctggtaattctttcacccaaagactgatgtttatggcatggaatgtaccttcctcccaaaggctggtgtttggggcaaattggtctattttgttgccccctttgggagcagctgattcattcacaaatactgcagtttttattattctcagtaatttttcatcctaacaactgaaactagttgttgtttatggttcacctactaagtgccaggcacaggtatctaatgagacatctgtcaccctgtaggtaagtgtgagcattcccacatcacagatcaggaagctgaggtttaggagaggcaaagcaaataggaaaggcacagggctagaaagcaggagatataaactccggtctgtgggacgccatcgctcatgctcctaccatgtggcctttgcaggtccgggacaagggggtcggagccacagccaaggacagatggaaatgggaggcagatggaaggcctgcctgacttcctgggcctcctgctggctgggcttctcatcccaggcagaacatctagcaccagggcacttctccacatgcccacatgctgtccccagactctctgatcagacaatcagggtggaacttggagctcttctgttcaaagccctcaggtgacagcacctggcacccctggttaagaaccactgctgtcaattctcagaccattttctcacaactacaccctcttctggaaggttcgaaaatgtttcttaagaaatctgttaattggtttacaaagaatatcacaactcaaaaccgctgagaccttccaattctaagattctcaaccaagcaacaataactcatccacaaatgcatgtgaaggtttgtctttgttaatggcaattattcccaaacagcgtgatgtttataaaaaggactttggagcccaaagtcctgggtttgagtcctagctcaaaccagttatttgaccacaggcaactcaactcaacctaatagttattaaaagcccactatggacccagagtcctgggctgggaagactagggacacagaagcagacaaaaaaaagtcatgatccctcttagctccgagttcctcatctgtaaaacaggaaccagcagttaccaagtgcctgctacacccccgggccttgaaagtgcatgttctcacttcaccccccccatgagcctcgggaggcaggttctcctgtgatcctgctctgcagcggaggaagcaggggctcaagggggtgaagtggcctgggtgagcctgcggcagtgtgtggcagtgtctgcactctttccatcccatcccccgcttggcagattagtccacagagtgaacaggataataagggagagtgctctgcagccgatcaggaaccgcacagatgtatgacatcatggttattaataatggaagcagcacaactaattcacaatccttccagatggaccacctgaattgtctcctaaaaacctcctgcaaacagagcatcgaattctataacggtagagctaagagggtccttagaagtctgaccttttcctcatttacaggggttggggatggacagatctagagggcagccccgccccacaaagcccaggatgcactgttgggctttagtgattgaaccaggaagataagtaggtctcagatcaaacaccagcagttaccccctccaaagggtgctggcaagaatatcagcagcgaactgcaagtatggcctcttcctggtccctagcccagctcctttctgctacagggcctttgtacctgctgttcttctatggcaaatattctttccccaaagctttgcaaggctgtcacttctttattactcagatctcaagataaatgtcagctcctcagagaactctctgggcccccacgtgtagcttctcccattcctccctggcattctccatcacacagctttgtttgagtttcttcagagtgtatatgacgacttagctttatctgatccattaatattcattatttctcttcccactggaatgcaaactccctgaaagaagggattaaacagttttcactgctgtagtccctagaatggtgcccagggcccagcaggcactcagcaaacatgttcatcaagtccccctggatgttggcctgggtcatggccatcctagcatctggcagacactcattcaataaatgctattgaccctctcctctatgccaggctctctgctagatgctgcggtccttgccctcacagtgctttgacattgattaaagcaaacagcacaggagacgccagagctgtggctgtcccatcacatgcaaccaagcaatagtcggccaatatccacaaatatggcagaaaatggaagaaactgggagacatggaggaaatgcggcgttgggttggccctgcaaagcactcccacatgctcagtactcatcttggggagctagtgccaggcaccccctcaccagctctggggacacggggacaaggggacatccccattgccacaactacctcatagctgcagcctagaacacaatgggatgaatgtgtgtgtgtgagagtgtgcgtaggagcagatgtgtgagtatgaacaagtatacaggatcgcataagtgagagtgcatgggagtgggtgtgtgtagaggagcagggttgtgtgtgcgaatgagtgaacaggatggcatgtgtgagtgagttggagtgggctgtgggtgtgtgcacgtgtaggaacaaacttgtgtgtacaagtgggtgtttgagtgtgtaagagtgcacacacgtgtgtatgtgtgcatgtgtgagagatgactgtggtaccattaccaagctcttcaccacaggctccacatgtggttgaactttacatgctaaagtcttcaaaatgaaaggcacagagttggtaactggtcatcacttaattcattcaacaataaatcatttgactctttatgttttttaaacacattctgcaaagtgtccatacaaagcagcaagactggttctagaggaaaattctcaacttctggatgtcattcagtgaggtgagagcactggatggggagtcatgttgcggtccgtgctttaccactaactactgggtgatcttgggccactgtttagctgtgtgacctcagatgagcctcttaactgttctgggcttctgcttactctccattaaaacagaccaattagaatttagctctcaaagtttggttgcaactgtacaacactacatcatctctatgggtagcccctgaagcactgtttccttggagagcaagcctactaacttgaaaagggcccgcaactagaaaaaaaatgctgggttggacaaagttaaagagtcttttattgcaggacttctcagagcctttcatttgccagtatggattgtaattggccaaaagggtaatagagagcttgcacaatttgccattcttactctaacagggaaacctttactggtggaacagctttcagaactaacaatccactgaacacactgggaaaatctgctactaggcacacaggacacttattaatgaccccttttttgcagatgatggaacagaaagggtgttctaagtcacagagcagagccatgacaactaccagcccagaaatcatccaaaccacagttactggcacgtgcacaaggctttacatctacaaaacattttttacttacgtgatctcaatctttcttaaaaacatacctctggggacactcattccatttttgataaaacatagcctgaaagagacgaacgagtctgcccagagtcactaagggatagacccataatttggctctatcagtttcccctatgtccttgatgaaacatcaatcaatacattatatttttatagataaacaactgtggccactatgcagagatccctgcaagatgccaaggctgatgctatctgcacctgttttgcagccaccaccacttctgtctgaagcccaagcaccctgctctgattaaggggggttggggagggtgctctcagaaatgcccctggagtagaagccgctctggaaacatccaggctgtgaagtgggagtagatctctcccagtcgccacaccctcctgaccatgccaggtacaacccgctaggatgtacccccagtgccagctgtcattatgccgggaggaggggctcctcggaggatccagagcaatgctagtttaactcactcccaatgagccccgaggagccccaggctggtgggctctgacagactgaaactgcatggccttgggggaagctagggctgccaaacccattcagcagctcccgccgggtgtgccgtgtcccacggtatgcgtgggtgcgaggggtgagcgccgcgccggggtgagagtctgcgctggacacaggaggctgtgcacgccaacggccgtgccaggcgcgagtgtgccagagaagtgtgtgaacgcgggaacgcttgtgtcgccctagggtggtgacagaagtagtgtctggaaaacgctggctgagagcgcgtgcatcaggccaccgcaggctgcgaagaagccggggcccctcactccaagggtcccgggagttggcaccgacgcactactgcaagcgcgcccgcgcccagccctctcccaccgacgcggctccctccggtccctctgccgcccgctcggcggtgcccggtccctgggctgccaggccgcggcgggggcgcggcgcgcggggcgctcgttgcttacctgcgggcggccgaggctccgctgctctgggctgggctgcgccgcgctggactgggctgcgctgggctgcgcgcccggcctccgcgcggctcggcagcgcccgcgcgctcggctccgcccggctcggctccgcccggcggtgccccaggcgctcgctggcggcccacgcggcgcggggtgggcgcggggcgggctggcgggcgggcgccggcggcgggcgcggctccgggccgccccgcggccgcttggaagctccttatttgggcagtgatgtcaggggaagtcgcaggggccggaccacccacttctttccattcactccccagagtttcctgtcgccgagcacggggaccccgccgccggcccggggcgcctctcccgtccgctcggcctcactgctggccaccccgggatgccttcgcggccggggtcgcagatgggcccgggcgcggctggcggctgccaggggagggtctcctcgcccggggaatccctggctgccggcggccgcggggagggtctgcgcgccggcctcctcggtgacaggccgtgtcactccgggcgccgcccctccctccgcgcccgccccggctccggcgctgtcttttcctcctgggccctctagggagggcagacagggaagcccctgtcgccgccgccggggccctgccactctgcgccacgccttggtcgcacccgggcccagcgggagtccatcgccgtccccaaagtgtgcgctccccgccttccccctgggtgccagccgggctccgggaagcccgcgcctccccaggcgggaatccgctttaatgagctctgggcggggcgggcctgccagggcctccctgggctcaggcctggggtgggggcgggggacaccccggggcttcccaatggcttgactttaccagaagctgctggatctcgggatttgggcctgagtcactctggtccttgctctggccaggatcaagcacacttgagccagttcccagccaggcctccacaggtctgcgggaaggccaggaccctgagatctctctccgtgatctgttatttcactgatgcccaccagaggttatttggcagaggtcaaccctctgccacagtggaaccagggctggccctgggtttggctgactccaggaacagcctcaggaggagacaatggagctgggggtcgggggtgtagagtggggttaagccaggactagagtgaggtaagttaagtgcctaggatgcagaatttaaccaagcactccctttcagggtcatgaaagtttgaggccccacaggggaactaagcactatgctgacccaagtttccagggggatccttggaggctccaggtttcctctggctccaaagtcatgccctcaacttctctaggcccaaagggcggattagtgaccttgggcatttgtgtgcctttatacaacagcctctgatagagctgccacccttcctccaaagccagatcagagcaaatagactcctcccagacccccagctttaatggagggaacccccaccttctaagaggcactacattcctaggggcagagaggaggaagctatggctccagggcttgcagagagtcaaggcaggtgtgattgcagctggacatgggtctgcacactcacgtacacgattgcaaacccactgaccagctgccaagctgcccagctgttctgtggatcaccaccaccccagtctctctcaacttccatcagctcccagggcccaatcccagctctaattgggtcatcctccttctgacaaagccccaaagggaaggaccacacttcctgatctggcatgcaaggccccacggaccagctgcatctcccagagctcagcccatcctgccatttgcccagccaccacccccaacacgcaccactttgcaccagtttccacttcttgaggtcttcatacaggctttccctttgaaatgtcttctccaccccctccagctgtccttcacaccctgaatccaagcctgcccttgatacaggtccttctcttgagcagggcaactggggtggggtgccccctgggacagattcctgctcctcactccactcctgccctgcccccactgtcctgcttcccgttttctgtctgaaagcaactccaggcagaggaggtgggtgccttgttataattcatatgccctgaggggtgactttctatcattcacacacacaggctcagatgacagccttgctcctgccccaagttgaatgacatcctcctcccctttgagaggtggcctggcctcaagggaccctcccaatggatttggtcaccttccatgatgccacaggcaactcaatagttcctgcctctacagacttgcccatcacctcacattgaagtcagttattgggggcctcctcttcctcagactgggagcttcagggaactttccatcttgatccctctcccctcccaggactgataagtttacaaatgtttgttaagtgaatgaatggtcctgaggggcaaatcctaagacaaactaaccagaggacgggggagaatttacccaacccagaacagtggctgatgtcctagggtccctggctgggggctgggatgaaaggcggggttctcagctagactggcttgaatgctcaggagactgggatggcttgggatttgtctcctcctttctcttgacaaactcctctgcagccatcagggagcctgggatatccccatgccaaccccccaaaacacggagtcctgagctggccctaatgaggtggaggggaaggatgaaggaaaatgcaatttgtcaagccctttcattgtaccagacacagtcagactggatgcccctgagccttccaagccatgcaggcctttccagcggtagtcattccccaggccaggagtgtcagctggggagccctcacctagctcctcccacaaccatctgtccccacttcaagactcagcccccacctcagttctggtgccaattctcactggaagccagaaggtcttcaggactccagcctcagagctcagagaaagaaggtgggggcagacagccctgcttcgaggctaccagcctgacctcgactctactctgtgagcccccacctgcagaccaggcctccaccagtctgcagaaaggcagagttgaggtgcaggacacctttcccaccatgtatctgaaaggcaggtggtaccaggtgccagttccttcctatcagccccatcccctgcaagtaactgggccaggtcttgagaaagtcccagtacttggccctgggggccttcccacattcctgcattcctcaaacatgaatcaggcaccatttctgtgttgggaacatgtaatacacaagcctgtgttcatggatggagactgacaggtaaacagatatcccattgctaaatgttacactgctgtttgacaaggttggagaggggtggagtaggggcatacaagatggaaagataagattcattctacttctggagctacaattcaagaaaactgtgatccaggtgtcccgggctagaatgctgaatgcttgtttccacggaaatgttatacacacacacacacacacacacacacacacacagtctggatctgctgtaaagccagcatcacactgtagagactttacaagctaaaagagattagagcagagggcaggtttggcatctgatctgccatctagaaagctatctctatggaattttgtttccagcttataacaacaaaattagacacaattttggaacccactgttgctcccaaggagctagggaccagcacagtgtgttgggagcacttttaaggtggggtggggctgagcaaccaggccctgtgggccttctgggttatttatgtttaggtcttacactgacttagcaaccatcccctctccatcctccatccccattgctgtgctttcctggactcagatgctttggttgttttcctgtttggggtgtgtgtgcgtgtgtgtgtgtgtgtgtgtatgtgtgtgtgtgtgcatgtgcacatgtatggtaggtgctctcttcatagacctgttgcacacatgaagcttctgtcctgggacagagactagagtttgcattttatggatatcaccttcctgaggtccagtcctccagactcagttcccatcctttctctccagcctgagaactgtgtttccagcttcctgacttaacttgatgctgtggataacagcatgggccttggagccacatagacctgggttcaggctccagccccacatttactgtgtcaccttgggcatgttacttgatgtcactgatcttgacgttctcatctccaagggctgctgggaagttttgacaagacactgcaatagaactcttcagtgtacaaaatagtaggtgctcaataaacagtagcattgattactgtcctcccatatggtgactcagaatcctcctcctctcatactgctcatcttcatggatgtgggcatcaatcttctcaagcccgaagccagaagcccttctccatgcctggtgcctcaattcaggccaccatcaccaacaagttccaacagccttctccctggcaccgtgcccagcttacccctgcaatccattctccacacaggtagaactctctaggacaccttcaagtgggtccctgttcagcgaaaccacccggtctattagggcctttaacaacagagcctcagtttaccagtccaaacctccctctctctgcactatccccatccaccctatgctcccaccatacagaatctctcactgtttctgagccttccaagcacattttgcacatgcagttccctatacttttcccctcacccatctgcttggccagctcccactcagccttccaggccagctcagaggccacttcccttgtgaaggcttccctggcccccagggagtgttggcgtttcctttgccatgagcctccagcacttgatacagactgtcctggcttgtgccccactatgagagtcatttcttcatgtgtctgctgcccccttagattctgcatctctgtgcatgaccaaatcttagctctaggaatgtcacagatattcagagcatgctgaactgttaacacacggctgctctgaccatcctgcctggtaaccagcaactacaggaggccagttggcctcaagctcatggaatagttttccccaaatgacaaaagcatcctcttttcctatacttcagactgagacctgggtctggcctaagctctgagactgcctcattctggcttttcaccagcattttgggggactcccacagggctcagcaggccccaggtggggaaggcggggccttcagttccaggaaatcagaagattagtcaagccacactcccctggcagctgtgagaacaggttttccccaagccaagggacttgcaagatcatcaataacaacaaatatttactctgcccatggctttgtgcccaccaagggaggtgcataagtacagcatcaacttccacagcttggattaagatggatgtgggtgcatgtcctggtcctgacacttactggctgcttaactcccctatacctcagttttcacagctgctaaattgggagaataacacatcccaggaaaaatttagaggaataaattagagcagataaaattaaaagagaaaatgcatttaaagtatcaataacagaagcaatatgtattagtcactcaataaagaagccccccccaagccccccaactcaagctctttgggggatactatgatgaacaagacctagtccttgccaatagctgatgaagtgagggaagggggacatgagaattaaatcagaccctataaacatgaacacaaggtaaacagcaacaggaatgacaaaaaagagttctgggagtagcagagggagagaagaattctgagatgcccttacattcttcttctctcctgagactttcatccaactgattgatataatccatgtggccagcccagggcgaagggctgggtagggcagtgggtgggcaggaaggaatcccgaggcaagacaaatgaggcctgaaggatcctgtgctcaggcagctcacagtctggttccggagaggccttgcacactacagaaaataactatgacaacagtggatgaaagcagtgaatgctgccgaagacatgggcgagagagatgaatacgggaggggtgaggcctggtgcaaaggctactttcaaaagcctgcatccacagcaaaggactgtggaagtggcctcaccccatccctgctcaggctctgctcccactgcagcccttctgacctctcaaggccagaggtgagaaccccaatccttcagccttgcaatcttcccacttgcagtcatgcccaggaagggagtggcctgggccagacagctcactagtccgtaaacataatgtgaatttggatactccacttttccccatgctgttccttctacctggcatgcccttcctcctcctatcccccatccacccttccctccagctcccctgtaaattctctttgcctatttagtgaactcgtcctataagctctccttcaaaagtcctgtttttcttattttttcctgacttccactctcagcagaattgaaagcacccttctcagtgatgttctggtaattagctttgtatataccatcaaaatatttctcacattatagtaaagtatttgtgtctggtgcccctactaggttaggagagctctggggtcaatgcttggtacctactaggtgctcaataaacagggcacctggaaggctttctcctgaggcttcccgcagctggggtggaatatggcagcctctgctactctgcctgggagtgcagaggaagcttccatgatccctcaggaactccagactcttagtccagtcagccatgtaccttccggcctgaaaacaagccctctgagagctgtcttccccaggattttctgctgatctcttgcaacttgctcctcaaacccaccctgaactctgactggattagaatcccagcaagggtcctgggcacctggctgtgtcctatttagaaagggctgagtcaggcgaacttataagcagaggcaatgtcccagagggtggcagggtggaagcgctgaggggagacctggggaggggaaggcaggcctgtgaatttggtgggtcttggtttgaaggtgaaagatcaatagcagtctgggggtgggaggagggtgtgatggttaattccatgtgccatctcgactgggccatggggtgcccagacatttggccaaacattgttccaggtatgtctgtgggggtgtttctgggtgagatgaacatttggatcagtagacttaaagcagattaccctccctaacatgggagagcttcatccaatctactgaagacctgaatagaatgaaaaggctgagtgggaggaaactcctcctgcctgactgcttgagctgggacattggtcttttcctgcctttgcaccagaatgaaacatcggctcttcttgggtctcaagcctacccacttgcagaatggaacttataccattggctttcctgggcctcaggccttcagactcagactagaaatacacatgggctctcctggatctccagcttgctgacagcagatcataggacttctcagcccccataagcacatgagctaattatttacaataagtctcttcctatgtctatatctacatttatctctatgcctatcatattgattttggttctctagagaacccttatagatgtctaaatcaggacttccctcagataccaggaggaccccatattcctttttggggtctcacatctccaacaactctgaagtaagtgagcatttccttcttcctcatagctagcagaggcctcactccctgggagggcctctttgcagatgggcagaagccgtcagtcctctgtggactcctagcactcaatatgggtcctggcacccagtaggtgcacagtgatattgactgaacgaatgcatacctcacacttatttgggtagccctttatggtttggggcataatcacacccatgtcctcatgggtgtgatcccaaggctctgtgaggggcagggcagggaccatcagccccagttaatagatgagcaaacagaggcccagagaggacctagaagcagttccagcagaaggaccctatctccagggcattggctttctctggagcagccatggcccatgtttagcaaaaacaggatgctgccctgagcccaggtgcctccatcccccctgaattcatgcactctgtaacacatgttcagccactattggctgggccctgttctagggacttagagtgcatcagtgaacaaaatgaacaaaaatctctgccccatggaacttatgttctaggggaaagagacagacagtaaacaagaaacagaataagtaagtaaactatagagcatattagcaggaggtatggactatggcaacaaggcagaacagagtaagggaaccaggaatgcaggggtgggagatgagtcacaagtttaaatagggtggttagagtcagcctcattgagaaggtggcatttgagcagcaacttgaagcaggggaagaattaagccacgcagttactaggaaaggcctttataggcaaaggggcaaccagtgcaaaggccctgcgtcgggcatattacacagggcctggcaggccaccgtgagagctgtggctttcagagagataaaagaaggcccacacagaggcctccaacagattctacccttcctggagtgtggggcctgctcaggcagataataggagagccagaggatgcctgaatggaggtgggaacggtagacaaagaagaggtgggaagaaattttccctgattatcatccctttctgcttcaaccagacacccccaagcaaaggcagctcctgcgggtgggggacaggcccctccccaccctgcctctcctaagcctccctctcaggggacttgtgaggagttaatgaagttgagcccaggaaagcaccacaggtagactgtagaacgctgggcccccagctggctatcaccatcactgcccagcctcgacagggaggcaggggcttcgcctttcctctgctacacactggcagatgcaagaagcagatccgctccgaagcctagatgaagtcgcagttagcagcctaattttagactgagcatctgctcttccgtcccagagatgcagctctgtctgggatttgctccttctggaattgccggagaaacgaatcctgctctcgggggcaggcactggtggtgtccagatcagagctgaccaataggccctgccatggggaaggcctcaggagctgtgccaccctggccatcctgtgtcctcctagctgagctcccatctcacactgacatctacagagtcctatagcttccatcttggagtcccactctgccttctcagaaagccacaggtcaaatgaggctccgcctcacgcagaacaggggacctcctggacaggagtggcttttatccatccccacacccacagctcccagcgcagaccccgaagaattcatcccaggtgagtacggcccagtcagactaagactaggagagcacaaaggaaggaccagttgtttgcaaatcttcccaggaaagcttgtcagaggagatgagttttgagttggattttgaagagtgggtaggtatttatcagtggaaaagccaggaaaagctatggaggcaggggaaacagctgaaaagaatatgaaagttggagaatggcctgaagggagggagaagaaagtggggagaccctggtggggattgggcaggggctgggtgcagttgagttgggccacaactccaggctaagcagttggggttgtatctgcaggtgggagagtctatgggggcccttagcgcatgagtgtgctctgacagatggctgtggaagacttccaggtgggaagcccatgcccctctcacctgggagagccactttccctgttgacttcctccatggtttgccaggtcctttggggccctccccacctccctggcacatgtggggcaggccccatgtgcagagtacactgtggatactcactcccctcccagacccccacctgagctctgcccacacatctcctggcatcaggcccatcacctcccacccttctgaccgctgcagccactgcttggtccttgtctgaatccccagttcccatgggcagtgttcttttgcttctccggcctcagcttctctgccctggggctgttatctcaagattcctcaagaatgactctgcagtcccacgtgcctctccctacctttctgtttgtgggcggcaagccctgttctctgagctaaggactttctacacatcaccttgctttatcccccaacaatcctggaagatgtttattatttatccctttttacaggtgaagaaaagggtttgatgagcttaatttgtgattgatcacacagccaggaagtggtagagtggaggccgtctgcctctcagtcctctcccaccaggttcccccagccttgagggcagggcttgagcagtgatgcccaggccagaggcagtcaagacatctggccagttcaggtggggagtgaggagagtgaaagaggaggaagactcagccagggaccatgcctggattcccttgagaaagaatgagttaaacacttacgtaaagagatttgcaaatagattctacaaaacaacatttggatgatttaagtgttaaggaatcagaaccatatggattaaatgtccctgacgttacgtatggttttaaaaattagaaggaaatgtaccgggaatatacacatgtataaaatatgtaaagccaggccacatttttagctttgtggacatggagttatttgaaaaatacggcacagcttctcccaggctggcggtccccctgccccctccccaggccttgtcttctcccccaccaaatggggctcagctccctccctaggggcccagcctgagaaagagacttcctggaacagccggctagctgctctaaccacaggacagttggagccaaacagctgggtcaggaacgactggggtctcccagaggccagatgggtggtctcaggtgcaaagaggcagtgagagaatgcaagtttcccaggaggacctttaagtactttatagagaagatgttgagtagctcaggagaggcagacagcattttcagttcattattgcttttgaacctcactcagtttccccagcagccacaggaggaaaaggttattacccccatttcataggaggggaggctgaggctgaggagggctggctgctcggcttagcttacaggcagtgcaccagaccacgacctggatttcctggttacacacccagagcttctcctcactgtatctcactgcttgaaacaaaccaaaaccgcgagcctgagtccaatttcttgaactctaagcattttttttctttcaagattgtgttagcttctcaagcttgaaggtttatctggcagggtatttttgaggactccctaagtatgaataaatcaagtttggttgtgagtctaaattgcacatgctgttgagctagggaagaagggataaaatgttcagtttgggaaaaaccaaaccatcagaaatttcctggccaagtcctggtggtgaagagagaggatgagaacaaaaagccagttcgttaaaagcatcacgttaggtgccaggagtgtgggacctccctgaacccccaccccagcccgtgcagaaggtggggttgtctttcttctgcagaaaaggaaacaggcacagagagctttgatgatgcacagctgcgtttctaacccctgcctctctgacaccagggcggggcatttccctaaacccagctggctggggccgacctccccagaggggcttgtcagatgaagccagaagcaggtttgtcaggagaattgaatgtcacccagacataatccccgtgtcgggaaagctggccctgagtctgtctcatgccccgccaggtctccaatgcccagtccagtgcctgatgtttgttaaatgatcattaaacaaatcaatgggtgaagaggaaggaggcatcaaggaaccactacatcctccccttctctttcttccattccccacccatgccactgttttgtggacacaagggatggccttcccacgaatgtattcattctggcgatgcttcatcctgttcagtggcattcatgcttacagcctgtccagagctctcagggtgctgactggaacctggagtatttcaaggacgtgggattctcagggcaggaaccaggggaaaaggagaaagggcagaggaatgaggacagagaaggtgagagactcccagctctggaacttcctccctgccccgtacccaggacccctccgtagagtttgcagtagatctgcccgtcgatgggtttcctataatggcctattcacaggtgtcctttgtccagggttatcccagccccacccggctgccggccaccaggatggaatcctcacgctgagatcacatccagccgcctttccacacaagcacctctgaggagtccctttgtctgcagcctttcccatggtcaattacgttgggaaaacactgcctattccacagtcaccttggagctccccagtgtacacagcaatgcacaaagccctgagaggggcgggtaaagaaaacagctcatctttagtccacacttattggaacagaacagggactccccttttcccccacacaggtcccatcctctgcaccccattttcacagccatggaattcttaaaatgctggcacaggcagcctagaaagcccctcagaggccttctgctggcttctcatttatagaaccatcctcccatgggtgtccctgtccccccacaggtaccccaaatgtccttgactccaggctttaatccgtacccctgtgtgccccatgcctgtcctgcttaaatcctctcaatggcttccttctgctattaagacaaaggccaaattcttccacatggtgtccaaggcctgcttcagtgaccccacctgcccctcctgccacatctccccctcgatccacctggggcgtagggtcttctttcggtgccccctgcctcagggcctttgtacatgctgtgtctgtgcctgggacactctgctcgtacatcccttccacatccagcggactcctcttcaacctttccatttccccttgcatgtcacctcctcagggaagccctcccctgcccccaactaaaccaggccctgtgcacattccccagcaccaggcatctcctctccagagcctctcaagtagcagcatttgtaacttttatttatgtgtgcagtcttgtcagatgagagtgacatgtatgttttgctcaccatggaatctccagaaactgtcagagtagctgtgacccacatggattgtttctcaatgctgagccctgggatcagagaactgatcaccctgtgaggttagtactgaggtgctgtctccactcagagcctgctgagccctaggaagaccaggagagtttaccactcatcgtgaattccctgcacctggcatagaatatgattcaaactcagccctcaatatgggtgtagaggaaagtgtgcaggggtggtgggtgagcccatgggaaggagaaccaggccacaggctctgctgatgattgcggctccagggtgtgtccacacggcccagctcagacacataatgttatggagctgaggtgacataggatcttggggaccggggacaggacagctggggaactgccaatggccgggcaacatctaatgccacatcaccccgcttcccctcgaccagctctgccaaccaggtgtttcttttcttttctttctttttttttttgacggagtcttgctctgtccctcaggttggagtgcagtggcaccatctcggctcactgcaacctccgcctcccaggctcaactgattctcctgccttaacctccccagtagctgggattacaggaatgtgccaccatgccccactaatttttgtatttttagtagagacggggtttcaccatggtggccaggctggtcttgaactcctgacctcgtgatccatctgccttggcctctgaaagtgctgggattacaggcgtgagccaccgtgcccggcaactaggtgtttctcagcactccctgaggcctgggtgaggctggggatggcggggacagtttcctccccatgcaggagaaggtggaagaacaggggagtcagactccagcccaatgtctcagaaattcactgtgggagcatggcagggtcacacaatgcttccgagcctcagtttccctatctgtaagatttaagggataagccaatatagaatgatttacatattttgcctcacattattactgactcagcgctttcatccatctcagggtaatgcacgaccattccttttctttctctgttcagtatcctctctcccctttcttctggcaagaattcctcaggaaactgccccccaactccactctcaattcaggcagggcttcccttcacaggaggccaccatcctggccagggcagggaggggcaacctgtttggccaaacacaatcgcgcagtgacccaggagtagtcatgtggcccaagacgggccaatcacagcacctccctaggatttttcaccctgcaacagctgggaggaaagtccacttttcattctggagtcaccagctgggatggtgaaggctagggagccagcaggggccatggcccttctccaccctgcagagtcactgtgttatgccgtgtggaggatgacgcccaaaagcagcagatgagactgagatcaacacgaaaaggagtaaagatgaaaagaatggggaaaataagagtctggtgatctgatgacattatatcagctcctggatctagccatgcctgagctccaccacctactcatccctataaaatgagacaatgagacaaaactcagtttctctcttcccaccccaactctcacttttaaacaatctctgaaaaggcaggaggaatgaaaatgagcatgcactgagagccatgcactgctctaacacgcttcacacgtataatccggtctaatcctcatgacaagcctatgtcgtaagagagaaatacaatagtgtgacagaagacaatggatgctagaaaagggtgttaaagacctgagctctaatcttagctctgccgtgcaccagcggtgtgacattgagtcagttccttaacttctctgggcttatctttgcttcactataaaatggggtagtgatgcctacctcaaaggccatcaggagaatgatgagacaaaacaaatgaaagagcctagaatgttcttggctaggagaactttaatacgtgttagttgagcctgtgaagtccagaagccctacagctagtcttgtttctaagaattagtgttggccatggggaaaagaagagaggaatgtgtgacaagctcccagctaaagtccaatatctggttaatatccagcattggcctgtaactatcaaatctccgatgacgtgaggttggctgatgcgtctgcttccccgcacatcgggcggtcaggtgagtccgcaggaacaacagttctggtgagtggtgatgggtcaccaaggaaaggggcctgttaatagtttccagatgggcctaagctgcttccagtctcccctgcacagtgttgaaaagatgggctaggactctgaacaaagctgaacttgacctggaggccccagctaatgggttattggctctattgggttggggacagggcatgcctctctgtgctgggctgtctgagaggttggcccatttgtgtcaccttctggagagcaattctaaaaaaatgctgctctgaataaatattttggttccattttgcgacgtggctgttggggagatttccatcgagtgtggtttgcaaggcgattctcctctgttgtttactctcggcgatccccacagcctgttcctggcagcatctgcatctgctgcactcctgggccgctgggacctggatgctccgctccagagagaggctgagttggccggcccctccattgggagcctgattgcgacaatgcattaggcagctggccaccagacccacagggcctccccactcctcagcttaaccttgctctccttagccagctctggctaaggctggtgctcttttagaagtcccattcccaccaacaaggaggaggctgtaattagcccagctgctctaggccaggggcttggaattcctgtgggcctagagaagcagccttgtccatttcctcttcccaggggtggcctccggctcgcgctcctctccacccacacacctcttccccagaaccacaaccacacagcagcaggcactatccagtctgagcagtaccactgtctcccacccatcccccacacatcaaagcaacttggagagaaaccccagcccccttgggcctgagcccaccacacctcttggttacagtgactgtgacgactgccctacccgcttgaggccaggtccccagggctgccaaggctcagcatgcccagccctgctcagatgatgacagctctccagccaggaggccacacctcatctcaaagaggaagcagttagaggtgggagccttaagcacactttcaagccagctcatcttagactctgctccctatcaccatggccagatgtccagggagaagaaggattcatggggtcagggtctggcaatcaagacagagaaatggcacaaagtagggagggtgctttccaggcatagagtttggtgtcccagtacaggacccatggcccagggagaaggtgctccacaagggatacatctcaaggatcctgggtgggaggactcatatcacgactgggcatttggaatgttcaagacccttgccatggaggcagaggctggcacacactgttctttctccctcccttttcttctcacctccccaaagccactcccctactctttttgacatgcgtccaattctggtggctcaagttttcatgatgcaggccttctgggaccctattttgcagatgaggaagctgaaactcccagaggccaaggtccatgcccagggtcacagagcaagcaaggcagagccttgatttgggcccatttgtcagaatccaaatccagcactcattccatggcaccatggctgcctctgaacatagaaaggacagatcctatctccccagttgggtgcgtgggactcatttgcctatacctgcaatggaagctgctagtccctccctagcctcactcagtggtccagagaccagttgcatgcatttggggaggggactggtggcagggatggaggactgctttggtatggaggggagctgaccagcctacaaggtgctgctgcccagctgtggctctgctggcaccatgtagaccagcagtgtccctccttctcccaagctctgcttggctccagactctcagctcagtgcctgaaggctcagccctgcccatcactgaattcagcctgcccagacctgggaggatgtgggaaacccagttccatctagggctagaattaattttctcaccagaagccacatgccttgtggatgctctgggcttgcctctactcgcttgccacagtcttctcctagtgcccttgggaggcagggcatctatctggaggtctgacttgagctcaatcctgctgccttaatgagaacttcaggtccactttgctaagggtctttgcaggacacctgtctggctccacagccacccactccatgactataccctgtgcctcatccttttagcaaccaagttttggatcctgccctgaaggggagatgggccaggatggttgagcctccttctaagagacactggctctcacacctcaggcacacactggtccctgggatgaccatgtgggccagacagctaaggatgtgacatagtcatttctctacaggtcacgttggcaaccaggcctgacattgggccactcctctcaggccaagcagctgagacccctgggctccatcagtactgagcatgtccaaggtatctaagaggataccttagattctggccttgtcctcaaatgccaattatcttcttcctgtccaaactcttactctggcagggagtcactcagagtgctaaaacagtgggaaggattgggggcagtaagcttcaaccagaaagatcacttacaggttcttagcctcatcacagtgtccagctaggtggggatcagcctatagttccaaggccatagtcccacttgcttctttttgaaccagctgatagctgtctcagtcccactcagggcaggaacattgtcttttatgctggtgctggaaacacaaaccacacctctgcatggaaactgccctgtgctctgctctgtgattctcatgctggcatcccaaatcttttaaagcagaatgtggagttcctaatcaaccggcatcaagtttcagtgaagccagatgaagcagctctggcgatctgccgcacaatgttgtattaatacctgtcgtctacaacaacgtattgtacacttgaaattttgttaagagggtagacctcaagtgttcttgctaaaataaaataaaacggtatatggcatataaatcaaacaggacaaccccctctccgtggaagcttttatgaaaataatcacagctaccacttactgagtacttgctatgtgccatgatctgggctgaccatttcacatttatttaagcctcacaataataatccctggagggggtattaatactattcccaatttgcagatgagaaaactgaggctcaaagtccatcctattccaaagctcttatcattccccagaagctaagaactggtgtgtgtgtgtgtgtgtgtgtgtgtgtgtgtatagacagagactgtctgctggagtgcagtggcacaatcacagctcactgaaacctcaaactccttggttcaaggggttgtcctgcttcagcctcctgagtagctgggactacaggtgtgcatcgccatgcccagctaatttttatatcttctgtagagacagcatcttgctttgttacccaggctagtcttgaactcctgagctcaagtaatcctcccgtcttagcctcacaaagtgctgggattgcatccgtgcagcaccgtgctgagcctgatctgtgtgttttatcaatgggctttggagatggttcttgagggccaggggtgactcacagttgaactaaaatgagatgtgccctctccccggcagaacatactaaagtgctcagctggtgctcacgtggctgcaggcctcctgcctgtgtgatcccagggttagtttgtgagccacagaggacaaggcacccttgcaccacattctttcacaggcacagctctcggggcacacatcctctgggccagaatggtgcagcgctggcctggcccctctctccttgcttccccagagaccatcctaatgggatgggcaagtgatccagtgggctggtggcacctgagggaggaggggctgggagggaaaccttgtgttcagctacataagttccactgccacaaccttgtgactatgtcccctcctcctgatatggactggctgccccaacttggatgttctttctgactatgtgcaaattccgattcatttacaaatctgctcccagctcccctctgggaatggtgaagccctgctcaggcacatccctccttcctctaacgctatccctgatgacatttccctggctattacataatcaagggagctcagccaggactttaattggaaaagctcttccccaagggtctccgcggatatcacttgtgccagcccaagccctcttacctctcaactcctctctgtggtctctttctctctctctctctcatacgcacacagggacacgcagctgaggccacatcttctgtgcctgtccttggccacactcagtggcttgcatgcttggtgctcactgtgaactatgctgccctgggtctttcaggcccatccccaccaggaagtcttctctgagcacctccacaggtggctcagggctggcctcctcctggcttccgtggcactctgtgcttatggcattgctgtggatgtgtctgtctccctacctaggtcgtgagctctcaagggtaggcaccaagcctgattcttccctgtgctcccagcccctgaattggcccagccccaagcaggctctgggagggttgatggaacgggtcagtgaagcagagggaggaccccgccgaataccctgtggttggtgtcttggggagctctgcattagctgccttacagactttccagaaacaccaagaaataccagctctagacaaaccaaagaaatgaatccagttttcagagtggaaactgacgcccagccggggacaggtggtgcctagggatgcaggacctcttggtggtagagaagtcttaagggggctcagtgcaaactcccttaggcctctccaccctcctgctgcctctgagacctcagtaagagcctgcggaagctcactcagggctgtgctctgggggactcatttctattccttccaatagacaccttccaggccctgggcttggcctgggacttagtcctggtgctcacggagccgtacagacatggaccaaaagagctgcaaagcggggtgaaaatctaataacagaaatgtgcacaaaagtgccaccacggaagatgggggaggtcaggggagacaccatggaaggaatgacatctaaactgggtcttaaatgagagtttacaagaggactaagtggagatgggagatgagaggaagtgggtggttcagtgaaagagaaatgtgcaaagacagagaaacatgaaacaacacagcaaaatggggatctgcccaagccaagtggtggggctgaagcccccaaaacagaagggaacctgcactttaaggctgaagcagtgggcaaggccacatcaagaaggacttgaaagctacactaagccaactggaccccagctggtaggaaaagagccttatatttgcagtccgtgtgcctcatgcagagctcccttccaccaaccccaaagtgggaaaaggcactggcatatgacataatcctattctatcccttacccaggcaaccccctaggccctgtaacaaacacttcaccactgatgggaactcctcttagccacagacatccttgcatctcagagctggagctgtgaagtgctaacaattaatcattgcagagatgagttcacggtgacttcagaatatggagtccttagggataagttttataaacaggtttggaacttcagcaaaaacagcttctcttgagtctgagtaaaggaaagggttattgcctggctcagggctggtatggccatggctggaggctgggaggaagcccacaatggctgtgtgttttcccgtgagattttacctacactgaaaatcctggagcatcttcttggactctcactagggcccaggactcagtaaaaattcaagagcatgagtcaaagcagcctggcagaggatagagctaagttagaagaggctcaggacctggaggcagccctctgtggtgctgcccctcactgccatctctataccagcacttcgaggttcttcccatcaccaccctcctggtcctatcactgctggtgaccctcataacccatggaggaactcagcaagttgtgtggggtgcagggtgttgctacagagctcagatgactatcagttcctaattggttagcagctgtgtggtcctttgtcctgtcttccaaaagcactgcctttaaaaaagacctttgcctgaccttgagatcaagtctgctcttttgacaaatgtggaaactgagccccagcaaggggaagtggttaacccagggtcatgaggggaggtggggacaggggtgcgggaggacccaggtctcctcactgtctgcctcaccactctgacttcctggaggtgactcagcgagacaagcagcagaggaaggaagtgggaaagggaagcccagcctgctggattccaggtcaccactttgttagtccaaagccaccaaccaccttggccatgcagctctgcctggtgccagtgaccttccagcccttccttcccaaggctgcagctgctgaccatttcctccaaggccaagctcacatggcctctccagggtctccagcgactccctgctgtacagtcccatggtgctgccctcctgctggggtcaggagtcacctccatagacctggcatctggctgaacctgtgcaggccgaaggttcatcagtgagatgagaggaggtgtaattactgcctcatgtttaatagctgggctctggggcctgttttcagttttcatcacttgctggccatgggtgctttgatcaacctccctgaactcagtttctttaatctgtaaaatgagattacatgcaacagtatctactttgtaggttgcttgcaggattagatgagataatggccagccgcagaccatgaacttaagacacattggctcttgacatcattgactatgctaggtgtgtttacatgcatcctctcatttaatcttcacaacaacctgccaggtggataccattattctctttcactggtgaggtgagggcacacagctcatggccagacgtgaacctggttctgtctgattccagagcctaaatattctcctaccagctacagaaccttctcttactgttatatggtcaagtgcctgtttttgccctatcaccacgtgcttgtgtggacagggcctcttctccttctccctggattccagtcctggctctgacacttctcaggaatgagacttgtctctgagcccccactgtcccatccatacactgaaaaattggcactcccccagccttcttcttggaggaacacacaagaggacggatgtgatggtgttttgcaaactgtaccttgctgtttgaatgcaaggtgctactcccccaaacagaaatgcttttgggactgttgcgagtgcagcctgagggcagagatccaggaggaccagggcctgtaggagtacctgccttggccaccacaggaattgctgcaggtcccttcagtttgtggctttctatatgttgagagcaggtccttgagagcaaggcggggaggctgcagatacagtacaagtctttgtttccttgcctgtttcctccactgcactgtaagttcctcaagggaactggactggctcacagcacatcccttggatggatggcattcacccccctctccagccacatgggctcctgggagctcaccaagtgggccatgctgctttgcccccatgcccagctcaactccccacgggaagagatcatctttctctcatgaacccaggtccccacctcaactgtagcacttactatatcacaaacccgatttctaccttgaatcctttttggaacagagtcagggtttgaataaataaatatacttgaacttatttgttttctgtctgtttcttttgctggattgtaagttccctaaggcaccttctgtgtgatactcatctttgtaactctcaataaccagcaccaggaacctttggggtatgtgtagcatggttctctctccaacccgcctctctgtcttgcaaactccccctctctcaggggctggtgtgtgttggaactgtgtgtaacagtggaaacaacaggcaccagtggatctgaccagcaaatggactggcttatcatttgggggttgcctcatgtcttgatgaattctgggtttacttttgggttctagactgtggtttttttgtttgtttgtttgtttgttttgttttgttttgttttgttttttttgagatggagtctcactctgtcacccaggctggagtgcagtggtgcaatctcagcccactacaacctctacctcctgggttcaggagattctcatgcctcagtctcccgagtagctgggactacaggcacacaccaccacgccaggctaattcttttgtatttttagtagagatggggtttcaccatgttggccaggctggtctcgaattcctgggctcaagtgatcctcccaccttggcctcccaaagtgctgggattacaggcatgagccaccacacccggccatagactgtattttcaaagtcaccacttaagtaatctcctccagaacaatgggcccatcgatgttcaagatacacaatggggagaaagcaaggagtaggaatccatcaaaagccccgtacagttgtcttcttttctccttgactttgccgttgatgagtttacatgcctgaccacttccaggacatatcaagcctggacatagctggattgtgagagtgtgctgtgtacttctaagtactgactggaaccatgcaaaagcccagcctcttttatgggtcaaggagtcctggtgaagacagtatcaagccttctgggggtggggatggagtataaacagacagcagttctgagaccccagaacccaggaagcagttctagctgctatgagtccctggttctcatctgtgaaaagggagaataataaaatccaccctgcagagttatcagaggagcagcatgagattacaatatataaacacaggagcatggtaagaatggattcattcactccacaaataatcatttagcatctactatggaccaggccctggtccaggcactgggcacaatatacagccagtggcatgtgggctggtcctgagtgctatcaagaaaggtgaagcagaaaaagggaacacggaatgggggtggtggcagtaggaggtgctgccatgttaagtaggggaccagagaaggcttcactgagaaagggacatttaagtaaagacccaaaggaagtgagggatgggccatgtgcatatgcttcctaacagaggaaacagtaagtgcaaaggccctgaggccagagtttgtagaacagtacacagtccagaggatatgggggcaagaaaatcactggggctgtgaaggcatttatgcaacttctgaatttcactcagagacaggaagctatggggggttttccagccaagatgacataacctgacttttagagctaatcactaaactttagctgccccttctcttcaaagcctcatttaatatccagacctctgcaactccagcctatgtgcctctcctttctcagatttcttccagctttccacatctctccaaaccaagagggcttcatcatgctctgccacatgcaggctggagagggacctcgcagagaggctgtagttgggaagggagagaaacagagcagtcttaggtaatggatcttgctctcctctctctgtgctctgaaggcctctgggcctggcccagctgcagcaaacgcacacacttaggtgcacggcgatgctgggagcaatgacagagtccccggtgccccttcatcatctgagaaagctcagtgcagaactgggaatttcactccatgctccctcaccctgcttatctaccaaaaggtgaaatcatttgttttaaaataaaacaattcccatatctgtcagtggtttttaaccttttttgggtcactggctcctttgagaatctgctgaaagctatgagctatcagaaaatgaacatgagatatgtactcattttcttatcattttaggggtttcacagatccttgaaaattcagtgaagaaaccattatctaagccaacaatttcccagccacagctccagatgaatgaatgaatgaatgaacaaataaataaagaggctgagtgcagatggaggaacgatgggggatgaacagagcagaaagatgcatgtgcctgtgggcaccacggttcttgttgatagttcctgacaccttcaaagaagccaactgggaagtgatatggggtcagggtgtgcttgacaggtgacctccagatagccaagccgatcttcttcagttcctctcgtctgaccccttctgttgttctcctctgaccccttctgttgctctcctctggcccctctgggtgactatcgtcctaaaaggtatcaaagcacacttccctgtctttctcagggtgtcctgaacaaaacaggactcttttcctggatggctatggggcaagagaatgaacgtaaattcagatgtataaaatgtaagcaatcactttttctggtcatatggctgacctggctgaggcccagagcccccacatcggtccctccccagccctctttctgggatccaggtttctggcctcccagttcattttaatttttgatacatctccagggaaggtggaatgaacacttaactcattcttaaagtcacaactcccactgtgaaacttttaacacaatctcatttttttctaatcattgttctacactgtaacatagggagaccttaggtggactagggtgggtaggaatccgtccaaacacacaatggtcccagggaactcttctgacagagaagcacctccaaggccccggtgatgtggctccgccacctctcctctgatcattctgcctcctcctcggcaccatgctccagacatcctgagctgggagttccccaaacggatctgttttttttttttgcctctgttgcttcatgtgtgctgtgctggccacctggaacacaggccaccacctgcttgtctcacaagaaagctcttacctctctgctcaagctcacctcccagcctcctcagagagcccatttccttcccctgggaatcccgcgtcctcaccttaacctcagcacttaggacactgtatttccaacttctaaaaaaaatctttttgggagaataaagttacagtttagagaaagacacttacaagtgtttacttaccgattcatttcatgaactgagtcttatttatctttgtttccccagcaaacagcacaaggtacgtattgatgtttccgtaggtatttgcaaataaatgttttcctggtagagtggttctctctctacccttccagctagattgtctgttgtgacctcaaccccctgctggtagggtcccacctttcactggcctccctcggcctccacagggcacctgttagaactgtgtgcaaaccacgagggaataggcgctgaggggctctctcgggagtgaactcgccaacttagtgtttggaggttgtgcctcaagttacggctgccctggtgagtctgtgctttctgggatccgggtgggtagggtcactggtggggaaacctcctccagcaagttgtcatagtaaccaggactttccatttcacgggagagagtccctgggaggaaaaacacaccaagggcttgggaggagtggtaggaagccatgaaaagccttctgacactgtcctcctgtaccctttgctttgcttcctactggtttacatgctcaaggtagaggccattatgtgtgggcatctgagtagaagctgctgaaaatagccgcccgactatttcagggagcagctgaatatgcatgaagctattttagaaaagatgtccctggcccagctaatccaaaccccatcctttcccttagaagtgccaagacaagttgaatgggacctttcttagtctttcccactagggtgggggtgcttcagaagccacagaaacaacaccctggctaatgttggccttgcagcctgtcggctccgcctcccagtcccgtggtcacagaggcttctagccagacagctcagccttccacggtcctccggggccttggcagccttcaacaactactttgccacaatcccgtgtgcctaggtccttgggagtctcagatcttagatatttccacatttgttcatttattcattcaatacacttgtattgctggataacatgtgtgaggattgttttgggtgctgggaaaaaatggtttctgacaccagcttatggcaggggagtgtggacaggtgagtagaaagacaataaccataaagttccaaaacagagaggaatcaggtgttgggaggttggggaaggagcccatgcttcttcctgatggctggagaaagaagatggcatttgagctgagccttgtctgagaaacatggctggctcaaggggcaggggatggctgggtgtggcaggggcaccctggtggaagggtgtgcctgacaggaagtgagaaagaagggcaggagattgtggggacactgaatgctgggctagcaatgccttctctgagtcctcaggctgggatggggagcaccccgcttccacgagcctgaagtgcctggtgcacccttgccactgccttcaacctagaccggaagtgccttgggccaggagcctggtcagatcctcctgagcatctccagagccctgtgccaggcttgggactgagtacacttacatattgttggctgaaagcatggattctggcccggcacggtggcttacacctgtaatcccagcactttgggaggccgaggcagatggatcacctgaggtcgggagttcgagaccagcctggccaacatggtgaaacgctgtctctactaaaaatacaaaaattagccaggcatggtggtgggcacctgtaatcccagctactcgggaggctgaggcaggagaatcgcttgaacccaggaggaggaggttgcaatgagccgagatcgctccattgcactccagcctgggtgacaagagtgaaactccatctcaaaaacaaaaacaaacaaaaaaaagaaagcatggattttggagccagacttcctgggttcaaatctgggctctgccccttactcactgtgaccttgggcaagttatctgacctctctttgcctcggctataaaatggggataatactagagtctatctcatggagcttcttggtgaaaagactccattacatgaattaatatatgtcaagggcttagaagtctgtgtggcacatagcaagcaatacataaaagtgttaactatattattctaaagaatatggatttttatcttgaaatggagtgccatcaataacaagttttccttctaaattgaaaatagctttattgctttgactgatcatatcatatgtacctactgtaaaaagttaaagcattatcagtataaagaagaagagaaaaaaatcctccccttaaatcctgactcagataactactgacatgaccatctgctatggcctgaatgtatgtatccctccaaaattcatatgttgaaatcctgaccatcaaggtgatagtattaggaggtggggcctttgggaggtgattaggttctggggacagaatcttcatgaacgggattagtgcccttataaaagaggccaaagaaagacttctcatcctctctaccatttgagaacacagcaaaaaggtaacacctatgaatcagacagtagagcctcatcagatcacgaatctgccttgatcttgaatttcccagccttgagaactgtaagaaatagatttctgtttttctaagccactcagtttatggtattttgttatagcagcctgaatgaatgaagacactatctttttagatacagttgatcctctttattcatagattctgtatttgcaaatttatgtacttgatcaaatttatttgtaacctccaaatcaatacttacattcatagtcacttgtgggtgtgcagagtggtgaattttttttttttttttgagatggagtctcattgtatctgtaacctccgcctcccgggttcaagtgattctcctgcctcagcctttcgagtagctgggattacaggcctgcgccaccatgcccagataatttttgtattttagtagagacacggtttcaccatgttggccaggctggtcttgaactcctgacctcaagtgatccacctgtctcagcctcccaaagtgctgggattacaggcgcgagccactgcgcccagtgtggtgaaaattttgagttgcctaatgtgcgtgttcccagatgaggctgaatgaggcgaccttctgccttctagtttcagatcccatatggtaaacaagtgtccacgaaaaggacactatggacagttttcgcagttttgcactttttgtttggtgattttactttttcaaatggcctccaagtacagtgctgaagtgctttctggtgttcccaagcacaggggagctactgtgtgccttacagaggaaatgccatgttaggtaagctttgttcagagaggagttatagcgccactggccctgagttcaatattaatgaatcaacaatctatgttaaataaggtatcttaaaacagaaatacacataacacaaggttatacactgatcagctgagaaaaacattgtaaccagaggctcacaggaatcttatgctgtagttctcctaggagcaacagttcagtatttgctaattctgtgtttgtgaggactttatagaacataactactatgaataacaagaatcagtgacatctttctatatatatggatgtacgcttctgtgcaatttggaatggacgttccatacccttttgatactttaaaaaatcatgttaatatgtcaaaggcatctttccattttcataaatacaggtcctcagatggctgcatcactgtgcacgtctctgtaatgaataaccagtagctccctattgatggacaatttggttgcttcccattatttgctattacaaacaatactatgatgaacatccttattggtaataataaaagagctagcatttattcagcacttagtaggggcccaaccctctgctaagagttttataagtgttatctcatttaagctttgccacaagcctatgaaagtggtattattatgcccactttgcagatgaggactttgatgcttagagatgttaaggaacttttccagggccaggtggcttgaaacaaggtctctctgatctcagactccacactcttaactaatgctctgctgctttcctacacacataaaccttgggcactttaggatacttgtttagaagtgaactactgagttgaaaggtggggacatttgaaagtatcaatatataatctcccctccagaaaatgtgtatcaattcgtgacccactaaacagtgctccagtgttcctgtttctcattctgcatttccccaagtattttcattctttgaaatggcccccaaaggacactttgattgtttaatgtgtctcctttgcccctgggtgatgactcttcacatgctttgtatcctctgtattttgtcatttatgaattgcttgttcatagcctctgcccatttttccgctggcaatttgtctttatctaatacttcacttacaagagctctttgggtattagtgctgctaaccttttacccatcatgcctatgttgaaatacttttcttagtttgttatcatcctttaacctgattgttgtggggtggggtgtttgcccatagggtttttaattgttttccttcacagtttctggatttgatattacacgtaaggaggcattcgtcattccggtatgacacaaatattccctcgttgtctttcttttagtatcattatggtttcatgttttttaatctccttggaatttattttggtgtaggaactgaggtagggagccagttgtattccctctcctccatacaaatagctcgttggttgtctttagaacacatcaggaatcacctgcattttcatctctaattatcaatgccatgcattcacataccaatcctcacgtacactgatatctacttctgggctctctgttccttgagccacaggtctatttctgtaccaacactgattttttttctaggccattcatccatgtttatttttccagatgtactttgtaaacattttatgaaaaattttttttgggatttcgagattcaattttatttatagaacaatttataataccttcttcagttgactcttcataattttatgcttttatttctttggagaatgaagtctttttccctctatgctttctaactgccttattttggtaccaccttcttgatgaaagcttttctactcagccctgcaagagtcttttctaatctctccccactcagcactcggccttttgcatgccccacccgacctttttacccaaaattataattactgcttagacagtgagctccttgaaggcaggttccttgcatggcctatttatacatttcctaccacacctggcaggttgtcggggctctggagatatttgccgggtgaatgaatgaatgaacaagtgaatgaaagacatcctcctggaaagctaattgtgaaatgaaacaaatcgattacaaaaaccctctttcataggctttcattagaaaacaaaatatttgtccttggctaaatctccaagaacgtgtcagaatgagagaagtggctcactactagactgcgtgtcatgtgcaacatgccccaacacctgtcctcagagactgccatcctcaccaagcaacagggcacttctcaggcaggctctcaggccctaaaaggcctccaggagaaggaacacaattattcaccatgtgcctgtcgctgagctagacttttaccaataagatacaacaccctgaaagttgggatcactagtctcattttgcaaatgaggaaactgagtctcagagagatgtaaccctacctagtaagtggtagggcctgctgaagtcagggctgtgggactctaaaaacctcgcctctcctataataacctccagaccaccagagtctgggaggttgaggggctgtggcccagaggggaatgctatacagagtcaaagagcaagggtcctgctgtcactaaaccaagacagtccctagaaaacttgtttcccccaaagctgtatgatgccgcttctataaatcattcctaaagagcttgggtcaaagagctactgtcaggcagggggcacatcacacaggcattattgttgctatgggactggggagtggaggtatgggggaggtggtggactcgccatggaggcggggtgttggtctccagtacctatctggagatggccctccagagtcctcctccttgcttgcccagggggttgtggcttttagacagccctgcagttccatcctgggagtgctgccaagcagccacttccttatcaggctggcagtagctgggcaggcctcagcttatttctaagtctggattagagctcaggtttctcatggaggaccatgggttgggggccaatacatttactggacttgactttgtgcctggcccagtgtaggccccagggacatggggatgagcagcctacaagcctcctgcttcatgcagctccattccaatcaggaggtgaatcacaaggaaaacccccaaccctgcccaagagccacagtagagatctctaatgctgagggtgcccagatttggggggtcagccggctgcagactgtggaggttggatgtcaggtgagggcatatgggcttcatcctgtgggcagagagaaatgccctacattctgaagcaagagcctgccatggttagatttgtgctttagaaacagaccaactaggtatattcgttttcaataaacgtgaattctttctcaggtgaaaattaaagtgtttccattttggacaaataatcccaacgtaaggaatcacagcagatggctatgggcctggatgagccacttacctatggggctgatgaatgggaagagccctgggcttggagtgagagacccacatccacggtcaagtccctgccaccatcttgctgtgtgacctccagcaaatgacttccccatctcaacctcggtttcctcatctatcagacaggaatactgccacctaatacacagggccgtcttcaggacaaaatggggtatcaaatggcactgtatatttgtacctacttgacaaatgtgaggcatgagggtgagactcctgaagaccagtccacacccctgagggcatttcagatgccccacagcctgcaatgtcttgggaagtctctctcagctgttccagctccagtcaaagactatcctgtcaaaacatgaccccatccagagaagcaatctcccgtgtgtttggtgggccacctgcccacggggcgcagcctgctgggccacgaacatcaacagcagccccttcctggtgggagaaggaacagggagctggcttgttctctaagagcacagtgctggcgggtgacgaggcacattttaaggtgggatgcttcttcctgcaccgttggcagctgtctacataaggtgcccattatgtgcaggccccaaggccagcgggcctgagaggccaagctaaaattactgtcagatgtgcacccgccagacacactgaacatctgaaggtcagatgcctccaagcagccacccgggcaggagcgtggcagatgggcaccaaacagctgtggcagctgctgcctcttgttcctcccaagcacagagacagacggccctgtgcagcagcctggttcaatagcccagcttgagttaaaaaatagaatgtagagtataatcctaatttaaaaaaaaaaatctgcgtaactgcatagaaaaaaaggtggaagaggaattcactaaatagcccagtcacggatgtggaatagtaggtgaattttttttcctctactttccaaaattttctcaatacatatgtattacttttgtaatcagaagaatacacaataagatgctatgttatatattcctatgaaatatataaaatgattaaatggcatatgctttgacatgtggtatatttgtgtgtgtgaatacatttatacggctggctggtattaaagatcaacattctccaaccccgcgttgcacagaagagacggaggccccaggaacaaagcaggaagcagagaggcagattttcactgaggctgctgttgcactggagtttccccaagccttgccccacttaattctgtagctggttttattcccacttgatggagatggaaaccgaggtacagagaagtgaactgattcactcaaagatgaccagctcggaagccatagagccaaatcccaaccctagctttccacccacagcgcactgagcttcaagaaaggaaaggcctttgaaaaaagaacagaacaaaacaacaacaaaaacaccctgctccttgaagtctcaaacattcagaaagcaactccttaagggagtgagttttgaattatttcctgagcccctccacgtgcacgcctttcttagctctgcggggctcatggtcatcttcccagagctacccatgggaacctttgagaggatgggtaacaaatcatgatgtgggggcacaaaaggcacagcaaatcccaaggtgggactggctggcaggtgtcaggcctttgggacagggtgagggagagcgagttggctggagaggctgctgtctaaactctcagtcttccagtgctttgggaggggcagcacccctctgcaacgccagatgccctgatctgaggcctttgctccagctcttccctctgcatgagtgccatctctatccccacatgctgccctcagtcttccagggcccagttcatccaggcatttgtgcattcttattggtgaacacattttaattgagggcctgctaggtgctagagcaaaagacatagtatcaaccctgtaggtgcctctagtgctcagagaaaggctacccagggtcattcaagcatagactctggggccagactgtctaggctcaccctggctaagccacttcacagccctgtgtgtttgggccagtcacagtctctctgtgcgtcagttgtcatctgtaaaagaggatgaaaagagcacctgcctcacagactagtgcaggtggagtgtacatctgtgtaaagctcttagagaacagtgcctggcatgtagtaagtgctcaataaacctcagttgctataaacattctcatcattaccctctggtgcagattccctccttatgatgcccaccctacttttgtcctctggctggtacctcctctatggtcccatagcactttgaacacccctccatgagagcactgatgggcatgcagtacaggtgtctgaggacctgttccctccttgtctctacctgggtagagactaagtttattcatctccatcccagcacccagcacagatgttataacatcaccaggtttatgtcagcatttgcaggtaatgtgtgccttcaattccagtcgagaaaagtcttagaggcattagaggttgtctatctggccttatcatgtagctcatccatgttgcccttgaactgtggggtctgaccctgggtgtgatctttccgatgagaaccaagttgatgagggagctgtgtgctaagcttccatgaatgcttctctgtgacagggagttctgctgggcaggacatcgaaaacaccaactactgacaccccaacacatcctggtgtttcccgtgccatgcctttctccactggggccccatgaccccactgctgatctaagaactcccatggatccttcgggtgccagtgctcctggccccaccccccacaatgcttctgctagccacagcccccactgaatgtagctccctctctcctggtcttctcttgtttctgccctgggcctgtggggctgctcctgctctcagtgtgtggctgttcctttgtctatgtgtcccttctggagaaggggcaaacttgctcttgtttgggcccccagtgtccaccaatgccaggatcagaggggtgtcaggaaagctctgctgagctcatttttcagaggaaagtcaagcccgctggcctgacctcccattaaggcacgcacgctgactgatcacaccaccttctgaacccaaaactcacaggtggctctaggccagccctgcccatcagttgccactcactccatcgcagggctgagtcagcagggaagccccgaaagtaagtgctgagcacgtggtgcataccgtgctggcctctcgcttgagctcttgcgtttgactctggcaccgctgcaggaggtgggtgttctatacagagaggccttcctgaggctctgatggttccaccgctcctcaaaggaggggcagggcagggttggagcaaggctctctttggccccagaacctactcattctacactcctgtgagacgacaggtgtgtgaaagtgttctgagttctaccaacggaggaaactgtaaaaccatagaattgccagctattacccaccacacagaaatcactctagtacaaccttgctatcaagaagaaggcttcaggggccttgggaacagcattgaatccttacagaattgctgcccaggagggggtggcctattgtccttcaggggtaggaaaggaggagagtgagtgggaactggaagagcagaagagaagcagtcctgtggctggagtggcagcccaacgcaggatggggccccggggacctgaaaggatgcagagggatgctggagtctgtgagagccgaggccacagacacttcagcacggggtgtcctgccctgggcccctattgaggttctgtagattctgacatgtgcacctcctctcatctcggcctccccaccactttcctccccaccctcccacaccccggtaggggcctctctcagaaccacagggctgactgtctcccttccctgcttgtgtaggacccagcctgagctcctgggtgaccagagtcctgccgctctcttggcctcactcccatactcctcctcttgggccctgcatcccagcgactccactgctccacttgctgtcccttgggctcagaatgctcttcttccatttttcacccggtgaacttctattcatccttcaaagcccagttcaagcgtcaactttaaattgtcttccttgaactacccccacaaccaaaccccgacagaatagagccctcctgccttcacaggttttgctgttctgtggctatttgcacatcgatctcctccactggagcagaagcttcttgaggataatgccatgatttgttcatctctgtgcctcagtgcccagcacagaggatagagcacaacaggcaataaatgatgtcctgatgacgaggtcatgagagggcaggcatggggctggtgattgcatctgagtttgacttccagcagcatttactaggagaaatacaggccccctccccaaaatgcacacgtacacatataaggtgaacacacagctcagtccaggatctctgtggctgtaaagtccatggagcaatcaaacaggagactgagttctaaggatgtggtacacagctgcagtgtcagccccactgtcctccccagagcccagggccttggcttgagccctgctgggttcaccgagtcccactccctcactttgcagacaaggaaacagagacccagaaaggagatgcttgcttaagattttcctgagcaataaaggcaggcctggggtcagaagcatttcccttggctcctggcccaggactctcccatcaccatatgctgccatttgcagaaatgccagctgcaggactcgtgacatttgggtggctttttcctaaagtgtcggtagcgtgtggggctccattctcctgcccgaggctaaggtcattcctgtctacctcctggcctcaaaacacagcctaatggcctttgggctgtgctgaaactgccctgtgtcctgtgggggatggggagggctcacctgccaaaaaccagccgtggtctcatggtcaagatgtgtcagagatttctagagcttggagaactgtgttggagggaggcctgtgggaagtagagaaagtgagaatattatgccaccgccatctgtcaactttcatctgagtttgaaaaaggcacccaaaaatggtgagcacagccttgctgaaagcaaagccccggccactaccccttctctaacatggttatgacgaggtcaagatcaggtccctgcggatgaaaccacagcctcaaaaccccagtacagagctgcaagtcacaagttgtctgccctgaggaaccccacaggtatgctggtcctgtactcaggcctaaggctggaggaactcccacttccaaacactcctcggggaaaacaccctttgtgggttccctaagcactgctcattgtaattcactcattcttgctttcattattcattcattcatgcaagcattcaacagccatttgggaaattgttaggtgttggtatcaggtcctcatagagatgaagtctctgagtgtgacagcctagatccagtaagaaaggcgtgtgtagacccaggacaaatgccacaggctggtgggttgcctcccttctccaagtgacctctgtgccaggtgctgggcaaagcactttggttaagctgtgcaggatggcagaatgtttctaccattttcggtacaaggacctctctttgtatgaaattatttctccaaactcctgatggtaactgtatacctattatcttctcattgagaaaataaacaatacaaaagttacaatgaactaatgctttacaattaacttgtattttagtaattatagcaccactacatatatttaaattaaggttggacacatactcatttgagacatattatttatgtcttctaggcttaaggctttgagcccttggggatccattcattcaatattcattcattcaacagacatttatggagcatctctgagatgcccagccctctggctcaaagattagggatcctggttcaagaaggagctccagctctgcagtgaggtacacttaagcttaagcccaggtaacactggatgtgtgcccttagggaggccatctggtcttcttccagctctgagtcctcaagagtaagatggagatgtaatcctgacattggaaagttgttacgaggagtaaatgagatagtagaaagcatccaggtaagggcctggcaccaagcagaagctcaacaaatgggcacccgaggattatcatcatcaccatcatccccaccaacatcaacatcattactatcaacaacagcagcagcagcagcaccaccaccatcttgcttcccttctcttactgaaccttgagaagcctttccttgtccctctactagggtatacagtagtttctaccttataatagagttatttgtatccacacttaaaataccttataatagagttatttgtatccacattttctttctttggttcatgcccagctctgtaatttcagagttgcgtgaacttaggtaagttatttaacctctctgaatttgtttccctgtatgtaaaatgggaactgtatttttagtaattcattgaattgtaatgactaaatgaactgatgtacataaaacctcaacacaatatctgtcatgtggtaaatgctcagatattgcaggtcattattattcatgttattgttattattattaacattagtattaatacaatttctcctcctggcctgtgagcccctaggggcatagtccattgaaaattcatttctgtctccccacagagtctagcacaaggccggtctcccagcagatattaataaatgattgctaaaacagtcttggaggttcacacaaatcaagtgcaaaataactcaaagggcatggtcaagggtaaagagccttgtcaggaccctgaaaaaccccaacagatgtcctgaagggagttttttgtcacccatggagccaggctgcaggactgctaggaccattcattcattcattcgtttattcatcacactgacacccaattttcactttggttgactaacaaacccttgcccggtgctttttcctattgtgaaatctcgtttccatctgctacctcatttagtctccacgaaaattttgagaagaagatagaataggtacattactgacaatccattctgtaaatagatgaaggcccagagaggtgacaaggcttgacaaaggacatacagctgtcaaggccacagtgggaaacggaccaaggctctgctcatgatcttgactccttcctgctggcactttccaaatccaggatcattcattcttgattctcattgtccagtttgcttctcagcaaataaaactgaattaaattatttttggtgttattttaacatgactgttggaaaagaaagactctaaattccataagggcagagactatgagagccctaacagtgtgggggcaggtaaatgtatgaactctgatcccagactgcatgcgtccgaatcctgattctgatacttaatagctgtgggaccttgggcaaattacttaacctctctgtgcttcaatttcttcctctataaaaaaaggataataatagctatctatagggttgttgtgaggattaagtgatccaatccgtgtacaatccctagaacagtacctggtgcatagtaagggttagttgtaattattatttgtattattatttgtgacgtatctcctgcacctagcataagacccaacacataaaaaatccctaataaatatttattggattgttgaatggataaaatactttctgtaaagaagtaagtatctatgctttaagtattattaaatatctatgcttaagtattattgagcaaggcaaaagaatagctgaagctctggccccaaagaagctggagtcccccagttccttgctcacagatctaggcgggaggagattcgtgattccaggattcaaaggcctgtccaccaactggcagtaaatgtgactcatggttaggaacacaggttttagagtcagacacttaaattcaagtcctcactcttgttctgtcactcactagttgtatacttacctcctgtacttgcctcagtaccctcatctgtaaaatgggaatactcacacctaccttgaagggatgttgggtggattaaatgtcatatgcaggaggtgaagcttcctgcacctgggcccagtccacagccacagtaacaatgagcttacaggatcaacagcagctcatcctatgggccaacttgttctgtgctaagcatcgcttccaccgctttctccctcacatgggatttgggggccttcaccagggatggactcatttgcatagcccaggctccaccttctaggccaaaaggctgctatgaaaaggcacattctctatttggcttcagcatgaactgggctctgtggaggcgagacagctgcttaggaaatgggctcctgggaaaggtggtctccagagaatcagcttagagaattccttgcaagcgccagtgccagcaactagcagcctgtatgcagctgcctctgagtcagtcccagtccctgtggtggctacagacccttcctttactctgtttctcccactaagaccccaaggctggcagcctgtcctgcttatgggaaggagctaacatccattgagccagaagctttaattctttgcctcgtttagacttcacaatgagtctgcagtgggcacttgaatcttgccacataccagccatgagaccctgggcaaaccattcagctgcccatgtctgtttccttaactatgagcacatgtcaatatccttgtacactagacccattttgcagaaaaggaagctgaaccatagagagggaaaggcattgtcaagatcatagaactaataaatgacaaagctggagctgtttgacttcaaagttccatgcattcattcatccatcaattattattttagagcctaccttatggtgggcactggctccatagactgtttttaaaaatatctgtattatcaatttcccactgctcctaagataccagtatgcaaggcaattcaatttaacaaagacatcaagtccttctatgtgcccaggcactgtgcgaggttctggtataaaggatcacattgaaccctcatgacaatcctgtgcagttgacctttttatgccctttacagaggacaaaatgggtaattcaaagaggcaagagaacgtgtccaggctcactcacggagcctggatggacgcctatgcccatgtgatgccaaaactcacttctttcccttcccaccatgtttctttctctacgctctcatctccccaccctggcctggcctgcaatgatgcagcctctggaagttccatcagtatccctggcagagggtgttctccatccagcagagaaggacagctgtcagccctaccagcctgtgccatccacactggatcttcaggactctgcttctccctggctccttccactccctgaacttgaccccaggatgacagacctataaaacccagaaacatgtttgcttgtatcttgcctacttccaaaaaggatgtgaggaaggttaaggaacaaaagtgcagaccgaggctcaaaacactggacaaaagcaaaatccagatgtaaaagagcagggggtgctggaagcaaatgttttgaaggacactgcccggcgctcacagggtgtgaggaaatgggtgctctcacatcgctgctggtagtgaaaatagacagaatgcttttgaaaggcaacttcagagcgtgcatcaagaactttgcctcacaaatatccacacttctgggtgtagtcatcccaattcccagaaagacagtctaagaaaaaaaattctaagcaagttccatgcagtcttacttctaatactgaggcattgaataccgacagcaaatctaagtgctaacacagggaaagggctaacacaccattgaaaactagggtacagctatatcaagggttgatagcctgcagtacaaatccaactggtagcctgtttttgtaaataaagttttattgggacacaaccatgcaaacacatggaaagggttaacctaccattgaaaactagggtacagctatatcagaggttgacagcctgcaggacaaatcagggtacatgtgcaagtttgttacatgggtatattttgtgatgctgaggtttgggcttcaaatgatctcattgcccaagtgtgaacatagtacactataggtagtttttcaacccttaccccctttcctccctgtccccttttaggattcccagtgtttattgttctcatcgttgtgtccgaatacatgtgttttatttttatttatttacttattttttttgagacggagtcttgctctgttgttcaagctgaagtgtgatctcagttcactgcaacctctgcctcccaggttcaagaaattttcctgcctcagcctccctaatagctgggattacatgtgtgcaccaccacacctcgctaatttttgtatttttagtagaagcggggtttcagcatgttggccaggctggccttgaactcctgacctcaggtgatccacccaccttggccttccaaagtgctgggattacaggcgtaagccaccgtgccaggctggaatacatgtattttaaaaagagagataactagctgaatatgctctgggcgtattagtggccacagtaaagagtgaagatgggttttaattgtctggcagtaggaggggaccaggaaaccaggaaagtcaaactctcctggcccagattttggagaggaattagtcaccagggtctttgtttcaaggagtttctgagcaacacaatggacaactttctctactgttccgccgatgttctgaggtgttgcccacatagacagcaagtcctggttattggtcctctaacaatgtcaaagaaagaatgttaagctatcgttctataaaggcaattcactcagtggtcagggtgatataggagttcagttcaaataaaatattgcagaatcttctagaaaaaagcatcatcatatctagctgaccagtgagttttagccagagaatattttctttgaaaataacccttaaattgcagatcagcatgtaagacagataaaggcagggtactctggtggaagctgtgctgggtatatttcatgctgctcccctcagctcccccggggctgccccttgaaggggttctgcaggacctctggggcttcttagagcccagctggtgaactgctacattagaccatccccagggcacctgctgcatccctggtcttttgccaagtcgagggcactggcaggagaagcagaggatactctgctacccacagaaggcagaaccatgtcctctagaaaccagaactaccacgagggcaatgacaagatttcgttgtgaaaattaaaaagtgcgacttatgattatgcttccatggagggccttgggtggggcaagaaaggacttaccctctctcggatggcagttctggagcagtttcaaagtctcttaaagggccaaggctgaggcccaagtccccgtactgggaagggtgaggagggtctctggcgggtggatatgcctagaggacaaatgtgtgaaccaaggtttttgatccattttcattccaagagggaagaacaagaagcctattgggagttgggtgtagatggtacagtgaagtcactaagagggggatcttgggtcagatttgaatcctgctctgctacttattagctgtgcccatgagaaagttactgactctttctaaacctcagtttcctcatctgtagaaaaggaaaatgaaagccatatatgatagagttgtgggaagaataaaatgatttactgcatgccaagtgcttagcaccttacctgccctaatgaatacatgctcaataacggtttgctatctgcagcaatagacctggccaagccgaaccctggcctgtcaggagtcagtaagcctggggtttgaccttcaattcatgtgggcttgaagaaagattcagggatgttccggggctgacaccagtttcctgtagctgatgagcagaagacttgttagaatttctagagtgactgggagatgccaggaggggccatcccccaggtgagtgcacagggagcctctagaaggattcgatagaatcctctgccctatcagggtgacattagggagggactacctttgtggggacctgagagagtgcttcatgtaccttctgctctgagtgaccagccccatgcagttgagattgtacatcgtttacctccacatgggaaggcatgccagtcaatctctgctctgtctctgggtcaagcatcatgtgctaccgtggtgggcatttgttgacttttgcccacttggcaccccttctccccactttggcaatagcattctgatttcatttggggaaatcagctctcctggtcttggtggacagtaaatcagggcttcctgctttctcacaaccaaggggagggcatgagcctaagccaggcatctcagatgctctttgccaggccctgactctgcgagctcattcttccatctctgtggccatgacaagaccacttctgattagttcctgttttctggtccctggaggggccctggatccttttctgagtctgcttcttcagccttcctgtcaattccgtaagattctcattatccttctgatatattccctctttgcttaagttatctcaagtcagcttctgttgcttacactgaagagccctaatggtttctgagaggaacaagtcaaatggcttcctttggcacaaaaagctatgaccaggagctctggcaccaaaactgcaaacaagaaaacttcaagtcaagtactagaagcaacctagtagccatgtcatcccccatgtcttctctgctgttggaggctgcttttattggggtgagctcagaactgaatgaaactccattccattttccagtgattggctcatatgactcagttctggtcagcggggtaaattactcccattttagagttaagggaagcctttctcaggggttctgggaaagagtttctttgctaataaaaagagaatctggggaagatgttcctcttctgcaccccctaccaccacatggcatatggccctggactgtgccagctacccatggccttgggtcatgacactgcagctatggaggtgaggctggccaacggggaagctggaacatgcctggattctggatttctgggctgtacgtttttcagcttttgaaccactcctacctccactctttggagtgaaacccctattgtgtaagtcccttgtagttagctttctgttacctgcagcccaaagcctcctaacagccaagcgagctttaaacctgggaatgggcaccccagcagcaggccaggacagctgcatccgggtcatgtcaggtggaagcccagagaaaggagcatccagtgagtggggcagacctgtggtggatccaagcagggccattcacgggtgggacagaggcagcctccaggcagtagcaatctctgaggtcagaagaaaggcagtgtcatttcctgacgatcttccttgtttagggcaggaaaccagcctatagcttgaggacatggagaacagaaccaagccccaagtggggtttgggtggaatggtgatcgccagtcaggggctcactgaggactggagttcatgtggggctctggctttgtagataattggagtcttaggcagggaaattgaggcagaaagaggcaaatccagttatgctgagtcactgacacggcaaagtttaggcgagggtgcagctcagtaacccccgccctccactgccatccataggaatgccagatgcagagttcagggcaatggggtcaattgcagcttctgctggcccactgggaactaagattctgctggctttagccaggttcagctcaggtgatgaataggcattttggagggacgtgtctggagtggggcagggggaggtagggactttcggttaagaacccacttccaccagcagctgagaaagccctagggaagtttctagctgtgccaatctgagtcaacatgcaagcaaccctaatgcccgaagagagctctactcaagttcaaggcagagtgttggtccagcactctgccctccatcccattcttcgtgcatcagccaggggatttgtcacttcctcctgccacatttctcatctgcacactctgcctcttcagagctcccacctcccctctcctagcatggagcaaaaccccaaaatagtccctgggggtcatctgcagggctagaaagattctaaaagtgtaccctcttcatgtgaccaaaaggaaaacagaagcacagagaagagcaagggtgttctgtcatcctgctgtgtgacccagggcagccaacaccatttctaaggtcgcgccagctctgacatcccatggctttgcttcaaaaggacaagcacatgtgaagtggtcaatgaattcttcagagccttatggaatggctctaactctaagccctcagtgagggtctgactatcctctcccccatctcttctcttccaatggctggtcccctgcgccaactggccagcacagtcctactccttgctctcagcccagtcctccctctcacaatgaggcgcatctaaagagcccccgcccaggcttccctgccctaatactgtgtcctgtgtctagaaactatgtgtctgtctcgttcccaaggccaagcacccaccttattcctgggcactggtgctgtgtcctgccgtggcctcacaccccaagcctgactccccaatccctgtggccgtgcagcagtggtcaccataggatggcggctgatcatagcttcttaaggacctgattcctgctaggttctcagctaagaatttgacatggattactccactgactccccaaagagggccttatcgtatagtcaccatcgctactctcactttacagataaggaagctgaagaccggagaaatcaaccagcttgctgaaggttgcttggctggtaagcggtagtgcctcgaagatgtccctgagtcagcccttttctctggactctccgctctgctgcgggcctagactgcagtccccactgccacccaccgggctggccttctagtgccctcccttccctttgcgcactattggtcacaagttcctggcttctctcaattagtagccccaggcctatgcctggccatgatatctccttcagagaggggtgagatttgacaggacccagaagaacaggcagagggtacggggaggccaggaagaggccagaaatcaaggctggtgatttgcaaatgcagagcccatggcagcatccatggcgtctactggttccctctccagctcgctcactggcagttgctgggctatagcttcatgggctgatggtggccgagcaccaccaccacccagcagacactaaggagcacggtgaaaaagcctgggctttggggccagacagtcctgtgttcagatcccagctctgtcccttagaagctctgcaagtttgaggaagttccatgggaaggtgatctctttgagccttagacttccaagcaataaaatggggttgataacaccgatcctgcatagcctttgtgaagacatatgaaaagcatttgtcaaatgcccggctttcggtaaaagctggttcccttttatgccttctcctcgtccttcctgctaccccttggagctggctgtctcccgatgccagagacaggctctctgtgttgagcggcccgagtggttccaacgatgcccaccacgtggctggcaggggcccgagcacactcggcacactggagataaatacagggtccaggcacctgactctaaacaatgggctattctggggttttaattgctcataaaagggaaggcaggctctgggcggtgaccaaccttggaggtcaggacatgcattggggtggcaaacagggcagcaaacacaccaaggtgcaggtgcagaaacgccagccagcaggtcgctaatcccagaatgtcactgagggagggtggctaacaagcctctaggatgattaccctctcagtgtacaaatggggaaactgaggtccggggaggagagcactttattctactgcttcaacaagtactcatcaagcacctgctccaggctgtgctccgtgctctgcctcagcatttcactgcgtgaagcagagacagattcgacacatgcagttacagtgccctgcgacaagtggcaggagaagcaggaacagggccatggtgatatgaaggaggcatgccgccctagtcgcatgcaccattcattccgtaaagatgcgcccactgcttgtgcgcaccaggcactgctcaggtgctggagacacagccctggacgaaggccaggccctgcctctgtggggtttccagtctcctggcagagaaaggcagtagtataaatgaagaggtagagaatgtaacatcagggtgtgtaagcaccgaaaaggaaaacaaagcagggtaaggggacactgggcacctgtggctggccgatggtttaggcagatggtcagggccgatgctaacagtgacaaattaactttagcacatgagatgcgcaggacaataaaggctctgcccttctgagtgaagagggaaaccagcgtcctgagctgacctgcctcaggggtctcagaaaaccagaaacagagccacaacctgtcccaggtctcttgtatcacaggccagagctggtcccctgcatggcccggcagcccctcccttcatagacaccgttcctccctccatcctccctggggagaagcaacaaactggtgccctcccaggctggaggccaaagccaccaggccttttcagccatcacctccttcctggccagttgcccatgctggcctcaggcagtggagcctgacaggagatccttggcctcctgacacagcggggcaggcttgtccttccctctgccacctcccaccgatgtggaagtcttggtgtcagacacacgtggtccttccacttctgagatgtgtgaccttgacaagttcagcagagcatttgtcaaaactggatgctgggccattctcacagagcccctgggaggattaaataaagtaagaaataaaaggcccccaggagcctatggcctgcagcaggcttggtaggcacggacaccttcccctcttgcagtgtcctcccacccccgatctgcgccccagcccagagcatcactccctcttctgagctcccactgccctgaaagcacttgttttctctttctgggtctgctctttgtccctgaataggactgccaactctcagagagcagtctctggcttctgcaagtccctgagcctcctgcctggggctcagctcagagagtcacatgcagtcgctgctcaataaatgttcttccaagtagctttcagccacgaaagtttaacttggagaataatggggcatgtagagctctggattcacagtcagcctctttatcagctaaatgaccctgggcaagttaactttttatgtaaatgaggataatcaccaaataccccaaggttctgcaaaattatatggtgattttaacattattgtttccattatggaatcataggtggagacaagagtctattaaatttgtaacctggtactacagttcttcccacaacatccagccccctggatgttcggcctctacttgaactctccagtgacagggaactcactacctgctgggcagcccatgccatgttttgactgcttctgagcattagaaacttggctttctattgttttaagacctgccatgctgagctctggaatgcagggaaatgagtgggtgatgagcaagcctgggggaggggctggagagagctgcaggatgatggtgggagggtggcagggagctgagagccccccgaaacaatgctgctggtcagtgggccacaggctgtcagctccccttccaagagaagctcctgataatggtgcctcatctgctcatggcttcagaacctgccagcccttccagaagactgcctcctgcccagggctgctcagcagctggactacaggggcccgggttctcaagccctgatgtatgatttatgactccgatgagctcaccagctcagggagggagggtgatccgaggggaggctggaagaaggctggttatggattttaaccctctgatgttactggctgggaatttaacatcaataattcaaggcagtggggagcaagggatgggaaaaaggcaaaagagagagggaggtggggatggaaagggagaaaagaggagaagaagtggaggacgggaagaagacaggaaaagaggcaaagatgcatttattgagtgtttcccatgggtaccatgccaccttcgcctcctttagctcatttaagactcactgaaatctatgaggcagatactgtcacctctaatgactggataaagaaattaatgctccaagaggaaaagcaaagatttcaaggacagcaggggggatgaggggatgggatttggatccatgtttgctgattccagaacacgggttctttctactacaccttgactttagagggtagccaggtcaggggacacagagggtccctgctggcctcaggacacctggccccagctcacactctggggctgacatggggagagatgagtctgaagggcttggcccctgggagagaaaccagccactggccttctggacagcaccaaaactttgttgctgaagctgaaaaaattaactgctatatttaaaagcattgttcagttgctatggtaacagaggggctaagaataatataaaaagaagatgatatgccaggttgtcactggcaacccaattttaagggtgtgtgtgtgtatgtgttttaaaaggagttttctggggggaggtgttgaggttcagactgtcttccccactccctccggcaccatctgccccagcgacatgtccaaggtgcagccaggcctggcatctcactggtctgctggcatcgggggagctggcacaccctggccctgagcctaaagataacgaaggctctcagctccctaactgctgtcccctcctggcagccccccactgcctgggctgcttccttcagctgcggaaccccagccggaggcacctctcaaacagatggcccccaaatagcttcttctctccgacctgggagctttcagccagcctggcagactccctggggaccaccagggaaaacagatggtcaggagagaagagcaggagacagatttattgatctgcagcatggatgtcagagataggaggcggcttggcagatctgggcatggggctgccctactccctgacgtgtcctggtgagacatgccaggtccagcctgagtcttcagcctgggcccaggcgacctgaaggggacccacggcaagcctggggagggtgggaagatggatggggactgggggtcctcacgcaccagccaactgtttgtcagggctgtgatggcagcacccatgggaaccatgggaagaactgggtggcaaaaagacaaaatccccaaggcagtttattgacagccaaggattagaaagaggcctggtatttttactgtgtcatggtcatgcaatatgaaggagagttttgaaatcagactggggtccccaggccggctttgctgcatgctaccatgtgacctcaagccaggccctcagcatcttggtgctaccatagggaaaatgagagtgacccttaggactatggttgggcctcaataaactgaagtttatcaaacaccaggcttcatgcctataatatcctcagcaggcagccctgtctgccaggagaaaccttcaccttagcatttctctatgtcaggcccaaaccgaaagccacagaggaacttgcacatatacacagggaatgagacacagtgagaggtgccttcacatggaagtggacggtggggccccgagcaaccgatcatgcctggagtgggcagggaaatctgaaggaagagtttgaggtagtccttgaagcaggagaacggcagggtgacagaagcacactccatgtggaggaaagcagcaaaggccgggcagggtgcagggagcacagggagggcttgctgagggcaagtcttagcctctgaggccagaacctaccagcaaggtgggcaggaagaagggaaatgatcagagctgggtgaggctcgatagggaggctggctgggctgggtgaacccagaggcagggaggcccatggggatgctgggcaaaagtcccagccagagataagggggctgggccaaggtaggacagtgctttacagtttacaaggcgtggccatgtccattacctcatttatcatcacaggatggagagagtttgctgccccacccaagctctccccccatcaccacctatcagcacttcccacaggctgggggcacccaccatgtacagaaggagctacatctagattcctgagcatcccctagaagtggaagagtccagaagagctggggggccccgatgagggtgagatctcatgagtgggtgtggccacaaagggcttcttgtaggaggagcagtgggagggccctctggacagacagcatgcttcaaacaaagctgggggatgggacaggtcatggtgcattgggaaatagtccctggaccctgctgggagaaagcaggttggggatccaggcaggtctgggtcacggagggccctgaattccagctgagaggctgcatcctcctgcaggcagtaacaagccgtggggagctcagaggggctggggcaggagagggagatgtgaacgaagccggttagaagccaggctgcatcagacaccactgccttcctcctctctgtcactctcaggcatgactctccttctcccctggctgtctgagtgccagcaacagaaagcaggcctcaagctgcacgcacgttgtggaagacgagtatgtttactcagcagcacacagccagctctgcccaggcctcggcctggcagtcttctcttttggggagagctggttgccctgtgtcctgctctgagggcacgcagttgtgaccttggtttcccatggtgaaggcacccagagtggtacctgggggaaggttctgggtctcgtgggagttcaggctgagccaggagagagctgcccaagtggctcagcatctggggaccagaacttgggcaggggaggatcccatggagcttgcattttccgacgctctttcccttattccctccaaccaatatttgttgaatacctactttgtgtcaggcgctattctaggcggtgaatcagacaagaaaaactcctgtcctcttggaacttaaattctaataggggaaacagacaacattcaaacaaagaaatgttgtcaggtggtaatgagccctatgaaagaaaatacagacaacttgagaaaggaaagagaaagtgactagagaaggtgcttgagttgatgtgatcagggaaggcttctctaaggagatgaggttctaggggtgacatctgagcaaaggcctgggtgaagtgagggagcaggggcacaaggatttcaggcacggggttggtacatgcaaaggccctgaggcaggaataagcctggtgtgtttctctgactccttgtctagtgctcttgggaaaagagaggctcaggcaggttaggtgacttgcctggaaccatgctgcagatcagtggctgagcaggaccagaggcaagttttctgcctgtttatccaggggtcgcccaccatatgtggactgggcacatttcaggcatggaccctggccagaggatggacattgactgtaggggagggtgagtcagtcattcagtcaacaaacgctgactgagcgcctagctcacggcaggctctggctgtgctgggccctagcacacagcagggcacccatggatggaagcgcatgtccccctggagcctgcattctagtggagatcagagattatggggatcatgggattccaggaccctagaatctgtggccagaatctggaaatcccagaatcagaatgaccggtatcttagcatccaaggattcggaatcccccaagcacggcttctccatatgggaaattggcagggcccttcagcggcatccagcccattttaaagaggggtggaaccaaggtctggtgcactgaatgtcccacatagggtggccagtggtggaaccagggcctttgccaaggagtctgggcttctggggcagtgaggcgactgtgggcaatggggatgaatacaggcttaggccagacagactggccgtgggtctgtaccctacgcttgctatgtcgtggaatctttctaaatctcagcttcctcatctgtaaaatggcactaagatggcatctacctcaaatggttgtcgtgagaattaagataatctacgtaaagtgcttagcatggcaaatgcttctaacacttgctgttgtgctggtaattattagtgagacttcaataacactggtatgaagtgttagatgacagagattgaaccctgctggaatgggaacagcggacctgccccagccacccggcttagcatcccacagaggatctgcccaggcgtgtcagctgatgggaataagggttgtttcactctcacctccagagacaaacatggtgtgtgtggcctggcacgagtccattgccctcctctctccatctctcctgtcttcccattccctcctctgtctctgtctctctctttctttctctctttcacacccacacacacacacacacacacacgtgcacacacacacacacgtatgtgctgtaattatagccataagaccttgacccagcccagagcagtgaaagctgagaccaaaggcattagaacgaaggcgctagtggattttagctgggggtcaaggtacatgttttaacccttcctctttgctggactgaaactaggcttgatggactaggacccaccaggaggttagaagggcaacagcccatggccaagtgggagtaacaagaagcacattcttaatactgtgagagataaaggccagatagctaaaattgagggctcagagtgtgctgctgcagctaaagacaagagctgcacaaaggacaaccaggtaccctggaagacttcctggaggaggagagagaggagctttgaaggatggggaggatttgaccatataatttattgctctatatgaaaacagcattcaaggacaaagtcaaacaaaatcaagtacaaaggcacagaggctcaaactgttagggtgcaggagacagtgaagctcctcttacaggttagatggaagtgaaacagactgggaggtggagcaagaacttgttttgcctttagttctcgcctttaccttgaaacaatggtcattccttcattcatatgaataactcatctatctaaaacaattttaggcagccctagtgagccctagtgagttttccttcccttggctcaatttctccatctcctaaatggatttgtcactgacatggagagggagactgcccaagagcagatgttcctgaactagtagtcagctgttggctgctccacatcactcagggacgtccctgtccccaccatgaagtcttaggctcattggaaagccttggggttcttgagatgtccgtctttctggggcaagttcacaataacagagaaagatgacacggtgaccaggctccagaaggagacacacagagcccttcctcagggtcacttcaacctcacagcagccccagtgggactcctgactcatgttagcaccaacacagggaaccactaagccttggagaagttcagtgtcttgcctgagtcctatatctggtaaactggcagagccaggctaggaagcccagacgcttcctggctcctatgtcctttccatcaggccaggctgtctcttgccctaagttgcacaggccaagaacagaagctaagacggaagtgatttattcccaggtacacaaggactcaaactgtggagcggggctggggtccagccacacactgagctccagaggcccagttctggtttcagctgagtggccctaccaagctacttgctttcctacgtctcccctcaaacatcctccccaccctccatctacatcgcagatgccaaaaagtcatcagagcaggcaggaaattccataattggcatgctaaacctgatgagctcaggacaccacctctgagtgggcctccagggctgctcccaggccccagactgcaactcttgaagggcctaaagaagggagatcctataattttccccatttgggacattcaacaaatagaatggttcattcacagatttactccatttggacacatcgggaatagccttgggtctgtctagaaagagacatgttcatccagctctgactcacccagttccagcactgaatatactacattattattctaccttttcaaagcctattatgtgtgattcctatgtgaggagttgagggagctacaggtgagaccagagtcaggctctaatgtcaagaggctcctaagacaagaaattagaacacttgtgcactgctggtaggaatgtaaaatggtgcagccactatggggaacagtatggaagttcctcaacaaattaaaaatagaactaccatatgatctagcaatcccactgctgggtatttatccaaaaggattgaaaacaagatctcaaagagatatttgcactcttatgttcattacagcattacccacaatagtcaagatgtggaaaaaacccaaatgtccatccagatgaatggataaagaaaatgtggtacacacatacagttgaatattattcagccttaaaaaagaaggaaatcctgcaatatgtgacagcatggatgaacctggaggacattatgctaagtgaaataggcacagaaggacagatactgcataattccacttagacgtagtgtctaaaatagtcaaactcacagaagcagacagtagaatagtgggtgccaggagctgggggaacgggaaatgggaagttgctgctcaaggagtataaatgttcagttaagcaagttgactaagttctagagacctgctgtgcaacatttgcctatgatgaatgatactttatctacttaaacattggttgaaaggtagatctcatgtgaaacattcttactgcaattttttttttttttgagacagagtttcagtttcactattgtcgcccaggctggagtgcaatggagcgatctcggctcactgcaacctccacatcccaggttcaagcgattctcctgtctcagccccgagtaggtgggattacaggcgcatgccaccgcgctcgactaatttttgtatttttagtggagacgggatttcatcatattggtcaggctggtctcgaactcctgacctcaggtgatccgcccacctcggcctcccaaagtgctgggattacagatgtgagccaccatgcctgacccttactgcaatttttttaaaagctcataagctagaacaagagacgtaggtaggtgcataggttaatcaatagtgctaatagcaaatatttatataatctggatcctgcatcaggcacagttctgagtttttacctgtattaactcacttgacacttgcaatgctattaatactatgaaggaagtatcattatcatctctgctgtacagaggaggaaactgaggcatagaggggttgagtcatggactcacaattgctctgctgctcacaggaacagagctgggatgggagcccaggcaggcagctccagaatctgtgctcctaaccccacacggtgctgtccatcggtgcacagaactgccttccctaacagaggtgtgccctgggtagcacagaggctagtgagcgtgatccactccatcagagggaggggcatggacattttcctagaggagtgatgcctgcacagactctcaatgatgaagctctccatcatctctgaagactaatgaagccagccataaacatgccatgggaggaactgagagggcctctggccaagcaggctgcccctacccctgcccctgggatctctacctccccacctgaccctagtagggtcttcttcctccctcatgcaagctcctggaactcttggtgtgtatctccttcgcagtgtggaccacaatcagctttgtctctgctgcagacttgtcttacctccctccagtggagtccttgttccacctcccttcacctctctgacatctctagctcccagcacaggcctgggatgtagctcgtgcttgtgaaatacttgttgcactgatactagttttccacatatatcagggctggccctggctggacctggagatcagcaaaataaatttggctggccttccttccttccttccttccttccttccttccttccttccttctttccttccttccttcctccccttccctctcccctccctctcccctccccttcccttcccttccctcctttcctcccttctctccctccctccctccctccttccctccttcccttccttctgcctgcctttcttccctccacttttagcaggtatttattgagtatccattgtatgtggcaggtgcaatgcagcaggacagtctctattctgtgggcactcacagtctagtcaaggagacagactagcaaaaagacaattgttggtgaaatgcattctgacatgagtccagggagcataggagcacatgaaatccacaggcttccacaggtgtggaggaagtaatcaaggaagacttctgggaaatggcatctaaactgagacttgaatattgagtgtgcatgcatgtgcatatgtgtatgtgtgagagaaacaggaagaaagagaaagacagagagagagatgcatgtgtgtgtgtgagctaggaagcaagaggttaaggccagagctttgagggaaagaggtaagaccaggtaggagatcctgagggtccttgcaagttgctctaaaggaatttagcatttaaccccagaggccatggggagctattaaaggattttatttggggaatgacgtgaccaggtttgtgttctagaaagatccccctggtgcactatggggaacaaattagagggggcatggtggtggcagataaaagcagctacagaaatccaggtaagacaaggctgttagcagtaggagtgacaggaagggacacatctgccagatcttgagtcacttgattttccttgggggttgggggatcaggaatgagccctgagtttgggtcatctcatcccttccatggggcccctctctttcctgccaccatccccatccttatcccattgttgtaacggaaagtcatggaattcttgggggaactccatgaaatactaaagttctggttccatcacaagaactgggaacaattttcactagcagaaaatgcacccataccataaaatcatacacacacacacacacagccaccacacacacacacacacacacacacacacagccaccataaaaaaatatgctgcaaaactccgcagaattggctggttttgatattcctcattaatatttgtttgctacttgtacatttcattttattgcctatgagcactcattagcagtcaagcagtagcaagtgcccagagcttatgaaaagccaatgggagaaaactagaagaatgagataatgataagtaataactttgtcctttactgcaaattgggaagagctaggtattggtttagtgtaggagtgaaacatctcagcacagccctcagagcccagggtcagggttaggattagggttagcactttcataggtttcttctggtcaaggctggaaagcaatctgattaactagatcatggtaaggaatgaatgaccaccagagtagcttaatcctgcctggaggtactagcagctcggctttagagatggagaggaagtaagctttcccaacttccttcaaatgctataatctgcctgtaaactcagaggataatacagatgttagtttctcttgcgataataatatcatgaggggggaggggcagctcgaggatgaatctttttctccaggtttgcagcggtagcttgaagtagtgtcttggggtggactctgacatccccttccaccactatccactgtcaccttccgaagccactccaaatgagcaaacataaactctaggttaaaagtgtgcttattctacaaatgcagcttcaagataagtcttctgtatgttcccacccctcaccagaatactgtccctgggatcctcctctgagaacagttggcaaagctggttggtccccttagggagaaaagggctggccttcatatggaatgcctagggctgaataaacaatcagatggggtttccttcctgacctactactgctgccaagtaaagtgaacagaaacgtccaccacagaaggccattctccagatgagaaaaccaaggatcagagaacaaagacttggcttggattacatatgcaggaggttcctgcacatctggccacacctaccctttctggctctttgggacatatgatggagactggaggcttccaactctgagctgatgcacgggtaatggacaggggcagctccacgtcagtgagacgtgatgcattaagatgctgataccatggaaaaaactgggaggtgtgagcccctccccagccatcacacacaggccaaacatctggtctgcactaagggcacctgccaaatctcgcctgaggccatgaactccagcccaggtgagacggttctgttcctttgcaagggtggcccctaggcctggacaaggctgaggtgagagtccggctggggctcagcagaagcctgtgaatgactccggttgtgctctcacaccaagacaaagaatagcactggcatctcccacctgaagtttcacaatggtctacttagcctttctcacccacaatcccacaccaactcagggaagaaagaccagctgtttgttttcctacttggcagaggaggaaactgaggttcagagtggtcaagtgacctgcccagagtcatacagcaagtgaatgagaaaggcagaattgaaacccaagactcaacactttttaccatctttgaatgaaacagctgaccctaagcaggatgggcacataagaggcacctctcatgctgtgaatggcatccctgaatcaagaacgcttcgggacatgcagacatgcagctgggcccctaactggttgccacttatcagccgatgtctcctcactcctgccacaagcctctcccagtcacagggacaagggaatgatggttccttacaaggaatagctgtcaagaggcaagagaacagacatctctttttcctgaattatgttagagcccaggagggatgttcaatcttcaagggcatgtgcggacctacctaatgcaacagcaatggaataactaagaattcccaggacttcccacctcccaaagcccaaactattgtctgtgctgatggtaactgctcgctccaagatgaatgggcagaagctgggatgaaaggcccagacacataggactgataaagcaaacaggttcagtgtccagcatccgtatggaaactccataagaggcaagggccaacagtcctctgtcccttcctccagtgacccccaaaagacaggcaggcactatcagatctccaggataggctcaacaatactggaaaacaggtgtattgtccccattttgcagatgaggacatagtggctcagagagatgagttgaccagtcccagggtcattttaagacccaagctgcattacttttggaagcctccccgacattctataaaatttatcccttgctgaatgtaatattttgctggaaaacaactatacatttaaaagataattttgtttttgaagtgattttcagtgagtaacctgtagtatgaatgatatgctctgatttctcagcagtcattgtctgcaatcaggaaccttggcaaggtgaggcatgctaacccccaaaaggagggctgtttctataaaaactaaatcatacaattcattatgcttgagtatattaactaaatattaattttgatgagcagttttcatattttgaaaccaaacctttttcttttcatgtctcaagcattttcatgagccctcgagaagccacatgggcccatggtgtctcccgggtaaatcaaacccgggatggacctgagatttgaacacaggtctacttccaaaaccagggctccttcctcaatgtctggctgcctccaagagtcaaggcaccatctctaagttgtaacagggaaactaccaaatagaaccagcaggcaagcaggcatgaagggggctggaagtgaggccctttgagaagctgttacagattttgtagatgtttgatcataaacagccatggcagtgggtgacgtttacacacccgctcatgttaagtcccacagttacctccttttgagcgtggaggggttaggaaactcccagtgtcacatagatagcaagtggcctcaccacgatttgaactgggggagttgtgctctggagtccaaaatcttaactgctctgggatactgggacactggagcagaaggatttggggcaagtctggagaggcccaagtgcaatactgagacatctagaacaataggagagaggagatcagttcttttggggaaggtcaaagatagaggacaggtgtggaggctggcaggtctcagctgactagagagaagaactttcttaaaaaaggcagagctgtcgaacaatggagggctgccctaccctgagtgttgagtgcctggtggctggcagtctgcagggaaaatgatgcctctgtgctgggcatgggggcaggggctcttgctgtggtagagggctgtacatatggactccagagggcgtaagtgataatcctctcttcctttctcagaaccacctttctacaggctttggtgtctcagcgcgggaggcacagatggcgaggtctgcctttggccaggtgtgggcgcccagtgttgggggagaagactgcaggcacagaagactgaactcacaggcaggtccggagatgcagagctggtgttcactgggtttttctatgtgctagttactggagcttcacgtgtgtcatctccttctctcctcacactctctgagggtggacttcctcccatctcatagatgagaaagagcctggggcccagagaggctaagcagggaacctggggctgcttgggatcctagggcgatctgacagccacctcagcttccccaccacgagggatgaagccgggaggcagccccttcctgtgcctgacccctaccagctgggaaatgtggcccaggcaggcaaggcctctggggatcccaaagtggcagcaggcagtgggagctgagcagagaggagtaggggtgggctggggggacactgccagacggaaatgaaagtggccttgagaaaaaggaacgagggaagaaaagcagaaactaaaacaagtgacaaagaaaacgagagtgtccagaggaagtggctgaggggcgcggcgccgccggaggaatcccccgcagaccggtgtttcctctcttctcagaggcctcggggtggaggactagctgaccaactgctccgtcactttgggccagaggcagcccgggtgactttggcaagcatggcctcatcccgccagcctaggaaggagcaccagacacagagccccaagccctgggctggagtcgtagtcagctacttcctgctgggtcattctgggacatttattagacctctctagtacccagtttcctatctataaaatgggtataaccatcctgagcccaccacactgctggaaggatctcctgagcaaatgccctcatccagggcctgacgggtgcatgttggggtaggtgggctgtgcacacagcggcagggtgcaccttcaggatacctggggaacagacagggagagtatccaccatcttattgttgaacaagaatgcatcaacgcttgctggtccttaatcaccctaggctttgtcaggcctgggaacaaagggctgaataagggccagtctattcccaattacagactctgcatgcaactccagttccttatcccagctctcctacttggtagctgtgcaaccttgagcaagtgacttgacctctctgagtatctttcttcacccataaagctagaacaataagcatatctgtcttctaggttgcaaggaataaatgagaccacactcaatccaaagccaggcacaaattcctcagccccagcccagggagtgcccagcctagaggggagctggagtccaaggacatgagcaggctgtaatgatagacggcacccaggcctggggcactcagtgctgggcaggggatgcggggctggttctgccaaggcgacagagcagggggagtaagggggggtgaaatgtaatcccaaggggacagcatgagcaaatgtgcaggggaggggccaaaggcgatatgcttgggatctgcagagggtggatgaggccagacttgttctcaatctacagccccactgacagttctcagactggccctggaagtgatacgggcatgccactggggatgctacagtcagctcttaatgcagggctggcttctagggtcagcttctacagccagacttgcctaggctgcagtttgtctccagacagacacgggaattcccccaaggggtgggcatggttcttgtgaactgctgtggcctgggactgggcttagagtacaggcagctgctgcggtgaaggtgtcagaaggcacaggctagggtcccagagaggtttaggagggggtttctctgctgggtgtttgctcagtgctggatggtgggtgctgagggcctcatttgcatagggagagcagctgctgtcccagccacactgctgcccacaatctccacgtggctgcaatctcgctctcagtcaccatctcccacatggactaggggttacccaggctgccttggccacgtgcttcccccaacacacagccatccaggaacaaccagaaatcagactactgtctccgccaccctcaggggttccattcagggagtccacctcccaaggtggctgtgggaataaaacgagatcctgggggaagcagagagcccagtgcacaggggtgatcagtaaccggcagcccctttccctgcctttccctctacttccaacattatgttgtgaagaacagggcagacctgggcccatgctatctctcaccctggctctgtgacttgaggcaactcactccaactctgtaaatcaactgctcatctgcaaaactggcaagaaactgagaaggcactggttctcagattggcaaagctcatcgtcactgcctcactccctcaactctatgtccagggaccacgggtttcccagggttcccaaacttgctgttggcaaagggcctgatatccgtcactgacctttttattctgaatgggtccccgttgactttaaagctggaatattcttagaggaattctaaactcctcctttccaactccctactcattttacagaaggagaaagtgaagagaagagagggagaagggccctgaccgaggccaccagcttgtaagtagcagccctaggcttgggaccagggcctcctgaaggtgacagtcctttcagccatgtgtccttgttcctctagttacctccaattaactctaggtaacccagcccagtctttgattctgtgttgaaaggtgcgaggtgctggagccgggaagaggtgcgttcttgctctcgacaggaagtgtcatgtgagtttccggttccctctcctccactaccactctggatcctcacaccagcccacagagggagacaggaagggaggcacaaaggcagggcagggaatactgtgcctgttttccagatgaagacacgaaggccaagagagggaaagtgagtcggccaaggtcctccagctagtcggggttgagcgtgtttaaccttaggaaacgtgactgcagagcaaggggctttcatcttcctgtgggaattcgccccctttctcacaggggccctcaagagactaggcaggctcctcctgcaaaggattcctctttgtccatttgagaggcctcaccccaggctctaggagctgacatgattcagctcaaggaagactcagtatgaagggagaaccaggaacctgggcctctgcccctcacctgtggccttgaacaggtcacttctcccctcaagccttggtgtcctcccctgtagagctgagggggtgaggagtagatgagctgatccttcagtttgctgccctctttgacccggaagtgctgggcctgcacaaccctgcatccctggcaccagtgctcctagccccaccctgctccagatgcccagtgcctgaagagccagctccccatcagcactcagtcctggggcagagccaggcctggcaatgctgggggagaccctggaggggaacatcatgggccaccaggggcacgctgcaaatgcagcaactaatgcaccaggggcgccagggtgcaatctatctaagcagttctctcacgctctttgcacgttaataatgcatgggcagccggtgtgggggccatcacaggcccaacgtcaggtggcattaggaggcctctaatggtcctgattatccggtgaaggctcccagtgggatgtgggcagcatgggcaggaagccaggattccgggcacttagaccccacaggtgggaggctggggggtggggcaagaggacagcttccataggccagggtcctattcaggggatctaatgggactagctgaggcttcctgtggggggtgaatttgtttgtgaagaggagcaaggacgcaactcccacagccagatcacaaagaaagtgggaagtcagaaacccagggctgagtgaaacctcttaaaatctctcctctgtggcgtctctgaccagtggctctgcagcaagtgcctctagggacaaggaactcactacctcctagagtgacacatgcccattctttgaacaagtgtgactgccgggaaaaaggtgtactgcgtacagctgtcaagaatgcaaatgccactgagtgttgggggcatgggtaagttggataaaggggctgatttgagagacagaggtgctgggttctaatactgaggattctccttgtcctcaggcagctccggagccatcaacctggccagtcttcacagcctaccccagtggcagaccccctgaatccaccccagggccccagtaagcccccgtgaacctgtgaactttgcatttctatgctcaacactcagggtgagcagtccagaaaaaacaacccatgcacagcaggtgctgggggtagtcaggcttcaagatgcctccaaatggttctcatctctgagtattcacactgaatggaactgacctatgtaactaacaggatgtcgtgggaatgacaggcatgacttccatggctaggtcataaagagattgtggcttctaccttgctctctcttggaccccagttgctggaggaagccatctgccatgtcaaacagcctatggagatgcccatgtggggaagaatggaggtcccctgccaacaatcagctttgacatgccaagcctgtgagggagccatctggaaagggagtcttccagccccaatcaggccttcagatgactgcagccctggccagctccttgactgcaacctcatgacagaccttgagcaagaactgctcagctaagctgcttctgaattcttaacctacagaaatgtctaatgctttaagaagcaaagtatggggtaatttaccacatgcaatagataacaaaaccatgtgcaataaatactggttaaacaagtgaatgattcccctgaccgagtgtttctctatggaagggtctggcatggaaccaggccctctggggcctatgggggatggagaggaaacaaaagatgaggacatggtcctctaggaaggctgtggcatgtggtggggaatgacaggtgcagaccagagggagcagtgtgagagctttggatgggctagactatgtggggaagatgaggaaggagttctgagagaggggaccacatgagccatggtgcagcttgggccggacggggagcatcagcagaggcgggttctccagtggctctcatcttgactgctgtatccctagcctccctgagacagctactattatcatctcaattttgtggatatggaaacggagattaagcaactcgcccagggtcaaaacgctgggaaatgatggagccaggatttgaactgaggagaccatggaacagaaaactagcagagggcggtcttaacaaggcccaaggagatgaggctccccagcagggtgactgaggggagggcacacaggtgctagggaaggtggccaaggaaaggccactggggctggtactataggagcatagaaaggcaggggaaagtagccttggggtggggggtgacaaaggccctgcctgagttgaggactacatggctttgtacccaagccactcttaccccagctggagcctcatgtctctcccaggatgctcttgctgggctctgtgcctgggctgaccaactcccttacacagctctgcctactccccatcatacagcacctggaccgcgacgctctatccccgaggacaaggcctgccttcccccaacagaaccccaaacacttcaagctacagtctccagagactctcttctccagagggccctgcagggatcagatgggactgggggtcggtaggagggcagaggacaccaggtttcagtccccatgggaggcaggagcatccccagcctgcctagtccccaggatctggttcacccatgtccctaggacccagccctgggcctggtacacagcaggtactcaatacatgtgcatggaataaataaaccagcagatgcagaactccatcctgcaaacacaaagcagttcagagcacactgggaaatcacatggaggaaatgttctggccatgaattttcatgctggtccctgataatccaggtcttttctgtcattgcccccagggactgctggcatcttcccggctgcactgggcaacactccatatggggctgtgctgagacatagtgacagagtggagggggtggggaagatgagaacacaagcaggggcagagccaagggatgggatgtccttggattctgaaacccgagtgctgacagccaatgtccaactcccaggtaccaagtggtaattactgtgaaaagcagacagcttgacaatggaggatgtagatttcacccaaggccttaccttgaaccctcccccagtcacatcacaggccatagggcttgtgggaagggtccttagtggccatccagcctctccctatatccaagaggaaactgaggcccggccaggagccgagaccctcaaagctcacctgagagttggtggtggagttagaactggaagccagagctcccatctcctattctgtcgctcaccaaacatggcctggctcttggggcgttgccctgggagacaagcctgtgctctgagggtccactgtggctgagtgacttaggggaattggttctgcaaaagaaagtgccaggcagggaagcagcaaccaagggactggaaagaggaaagggatgtggggaaggctctgggacaggcctccctggctcctcactctctttgtccccctgccaccttctcagaagcactctcagcatcccaggccagcctccagcccagtccttctcccaggctgttcctcggctctcaaggcctcagctcctccaggtgtcccactcctctcaacctccagcccctgcacagaactcacactccccgccctctcccccagcacaagctcacagtccccactccctggtccattccccttcctgcctggctgctgtgcaaggtgcaactcagccctcaccccctccttgctctattctccatgcccccaaatctgctgctgttcccacctcacccctcctggcctctccagtcagtgagcagaggctgcacccaccaggcctggggtgggctctctgaggctcatgtgcattgcagctgtctctgctgcactgagtggatggtgcctttggcttcagagccccctgcatctgaattgagttgctgccacctattctagctgtgtggccttggccagccagtaaacctctcttttcatctgaaaaacggagcagacaccttctgcacaggttaactaaagaaccagctggcacgcacatggcccagcgtttggcccagggaaggcgagagatagacatacattcagtgactggactaactcggcaaatgtttccagccaccccctcccatgcccagggtccaggctggtgttgaacatagtcaatggccactaagcatttcactgactgattcattcttgctgctgaaaggtgttcagccaaggagcgatgggccactgggtgatttagaaaggccctttgggctgccatggcggagggcagtctgggaaggaggggacagaagccaagagaccagagaggaggtgactgcagctctgtaaaggagtggagggctgggcaggtgggttgggcagtaggaagtccagccagagactcaggagcaggacccacagcagccagccccggggcaggacggcagttgaggactggggcagaatagaggaaaatatccaccaacgtgggtggctgcttgatgccattgggtgagacatgatctaaagaggaaaggcaggtttagggctgttgtctgcagcagtgaaaatgatgaaatgaggaattgggttttgcagtgttaagagagtgcttacagggtattcagggtgttgtctgtggggtacaatgtttgcgacaccaaacacatcccttcttcagtgccaagatagtgccccaccaacatgctctgcaacagcaaatcatttgccagtaccatgacttttttcaagtaatttatgtgcttcaacacatttgtcttcaacaaccctttgcagaaggcactataattatcatctccatttcacagataagaaacctgaggctcagagaggtggaatcatcttgcccaacaaattatcaacaaagcagaaattggagtcagttgcaaataatttctattgagtgcctgctgtttgggagatctcttcctacgtaagggcacgtagaaccatgtctagcacacagcatgcatattaacacttgctctgatggtgacgatggtgaagaagatgatgacgatgaaggtgacagggatgaggatgcacttctcacatctgattgaatccatttgacaattctaggaggagggcatgagtcccccttgtctgtggggaaaatgagccacaacagtgtgggagtttgtggcagtatgagggctgagctcaggtcacagaggtcagtgtcacccagagctcattcactgctctaaaatagaaccatccaggctctgctcactcccttcccccaaattagcaactttctaccactctgcctttctcccctatggctggcaggctggagatatgtctccagcctggagatttgggactcaggcattgctggggaattaaaccctgctctcctcctccgtcagcacaggcaaactccatgacaggcggatggaggatgtctgcctgctccctggccacccacgtgctatctaaattcactgccagacaaagccgcctctcgatcttggcgcctccctccctccctgccattcatgcactgagagattgcatttccagtaagtggaggctggagagagaaggaagcaagcaggagggtgggggctctgggggaagaaggaagaggagagaaaaaggcaagaacactgaatcaggcccaagagttagccccaccatcaaagtgacaacccattaaaaaaatgatttgtgggtgtgcaggggagacaccacctctgaagagccaccttttccatgctcaatgaggcagcatctgcagccagtgcccgcccagggtgtctgggagccgatggttatcacaacagcccttcacgctcccacttaggaaggaatctcgagagttccaatgttctgatccctccccacttttagaagcaaggagtgcccgggcttcatgcctccatggcattcgttctgggggaaacctgaacgaatttccaattgcatcccccgtggtgttcagatctctccctcctgcagagccttggcaggtgcattctctgtccataagaaaacagaccaagctcctttgacaagctacagatgctcagctccccgtggaaggggttgaggggccaagaagggtgggtcctggggccctgacaaggcttcctggctttgggagaaggaaggtagggccactgctcccccagctccttctgccacagaaaacagcctccccaggtaacctaagcaggggtcttgagaaaagtagccatcctgggtcctggctgtcttgtctgttaactgagagggctgcaccacatgccacccttccatgccccagatgcaggatgagcattcactgtgggcagatgcaggccaaggaaccagggcgtgcatttctggcttccctccgcaaactttcactgccttccagactctgtactggatgcctggggattaaggcacaaggatgatcacatgtgtgtccttgggtggctcagagtcccaaggaagaaacagatggagagcagaggccccatcatgaccggggcaggatggtggcctgtcagagggatgtggcctgaaggaagtgttgaaggaccaggaggagttctggctctttttctacccagagaagctgacacggttggccagggcactatagtcactccagggctgactcttcaggctccagccaccacctaccccttcttagaccctggtgcctactactcctgccccacctccaggcaccagccacaaataatgttcgaggtcttctccgccctttcctttatctgctgagaaacatggctcccctcgttccccgctcaccagtgggagtgcccactcatgaacatagacttttggatctaattggccagggtttgaagaccagctgagccacttacaagctacgtgggctcagaaaagctgcttaacgtatctcagcctggtttcctcatctgcaaactgggatgaatagtactactggcagggttgtctgggggactgattaagatactgtgtgtgtaagcaggcacttgaccgatactcttgccgttcccactgcccacagtgcctccaacccctgcagtcccatttttttgtgtctggctgtggtcaaccgtcatatctgagatgagacctctatctctgccatgaagggtccctgactctccaagactacaggttcaaaggatctgcttccccaaaaggctgagcatacccctgtcattgggtttagtgtcctgggctaccatggcccattgaatcatctgttgtcccaccagctgctaaacacctgaaaaagagtcttatttgcagtaactcatttgctccttagcatccttggtttacagatgaaggaataaaggctcagagaagagaaatgacttatcaaggtcacgtggttaattaaatagaaggtggggcggggaactcagtctggcactttatgtaagaactgtgttttaataagggtcatcaacccaaggccttggtgatgatgaggacctcaggctcatgacaaaactgggcagggagatatatttggaaagggagattttaatgtggaaacggcttacagatttgtgaggctctgaggccctaaaatacagcaggtgtcacttaacctgttctggcacatcctacttgccaggccctgtgctggggcctttgctgtacctgttctgttctgtgtcactgaaattctgaagaaggatatggatccatgccatgtctatagaggaccatgaagctcagccatgtgatctgtccaaggccagagctggtagcactgaaactcaaattcagcattggccacctctgggagggcagggtcctcttccatcctgctctggccagtgggagggacaccccatgtggagaaggcctgccccaggccttggcctctaggaaggacgagcgggaagcagcgtccccagagacatatagacaagcagctgggtctcacaaactctggccaagcccttgtactgcgcagaaatcgcaggcactgtcgctgaaccagtcctcagaaatcagtaaagccctgggtttctcaatccaggtggcggcctcagcacggagccatggggtagcggggcatcttctcagaccatcaattctacttggagatgtagggaagaaaacaatttaaaaattcctaaagtaagttctgatacatgctatagcataagaatgtttaaaactcaaagaaattcattgactcttctctgtggaaaagcttaagaagttttgagttaatccaaccctcccacaaagcagaaagatagtagagtctgaggcatcaggtgacttgctcaagttcccatgatccatcagctcacaggacctggactcaggcttggaaaccagcggctttgtggtcaggaagccctggattccagtccaagctctgctgctgtgtaactgtgctgttttggcttgatcaattcctttctccatgccttagcttcttcaccagtaaaatggggcagctgtcttggcagctatagggattcctgggcccaccataaatgcccgcctccctgtctgcctctttccctacaaacagggtaaagaaacctatggagagaaaactcccacatcagcactcacatccccaagagggtagattctaaaatcttttctccgttggtaatgaaccatggcgccattagaccacaacatttcacgtagtttctgaaatcatcatccatatgaagatattgtgcttggaatcatctcacagtcaccggaaggctgaattccctcggccacccactgctttttgcggaggaaacagaaatgtctgaaaatagaacgtgaatcgatgcccccgacttgctgccgcaaagtgtggcaaagcccaaggagcccgcgccgcctctgcccctgcatggccccagacggctgggggtttccgggcagcctggagtaggatttcaacatctcaagctggaggtcacgtgcacagagcagccggtggcaaacggggaactccaggaagccaggctgtttcagagaagtacttggagctggggggcatttaggcaggagccgagtgaggtcagagggtcggtggcagccgtaggcctaacttgccagagagggaggcccagtctcagtgggtcactccttccaggagcagaggaacagcgtgacagcccagtggcggccaagtgaccgcccacagagcactgggcacccacaactctctttgcagatgggaacaccgagactcagggagggtgagtaatgtgcccccaggagttacccagctcagcagagaaaaaattggggttgcccccaccccctctgcctctcttggaaggaagtcttggcttcctcaggcgctccttccactccacccactgtacccacccacctaacatctaccaagcatgtctcaaccccagactcccagtatcatcttgtctgcttccagataaccctgtaagacaggcagggtaatcatgcccacttcacagatgagaaaaactgaggctctcagagaccatgtgacttgtttaaggcagaggctcaagtccaggctgtctggcccacctccccagtgtgcttcagaagagagcactagtaacagcacagtggccatgacattcctacatgacagcatctcagcatttccaaagtgttttcactgccaccctagcacccagccacaaacagccctttcctacccacaaccacggcataaccaggaagttgtctatccccattttagagatgagaaaatgggatgagagggttgaagtaacttgcccaaagtcacacagctaagaagtggcagatccaggactcaaacctaagtcctccaggtctccccatactcaacctacccatccacattgctggccagtggacgggatgaagatgtgggcgctggcaatggtgtggccactgcctccccggccaccaccaatgctctgggccctaaggccctgcaccccttttctctgatgaccactcagtctccaaggccatcctgaaagcagcttattgcaagacctgctggaggctgggcagccagagagtggatgagttaatgtaggtgggacaggacacccctggcttctctgccgctcttctattgcctatacacagctgcaccatgcaaacctggtgtgattgggcgaggagggaacagacactgggaagcccaaaggttctggaatgacattgcctgcttttctctccagtgctgtcagggcaagcccatgacagcagttttgggtgcaaagagtggggaagaaggtaaaaactgccatatacagagaggctggctctggggcatgtgtccttcatatttattctacaaacgtttaataaacacccaccactacacaggccctggctaggagctctcacacttcctccttcactcatcctgacaaccaacgtgtggggggaccccactctgtgccccaccaccatggcagacaggcaagcaaaatgggaacaggagcactgcacaaggagtctgcagtcatgggtaccagccctggctctaccattcatccacagatgtgtgacccaagcaaccccctgccctcagtgggcagaagcatggctggggaggacagccaggcctatacgaggcagggaggaacagggacagctggcagggggtgggggctcagtttcctgtgtctggccagaggctggtgcttttctgtcctctcatcagacctacccagagacggtagggcaggaagagaacgatttcctggactcctaccatgtgccagccctggccaaacattttcacatgtggtatcttgtctaatttctgtaacatccaagtgaggcaaaaacaggctcagagaagggaaatgacttgccccagatcacacagctagagcagggaggaactgcaagaggatagaaacacagatctgtttgctttcaaaaaaggaggggaagcttccccttcctttttcttctcccgggtcccctagcacctttgtcttcctcctccgcttagctagaatgtgttagcactggaggagcaatggaaccaagaggcaggtgtggaggaactcatctgcttcccacctttgcattctcctagcagggccggggtcccaagctgtctttccatggtgggagtgggaggtgctctcctgcggagtcctgacccatccccactctcccacccaccctatctcagtgactaatgggccgtgccgctgactaagctgccctcgcagggtgcacagtggaaacaaacccaggttccttcctctctaatcctcacccccatccttggcctggggtctctagccaggccctgtgttacacagagaggtagcccatgatacaggtgagtcacgctgaggctgcagccacctggatctgctgcctaaagaagtgctgccctatccatctgatttcccatggggcgtcgggatgagaaggggctgtggaaacgaacagcctgaattttcatttctggctcaaccactgattgtgtgaccttgtgtctgctgcttcacctattggagcagcctaaacatcccgatttgtcaaacacagggctgttttgaaaactagaagccatcctatctgtaggatgccagaaacatagtaggtactcagcaaatctgagcttttcccttcaactgtctaagatagactgagggctgaaggccaaggcatttgtttacattgattgtccaatgaaatgaaatgttttcctattcctgacttgatttgtggcaagataatgctttttagaattgattctgacttgtagtttagccctgaattctacaccattgtgaattggaccctgaatatatccagcctctacagccagaagttcgaggtggggctggtaccaaatcttatccacccaaccatctgtccatccatccatccacccatccacctgtccatccatacgctcatcttttcttccattctgccatctatctgtccaaccgtctatccatccatctgtccattattccatccacccatcctttcattcatccactcatccactcaatgattgaatccccagcatatgccagccacagcaagggctccaaacaaaaaagagcttcaacagcttccgcatactctgctgctgttgactcagacacacatcacaggcagctaataattacttttccattggtcggatgtggagaggaagagcactgcctccctcccagcatctggcttgctcgacattgcctttctctgttccacatgcaagtctcccagtgactatctttctcgtgaatacttattccttgatgaacagggtattccccataagagcagaggttttcactaaggtacatatccctaatgtgcacatgtatatactgcctgcctcatagttctaatggggatttagggcctgtgtggggcttgcagttgattgtactgtgtctatctgcccactgggtcagcataaggctttacacacaggacacacttcccactttagcttctctccctctgtcgcatcatcttgatccattttcaccatcactcccctcactgtctagaatttgcagtctgtgttggtttgagaatctgtgtaacaggggagtgaggagtgcagtctctaaagctgggcccctaggtttcatatccatcactctaactgtgtggtgtggaacgagttgctaaacatctctgtgtctgtttcacatctgtaaaatggggatcgtaacagaactaatttcatggggctgttgtgaggattaaatgagatcatgttgtttttctaatggtgggcaataccacatcatgagggggcatttttaactgtaagtggatattaggggatgttccaaaggctgcggtggggtatggggtatggggtatggggtatgggtatgccactgacagcatgaggcaggaaccagaggtgctaaatcttgcaacatgccacacagcctgcacaacaaaaaactttcccctcaaaatactaactgcacccctagtgagaactcctgtgaaaagggcctcagcagggcctggtacaaggtagacacccaccaactgtgagcttgccaccacgtaagctttgtaagtaaaggaaagaaccttgtctgtctctttcagtgctaccaaatccccagcacttaggacagagcctgacatctggcagacactaggtgaatgaatgaatgaatgaatgttacatgttcagtcaatgactggtgagtagctgtttggtgaaacatgtcaaatttaatcactactagtgtttgctatgcagctccaaaccacaggataaggagatggtgggggaacagctgcccctttctgaatgtcccgtcctatccttccttcaaggcctgagacccctggagatgacgctcagggactcgtcatttgtccttcactggtgaatactatctgactcataaaagcttctctcttctccatgactagaatgtgggggtaggatctgcctctcttccctctctggtcctgggtataggggacttggtccctagcaggctcagtagacttgtgagtggttgcattgaatgccggccatcaggcacctttgcgtaaatgtgggcaaacctggtcaagcagagtaattgggaaatggaagggaaatgggggagggagggactccctggatattctgagaagaggattcaccagaaatctcgatttctacccgtgtcaaaaattcttccatccttaggcacctcccctccttggtaacacatagaatctttcccttctgacttgagttcagaagccagccagcatttttttgttttttttttgagacggagtctcactctgtcgccgatgctggagtgcagtgatgcgatcttgactcactgcaacctccgcctccaggttcaagcgattctcctgcctcaacctcccaagtagctgggactacaggcgcctgccaccacgcccggctaatttttttgtatttttagtagagatggggtttcaccatgttagccaggatggtctcgatctcctgacctcgtgatccacccacctcagcctcccaaagtgctgggattacaggtgtgagccatcacgcctggcccagccagccttttaaaatttatgtcactgaacttttgctaagtgcctactgcatgcagtggaagagctgaatcaaactagttcctgcatgctggaggtgccagtctttggcgggtgccagtctttggccatgatcagggtgtgctggccagatgggagacttaggagtttatgtcaaatggggttgagttcctgatactcctcagaagctatgttttggtatttaatgtctaacggaagctcatgttcttgctggattttcttgtttgatttgcttttgtttttctgaaaattctactcagtcgatgtattgatcagtgagattgcggctaagcgtggttttatagggtgggctcattcaaggggtgaacaagaagacagttcaccttctcatggaacttacattccaacacatacatatctaacatattacattccaacacatacatatctaacatattacattccaacacatacatatctaacctgccaggtgcttccaagtgctgagaagcaaaccaagccatgtttgaggataacaggagtagaaggcagggggcagggggaagggtgggagaggaaggtctctgattaggtgccatgtgaacagaggctgaggaagtcaagaagccagtggcgtggatctcagaagagcttggatgtcagccagtctcaggattgtggttctggaaggtgtaagctccagccagaacctgggggtcccagcactatcaagggagagagatggttcctttccctcagtttcttctctctggactttgggcccaaatgactcagagatggtgactttctctaaccctctcaaaacccatactcaagacatttcccctttctctaacctaagtctgccgtgtcctttctcaccccactgggcaggtggagcacaggaggtcactgcccccacagatcacatggtgaaaaagcagccctaaggtgggaggatgctgaaagatgtccctcagggaactccagggacatccccaaagcagtccccataagccaaaagggctttagtctcctgtttgatcgttaaaagccatgcatgtataaaattctgctttgcaatctatgcatgtatctacccatgtggtaaaatatacatgtattcaattattcacctgaaagatgggccaggtctacactgaagatccactaggcctccaacactctgctctgaccctggagacaagggcatccacagtcgagagcacagggcagaggagacccctggaattctaatcgtgacttgctatagacataccacgtgtctttcctcgacagagggaggggtccctgtggctcttgggccccctttccaggcagctgatgtctctgaggaccccagtgaagggcaggatgacgtggatgataaaagcctgaattagagcagggttgtgggggtgggaatatgggaggaatgttctggccagaggctctcctctttccaccggagggaatataacacatcccctgagaaagcagatgcggctgtttcacaggcctccttgctgaggcttcagggcctgtcagtgaatcctagcagatctggtccctaccatgatgcctggcatcaagaatcctcaatcagtatctgttaaatgaataaatgaaggaatggtcaacgaatgaatggctaagtcacaaagcaccagcagccagcccctggctgagatgattctggggcacttctggccctaatcatgcattggcagtgcctccaccacccttttgttccactctgaagcaatcatttgatggactgcctgctgcccccatggtttccctctgtggctaatgcagtaaaaagagccatagattataaaccactaattgtatttagagaaaaaaaaatcttgccataataatgggtaccaaatgactgggtctctgctaatcacctcgcatttattatctgtttacttctcacaccaactttccatcaaccccgtttgcttcagattagaaaccaagggcttcaaaaggtgacatgtttgctggggaaatgggactggctgtgaagtcctctctcttctttgcttggcacaggaagaaagagcattggggacttgctcccctccccatttcaacttcccagtcacattccttccaataagaagaatctaaggcacttaaatgctatttatttatgcctatgagcatggggtgcaagagcttctgtccagggaagctatgcatggggatggcaggtcccaattgggcttcggtggctcctgactcaaggcacttgtttctaggctgctgtaacctatgagtggtctggtgtggggagacacatggcatggggcaatggcacttagctaagccaaactgcccaggtctgcagcagacactgttggagcttggccccttcccctgtctcttgtcatttccttgcactccagcctgacctcttggcctcaattttgcatgcacagaggactggaagttcttgggaattaatggctgccactatcactatctcagccgtgggccagccctcaggtaacggctgctgggtgcagggtataaatgccctggttccctcgcaggtgcacagagtagagaatgagcaagtcaggagggccagcatgtgacctggtgtaacagcatcacccccggctcgaggatccatgggtcagggagcatgaaatcaccctggggtcctacaaagtgggcactatgactcccattttgcagatgaggaaactgaggattcccacctgtgagaggcagcagcaggataggaattcaggcctgtcagatttaaaggccaaacacctgctgcaggagagaggcaggggagagggtaagaagctaagtgccaataggcagacctcagggctaggaagaagggcagtgagggtgaggggtggtacgctgggccagcacaggcattttattctgagaacatgttggggctggtcagtacctagagaggagtgctgcaggacacccccagctcccaactgatcctgccagttcttgccatgcacccatggcagtgccagtcacccaggacccaatctggcagctgcctacctccaaagctactggcaactctcacctgcatttctggcagggggatgaggaaagtggaaagaatccattttttcctgattataaaaatagtacatactgtgaaaatttcagaaagtataaaaagaaaataaaaatgacttatgatcccatcctagagatcaccaccattcacatgtgagtgtccttctggtagacctttttctagacacatatgcagtttgattttagtttttacatctatcagctatactacttttttcttttattgatatattatctgtatctttcaagtcattgaatatacacctatgtcaccatctttaatagctgcatagtattgtgttgtgtagatggctcccattttatgtaaatcaaccttactgatagactattgctggttttacagtaaacaatgctgctatgagcatctttaaaatagtgtctttctggggtcaattaagaacatggatcaaaaggcttaaaaggataccattccctttgacccagtgattccactcggaagcacttgatggtcttaaggcagtaatcagatggaagaaggccaccagcacggatgatccagagaatccagagaataggaaccagacagcaatggaaggatcccccattcttgagttaaggccagggcaggcacatggttcatatataaacattatatgtctttcagtcttgagtgcctggtgtggactaagcacctaataaatgaaaggtgagactggtcacaaatgcaaggtgggaagcccgtcagaagtcacggcagggcctttccacaagctggattggtgctacaaccctggaatactggctttaggttcctctgggtgaggaacttgtccctctcttgtccacccttgttactttccctcagcttcagggagagtaaatgaagaagccaggggctaggaaggtgaccagaaaccctagtttcatggaacaatgacataccaaagccacacatatctttgttctgttcatgaccatggagaggtcatttcctcatctctgccccacctccttcaactattgaatgggaaactgtggtccactcacctgcacaaagcaatcagggggcagcgctgtgaacagagactttagagtaacatcatcatgactgtcatcaccatcatggcaacaataagggcggttaacatttactgagcacttgtcacctgccaggtactgttctaagtgcttaggctatgctaatcttcatgctagctctatggcgttgatactatcacagtcaccattgcatgatggaggcaggaggctcagagaggtcacccagctggcttgctgaattgttggggtctgaacttagcagccttcttctaagacacagatattggtcagaatgccacagaccccctgccgcccaccagcggggtccttcaggcttcttatttggcctctttgaggcttgagtttccttgtctgtaaaatggggataccactttccatctcattggctttgaggactctcaggggagcagtgcacacaggaggaccaccactcagctgggctcagagtgtgtgtgccttccgcaagcatctgagacaggtgccacaaatgagggctgcttgctgcccacacaaagatgatctgcccccagtcaatatacacttgtctctctcttgtccaccctgttagagacagaacaaggggtctctattttcagtcatgacagggattccttctaaccctccaataggctgcagacagtgaatgtcacccactagaaggtataaaggcataaaaaggtatgatgggtgtaaaaagaggtttgtttgaaatttgtgacttcacacttggcactcctggtagggatgggtcaccctctggcatccatgaccatttacccatgagcccctctcacttcccctgggtgggtttcagcaaaggcaaaaaatgcatatgattcctgacctgagggtttcttccaggattcaaaggctctctggactctctgaaaccttagaaaaaattgtgtgtgtgtgtgtgtgtgtgtgtgtgatggagagacagagagaaggagacagagagaatgagaataattctagagagagggcctgtagctgtcaagctgtcaacatagtttcactgaggctccttcattcctaagaaaatttagaaatgctatgacaaagggttttccctgtgaaatgtcattacatagatcagccgtgtgctctctggcgcgaaatcctcccatcccctcaccccacggaacagagctcacctggggctcacatagccctaactaatttggtcttcattagctatgtgatcttggataagacatctcgctttctagcccctgttcttcccatctgcaaaacaaataagttggacttgtgagtggcttcagcatgtgctctacggagctccgggggcacaggggagagtggtgtggccttgggggtgaaatgtatgtgggggtcacctctgtccaacaacagcagctctagctctcacagaatctgcatgaaatgttacatgagcaaatggctctgtagcctaaagccaaaattgaaacaaaaccctggcccagttgatcacttggaacctttctggcttgtgaggtctgagccctgagcagcaccaagctgctctggttctgtaatccttagaggcggtggagcctcctggttaagagtcagaacctgggtggaatcttggctctgccactcattaagcgccatgaccttaagcacgttgcctaaaactctctagcctgcttcctcttctacaaactgcacacacctaccccacagggtctctgtaatgattaaacaaattaataaacctacaacacctcgccagatccacagcaagcacttgtaagtgttagcagctatcttctgtcacaacttctaacatgagtccacaaacatggaattcatcaacaaatggcagctgaataaacgagggagtgaaggaatgaatgactggagtccaaaattccattagttgattctctaagtgagcccactcaaagcattaatccaaggcttcctaagctccagtgtgtgcatcatctgggaaccttgttacaaggcagaatcagattctgcaggtctgggctggggctgggccttggcatttccaggttccaaggcgaggccattgctgctggactgagtagccgggccttggttcattgccactcatattcattagcttgtaggcttcccacctgcagttaccaaaccactcaagacccttgaaaatctctgtagattgggcactctttatcacctactgagctaccaagcccagtgcacttttttttttttttgacacgcgtctcgctctgtcgcccaggctggagtgcaatggtgcgatctcagctcactgcaacctctgcctcctggattcaagtgattctcctgcctcagcctcccaagtagctgggattacaggtgtgtaggattacaggtatgcaccaccacgcctggctaattttgtatttttagtagtgatggggtttcaccatgttggtcaggctggtctggaacttctgacttcaagtgatccatccatctcggcctcccaaagtgctgggattacaggtgtgagacaccgcaccgcacccggcccccagtgcacccttggactaggttcgtaagaacggacatgggcatccgtgttaaacccgaagttcatgtctaggctctaccatgcaatgaccggccaagtccctggtttctctggggctcagcatcctcacttgtaaagcaagatcagcaacaccctccctgcccagcccatagaactgctctgaggataaaaagtgacaacagatgggaccatccaggggccagaggtcgtgattaactggcaggctttatttccaacttctcctcttcaccctttgaattcatcccgagggaaactgacacacattttttttttttttttttttgcataatggcatgcaagggaagaggagaggaagtcagcctgctaaatttagcagatgcttacgccccctcacccagggctcagcccacgcatttcaccatgagtaggtgcctttctatatttaacttctgcctgcaccttccccttgagctctgacaccaaaaaccccaggaggatgtggtgaggagggaagggaagttcacgaaatgagcagggttgacatcacatgaggccccacctgcaccttcaggtgtgcgttcttcaacctttcccctgtccttctcttggagcttaagactcacccagccaaagtgtgaccagagatgctactgccctttgggacaacagcactcagtggtgggcaagggaccatgaaaagcccaacagaagtcatggcgaggcaggagagtgtctaatgcttcccataggcacagcactaggcccatctgcacaagtgaccaaagtgaatccacacaaaagcatcacacagatggtatcatactcaggctgccgatgagcaagtgggggccccaagagagggagttgtccaaagcctgtgatgggtggagggtccaaagcctgtggtgggtggaggatccaggcctgttctccaacatgaccctgtccatatcacatttgtcttctcactccaccttctttatagaagactgctggggaggtgatgggttcaagtcttacctatgtcatcactcaggggtgtgactttgagttagtccctctccttctctggttcctcactgcacaacaagtccactggactgcctttctgtttgatttccgaaaatcttcttgatgacatcagaatccaacgatcagaggaagtgagaatgaatccggatgactgactttcaaaaccacagggtgacctctgtgctgcacctccctggtcagcacacatggagtctgtggcagtcacccacggaggctccgcaatagctcctcacccttctggggagccctcactgaatgcctctgtgccaagcagctcagcaggctctgggtggactgagatgaaccaggggcctagaccagggtccacctccaaagaggggaaaaagaccagggaagactgcggctctgactgtgatgtggtcagcacggcgatggagctcccatggggcacaggggctggtgcctaacccagcctagggggctgagggaaagacccagtgggaggcagacaaaatacatccaacactccaggccagcagttctcaaagtatggttcctgaacccggagcatcagcgtcatctgggaacttgttaaaaatgcaaatccctgggcctgtcccagaccgacagaaccagcagtctgtgtttgaacaagcccaggccctccaggtgattctgaggcactctcagtttgagaacccttggcttagggcaggccttagaagacagcaaaaccttgaactctgacctctctgggttctattcaaagcttggctaggaaaagtaacaattcaggaaagtgttctaaataatctggcgtcccttctctccgctggacaatctcagtgctcactttacaaagtgttaggctcagggaaagatccacatctgagtctggctactagcctggctgctgctccactggctacatcgctgggcactgcctttgggttttattgagcgtgtttacaaccacagaaagactgtctctgagttgctgtaaagcggttgtattctatcaagttacacaaaactccttctgtaaaaactcacgtgagaacagtggcaggtaacttggcaaagactttctaaaaatgacaagacccagcattggtgggagtgtagggaaaaagacacagtcacacatttctggtaagtatggaaattgatactgcctttctggagaaatacctgtcaaaagtgtttttttaatgtgcatccccttgacctagcaattcaatcttagaaattaatcctaaggaaataatcatgactgtgtatgagtaattcactccaaggatattcatgttagcattgtttgttttaaaaattggaagcaatgggccgggcacggtggctcacgcctgtaatcccagcactttggactttgggaggccgaggtaggaggatcacttgaggtcaggagttcaagaccagcctggccaacatggtgaaatcccgtctctactaaaaatacaaaaattatccgggtgtggtggcatgtgcctgtaatcccaactacttggaaggctgaggcaggagaatcacttgaactcgggaggcggaggttgcagtgagccgagatcacgtcatcgcactccagcctgggacacaggagagaaacgccgtctcaaaaataaataaataaataaataaataaataaataaataaaaatagaaaacaatggaagcgtttctaatgaggggctgtttactaggtggccgttcattttcattcattcaggtatttattgagcaggcatcatgtgccaggcagtgtattagacattaggcatacagcagccggtgaatgaatgaacaaaatctctgtcctctgggaggggagacaaccagggaaccagtaagcaagtgcaatatccgttgtgggtcagcgggtggtgggggtaagaggagaaggcagcaaaggcaatgctggaggtgagtgccgatggagactagagggaaggtgaggaagtgagtgagctctgtggacagctgaggaagacattctgggcagagagaactgtcttccagacagaaggaaacagcaaaagagcaagagcacgcggcattctgggtgggtctgaggaacagcaaagacaccatagcggctgccgcagggtgacccagcaaggagagtgggacctggccatcagggtcgtgcaggaccttgcaggccacccaggacctttggctttcactctgggtgagaagggaggattttgagcagaggaggacccctgatttgtgttttagaggcaaccctctggcttctgggtggtgaagagactccactgccctttgagacaagagcacaggagacaaggatcagattgcaatgctgttgggaggctatcacaacaatagtctttgcatgctagagatagcagcaagtgagccaaggtaatggcaatggaggtgagaagtggtcaacttttgagtacaatttgaaaatacgtttgggcttttctgcagagcgatgcctgcctgccgtacgtgtggctgcctggacagacgacttagtctccagaagctgagatgagcgacaataagcaaggaagagagggtgcaatataccttcagagggaaaaaggagtcagcaggggtcgccacacaaacctgcctgctcactctgttggacatttctgaaacctcaaatgtgaatcttgatatcaccaaggtaccaaactcttctactcagatctgggggcactggctgcctgcttaggttcaaaggcaaccaaagaaatgcaatttaaaataaggatgtgaataatttttcagttatcagataggcaaagattttttaaaatgataacagccggggttggtgtgggtgtatggaaacaagcgcccctacactgcagcggaagtttaaattagtaccacctttcaggagcagtttggtaatacgttatcacaagccttgaaaaagtacatgccaaaggaaccagaacactgaaacaattttgaaaaaagaaaaataaggtgagaagcatcactttacctgatgttaagacatgatatagctacagtaatcaagaatgtgtggtattggcaggacagatacataggtcactggaaacaaatagcgaacccagaaatagttccacatggctacagccaaccgagtttggacaaaggcaaaaaagcaattcaatgaaggaagcatagtttttttttaacaagcggtgctagaaatattagctatccataaggaaaacatggacctcaatgcaaaccttccactttatacaaaatttcatccaaaagaggtaatagatttaaacataaaatgcaaaaccataaaacattcagagataacacaggagaagattttcaggacctagagcccagtgaagagtctttaggtgtgatatcaaaagcacaatccataaaagaaaaaaaatccacaaaattgaatttcatcaaaattaaaaactgcttcgcataagaccctgttaagagaatgaaaaggcaagctatggactaggagaagatatctgcaaacaacaaatctgacaaaggactcatatctagaacatacaaagaactctcaaaacacagcagtcaaaaaaaaaaaaacacccaaaacaataaacaatctaattagaaaatgggctaaagacatgaatgaacacttcaccgaagaggatatacagatggcaaataagcacgtaaaaagatgttcaatgtcattagccattagggaaatacaaattaaaactacaataaaatacccctacatggctattaaaacagctaaaattaaaaatactgacaataccaaatgctggaaagaatgcggagaaattgcatcccttgtccattgccggtgggaatataaaatgatatagctacactgaaaaatattaatagtttctcagtttctttaaaaaaactaaacatacagttagcataagacctgacagtaatactcctgggcatttatctcaaacaaatacaaattgtgtgcacgtaatctgtacttgaatgctcacagcagccttgtttgtaaaagccaacaactggcctacaataggtgattagttaaacaaattgtacacccataccagggaatactactcagtgattaaaaggaacagactgttgttatacagatctcggataaatattaagggcaatatgctgagttttaaaagccgatctcaaaaggtcatctaatgtatgattatagagatagaggacaaaccagtggttgccaacagtcagggatgactgggggatgggaaaagtatgactataaagaggagcagtaagaagatctttcaggtgatggaatagttctgtatcttgattttggtgaatctacacatgtgatgaagtaacgtgataaaatgacatagacctgtatgcctactacaatacagtatcaaaaccacggattgattcctggttctttttccaaattccacttttacaaacttatcctaaggtaatattaaaaaggcaccaaagagccctagatccctggataaacaggatcatttcaaagttgtttataacagtgggaacttagaacaaacctcttcatgccaataattggttaaatagactaggataaatatatccaatggaatattatacaatcattgaaatgatgatgtagttctacattcgttgatatggaaagactttctcaatatactcttaaagggaaaagattacttaaaagcaccatatggttctttaaaaaataaaaagttatatgaatatatagactgcaagctccctgagggcaaggatttttgtccgtatcatttactccagaatccctggatctcagtatagtgcctgacagaaagtaggcactcaataaatatttgttgaataaacaaataatatacacacacatttgcaaagtctagaaagttattctgcaataaaatattagcaatggttggctggggtcagtggctcatgcctgtaatcccagcactatagagggcaggatctcaaagaggagggcggatcacttgaggccaggagtatgaggccagcctgggcaacatagcaagaccttgtctctaaaaaattattattattattattattattattattattattattttggagatggaatctcgctctgtggcccaggctggagcgcagtggcgtgatctcggctcactgcaagctctgcctcccaggttcacgccattctcctgcctcagcctcccgagtagctgggactacaggcgcctgccaccatgcccggctaattttttttgtatttttagtagagacggagtttcaccatgttagccaggatggtctcgatctcctgacgtcgtgatccacccgtctcggcctcccaaagtgctgggattacaggcgtgagccaccgtgcccggcccaaaaaaatatttttttaattagctgagagtggtggtttcacctgtagtaccaaggaggatcacttgagccaaggagtttgaggctgtagtgagctatgctcatgccactgcgctccagcctgggcaacagattgagactgtgtctcaaaaaacaaataaacaaaaaacaacaacaaaacccaaaacaatggttatctcagaataggggaatggaggaattttggttgatttggttgattaattacagccccttcagtctgtttatattttctactttgtatttatttatttatttatttatttatttatttttgagacggagtttcactcctgttgccctggctggagtgcaatggtgcgatctcagctcactgcaacctttgcctcctgggttcaaactaacctcctgcctcagcttccagagtagttgggattacagggatgcgccaccacacccactaattttgtattttcagtagagacagggtttctccacatttgtcaggctggtcttgaactcccgacctcaggtcatccacctgcctcggcctcccaaagtgctgagattacaggtgtgagccaccgctcccagcctactttctactttttaataacaattatatattctttatggaatatatatttttgaagtacacaatcacaaacaaagtggagaatgtgctgtggagatctctggcctgattgggcaaaggtgggggtggtgcagttggatgacatccaaccaaggctgccttccccggacaggttttggtggggtctgaagaccattcccagggctctggtgtgagggacactatgtctggagtgagaaccctcataagagatcttcacaatagtgaggccccctataagccagagagatgatagaatgatgagccaggtacacagggaatggggagagaaggcatcagtcctggtccaaatctcctctggagaggggctgggggaggacacaggacagaaacctgcagacacatctatccaccagggcctatcttatgcacagccttccacgcttcaatggaccaaggtagtggttcccaaaagacctgtctgaagacaggctgcatcacaattcctaggaagctttataaaatatagatttccgaccttggaacccaagtctctggggaccagaacccaagttctagagaccattgaacccaagtctctgggccgaggcccaggaatgtcattttacaaattccttgggtgattgtgatacattgtggggtttgggaacctccaggcagtgggcataaagccaaaacagcatcatgttggacaaactggtagtagttatgccatttgtgatgaaaggatatgggaactagcagtgattgatttgtaagattttctctgaagcactcagaaaaatttaaagacattgctagaatcttagacacctcccttttaggagaatggggggtactggccccactgctcccccatagtgtactgtgaccaatgactccctcactcccatcttttttaaattgtcgtaaaagatacataacatttgccattttaaccattttaaagtataaaattcagtggcattaagtgctttcgcagtgttgtgcaaccatcaccactatcaaggtccagaactttttgatgactcaaatggaaattccataatcattagcagtaactccccatttccccctttccagctcctggcaaccaccagtctgctttctattaggttggtgcaaaagtaattgcggtttttgccattacttttaaggtcaaaaactgcaattacttttgcaccaacctaatatctctgtagatttgctcattttgggtatttcatataagtggaatcacacaatatatggccttttgtatccagcttctttcacttagcatgttttcaaggttcatccatgttgtagcaggtatcagaatttcatccatttttatggctgaataatattccattgcatggatatattctattttgtttatccactcatctgttgatggagatttgggttatttccaccttttggctattgtgaatagtgctgatattgtgaatagtgcagatatgagcattcatgtacaagtttttctttgaatatctattttcaaatctttggggtatagacctaggagtggaattgctgggtcatatggtaactctatgtttaacttattcaggaacctccaaaaggttttccacccacactcactcttataaggcatctgatacctcagtctgtgctctggcacaggcacccaaggcatcccagtctgtgccttggaagcctgtagcagagtcttagggtttaaaagatctgggtgtaggtcagactgtgattctacaagctgtgacaccatgggttggtcatttctttgtactttggtcatctttgtgctttggtttccacataggacctcacagggtggtctaaatattgaatcagataataagtgagactatggataaaacgagaggtgccatattagagtagtagggggtaagggctctacctggccctattgttcagtgatggtaaaaccttggtcaatttcttatagcctatgcttcagtctcatctataaaatggggtgaataagctgggcatagtggtgcaagcctgtggttctagctactggggaggctgaggcagtaggattgcttgagcccaagagctggaggctgcagtaccccatgatcacacctgtgaatagccactccatagctctagcctgggcaacatagtgaggccctgtatttttaaaaatgggatgaataagagtacctgcctcataggactctagtgttaaaacagtcaattcatggaaagcattcactggaaagtggtaccaacttagctactgctagaaaatgcttagcaatactggtgggggccgggggactggtgctcacattttcagcttgcacctgggttcctgccctccctttctcaacttctctacttctgtctctgggcttctctgctgggacccttctctctcacgtccacaggtcaatgcccagcctgaccccttggttaatccctcttctgtgctccatgccctgcagagcttactttgctgagtttgacttgagtgtagactctggcttgttcattttatggatcttctctagggcctattatacagtagatactcaatagatacttgctgattgaataaatgaaagaaaacatttctcttcaactggggaattggctcatggggctgatcacagtacagggccctggggcttgggggccctctccacaactaagccaggagcatgcccaaatgctccacaatgcctctccccagtttcacagtctgccaaacagcacagtgagaggtcacttcaggatctaggagtgagtggggcagagcagtgacaaggcccagccacctggtctccccagccttcctcagctatcttgggctcagaaagtggtgatgggtaggcatggactctcctcccatgaccctcaaacatgtcccgtctgtctccccactttacctgtcctctcaaatgtaggccatttgagcctacactcagctcccttctcttttttggaaataaaagatgctctgagaagaagtgtacattgccagacatggaggcactgaggcctgccagtctggtgagagagactacagggcagagagattacagggacatttggaaggaacattgctggtgaaggggttctaaccaagagcagtccttgagctaggtgtatgcgcatgcatgtgcatatgtgtatgcacctatgtgagtgcccaggtgtgtatgcatatgtgtgtgtgcacatgtgagtacatgtgtatgtatgcatgtgcatgtgtatgcctgtgtgtgtatacacctacgtgagtgtgtgagtgtatggttgtgtatgtgtatgcatgtatgtacctgtgtgagtgtatgagtgtgtatgcatgtgtgtgtgcatgtgtgagtgcataggtatgtgtgcacatgcatgtgcatgtataagcatgtgtctctgtgtgtatacacctgagtgtgagtgcatgggtgtgaatgtgtatgcatgtgtatgtgcatgtatgcttgtatatgcatgcacctgtgtgagtgtatgagttcacaggtgtgtatgcataagtatgtgtgcctgtatatacatgtgtgcatgtatgtgtgcatgtgtgtgttatgcttatgtaagtgcatggatgtggctgtgtatgcacatgaatgtgcatgtacacatgtgtatacataagtgtatgagtaaataagtgtgtgtgtgcatgtatatgcatgtgttcatgtgtgtgttatgcctatgtgagtgcatgggtgtatatgtgtaggcacatgtatgtgcatttgtgcatgtgcacttatgcacccatgtgagtgtatgagtggatatgataatggcaggaggcagacaaatcccaaggcagacaggggcagatccctagtgaaaaactgactttcaaaccaaagacagtttaaagcctgaaagccgagttacaagtcccaggtaaatccatggactggattgagaacctctctttccatttggcgtgctttcctctgattgatccccactcctcacctattttacacatacctacccttccctaattggttttttacactgtcatgctcacctttgagtggtgcctttgttttagccttttttgcatacccacaaaccaatcagcatgcactgctccattctgagcccataaaagccccggacccagccacattgagggagagagaccacccaacttcagatgggggaccaacctcacatcccctctctgctgagagctattttgtagcttaataaaactcttatatgcccttctcacccttcaactgtcagtgtaatctcattcttcttggatgtgggacaagaacttgggacccactgaaggtaagtatgaagaaagctgtaacactgtaaccctcccattctccatcagcagagggcagccaccccatgcagcaggaagcagtgtcagggtcaggccagccctggatccgcaggctggagcagggcagtggactaaaggagctgttagcatgctctaacacctgctctggggcttcagggttgtgggcatccccgtttgggtgccaccgcattcccctcatctggaggccagagtccaccacagcagtcggtcatgacatgcctggtccaaatgcaagccccacacaaagcctgctcctgtgctggcacttggagcagctagccggaccccacacttgcttgctcacacacccacttctgccatgggctgagtgcgctgtccttgtggccatgggatctgcgctggagtgcaagccaggcacagcctggtggtttgagtgagcaggggcatcaccagccatgaaggtctctggctggcaaagcggcactgaaaatatcctgcattagataggcatgtatgtgtatgcatgtgcttgcatgttagggggctgagctaggggaataggtggaattggccactccttcctggatgcccaccagcttaatttcacatgtgcagccaggtctgggcagctgagcctgcaggcctgccaaggtgactggggaatgcctgagagtgtgaacactaatacaaaagccagatgccaagtgagaggagagttcacacatcagagtgtcatggtcaccttgggcaagtctcttctctggggctttaatttcctgcccatcaaataacaaaggggtcagagaccctctttttcacattgcattaacatctctgctaagagctgctccagcatgctcaaggagacatgctgctgacagtccacccctctctcccgaggctctgtttgctgaggacatgggctggcaactgaagagagcctggaatcctggggcaagcactatgcccagctgccgtccccctcctgccctcctgcacaggggtccccaaacctttccccaactgccacactccatctggctgcagcagcagccatccagggagtgctcgtcctctctgagacctgcctggctctcatgcttgcttccattcaagttggatgccccacccctgggaacagccctgacttcatgtcccctacagcctaagcaccgttcattcactagactggtagtctccaaagtatagtatacaccattattgagcataggaggaaaataccagggctactatttctacttatcacatccttctgcaaattcctaatttatatgtgtatgtgttagtatgtacaaaatatatcatatagtaatgctggagtacgttctcaaaaatacttttactggaagagtatgcaattaataaagtttggagattgtgttagtggaggtaaaatacacagaatgacgataactacaatttggtgtttggtgacaaatgtcacaatagaggtgaaggttaaatgctgtgaaagttcaagaaaggatgtaattgctactaactaaagtgcaggagaagaatcagtgaagacttcatcagaggattgagtttggggctgaatcttaaaagataggatgtggccatgtggccatgggaaggaagggctctcccagcagaggtcatcacataagcaaaagcacagggctggagagcagacaagcacaggacagatgcggggcccagagccctggtgtcccagctatagatgggaaaagcagtcggatatgagatgggaagggtgggttggggacaaatgatagagaagggactctgaataccccagggatgtgtggggaatgtgcacaaaactgaaaaaaaatgaggggagccaatgaggattgcttaggagggaagagacatggcccaactgtgtttggagacttttaatctaggaggggagtgtaagattggaaaatggaaggtgaccatcatagcccaggcaggagggcctgaaatcaatcagaaaagaaagggaaagaaggaggcaggtgtaagaaacatcgtaggagcggatttaactgagtgccttcactgatgggacaaggtgcgggtggggggcatgaggacaggagaagcgaaagataagtcaaccttcaatgctcagtgaccagagggacagctgcagagggaaacctgcaaggaaagttcaggttgtgaggtctgtctccattgtctagaagtgacaattaaaggataagagtctgggtggttggttgattttacaaaaaagatgaattcgccaagggctaaacctgtctgcacttttgatggaaacaggtctttatcttcatttgacaaacatttttgcatccctcctacggggaaggcatcatgccaggcactgggaatgtagagaggaaccagaaatactgcccctgtcctcaggggccctcagtagagaagggaaactaccacacaaagaagtttttgacaatccgtcagctgagtgctccaacaagaggccagaggagggttcatggcagtgacgctctccctggctcggcagccagagccatctcctgagaggaattccaacctttcttcacaactcagggccatcatcacaggtgggggtggcatgggatagatgctaggtgcccatcaccttgcatttttagagaaaactgtcatgtcaactgtgtcaccctttaccaagcaagccaacctcagagtgcacagcaccatgaatttggatcttgcaatctcttttattcttgcctcttgagcttctttgacctccctttatttttggatttagggggctcccagaaatttggtggagaggagagctctagatttctgagtgtactttggcttattttaattaattaacgttttccctcctggccccatcagccttgttcctttttcagacttcctcatctccccagctatttataaacccctgttcccttggcctatgactttgttcctttctcactgttgaatattcatgctgtaaggtctccccagagagggaggtccccattatctacccaggctcgtctgatgttgtttaaccccgatgtgtcctgaaacttggcagagtagaaacagcacaagctctcaagtcagccagatgtcaacatctggctcctcccctgttgtttgagtgtctttgggcaggtctccaaggatcagcatccttaagaataggatggttcaccatactgttccctctttgtttggaagttaacctttagtgttgatttattttgtatttgagtctcaaatactgtattggtaaatttaaggaaagaagaaaacagaaattagcctgtaagctgtaagccttagaccttctaagcaaggtctaccctatatattatcacaccaccttcccaatcccctggtacaacacttggcatacagtaggtgctcaataatgtcaccccctccatctttcctatcccattgactttccccccacctgtttgatggttttcatggggtccatatgtcacagaatgtccctgccctcaggcagtagggacttcatgttgtggcctctctttgcggggagcacccctgtctggggtgtgcctgctccttctttctctccagctgtctctctgagcctgccctggcccacgctggctgacatacacctcctgcactgataactatttgctgctgcacttgcccctagctgggcttggccgctgctgcagagggccatcctctgcctcacatcctctgatgagtcctgggcaggttcaggtgggccctgggcctgagccatggtatgtactctctggctgcagccccaccagaaaaatactcactgtctgaagaccagcacctggaggctctggagttagtgcagtgctttcaactgggggtgtcttgcttcctctgattcccaggggatatctggcaatgtctggaaacatttttggttttcacaactagaggttactactggcatctagtgggtaaaggccagggatgttgttaactatcatacaaggcacaggacagccaccccacatcaaagaattattcagccaaaaatgtcaatagtgctgagatttaaaagctttgggcagtgtcattaaacataacaatacctgccattaattgagcacttgctgtgtgtcagaggctgtgctaagtactttacatgcactttctcatttaatcctcaccaccacggtatgagacaggcagtgccattttcccattgtacaaatgaggaaatagagagactgaaggtgaactcacttgcacaatgatgcacagctaatcaatggtgtaggcagggtttgctcttgtgtgccgctgggcacatctggacagcacctgcatcaccaactccctctctgctgtgttggctcagtccagtgggcagtgcatctactttggttttcctgatgagcactccattctccactaggcttggagtctggccagatccacttaatggactccaacatacctccaaacactctcagccttgtggaagccatgtcaagaatgaacagtctcttggaagtgtcacagagctccccatctgtctggcctccttcctgctgctaagcagtgccccaaccaaccccgcaggaggaaagactccccaaaattgtcctacccaatggatactctacaccaacccgcactagactacagctttggcagctggctgagatcccagccacagttccactcagccccagatcccacttcctctgccccatctgggtcctgtgtggtccacaatggttcttactcaggtcctgaacctctcatcttctgtctgacacccacatctcatcaaatgcatcatctgggcatccttatgcaccctgattccatctcctatttggactcctccctctgggccccaagattccttccacattttatactcagttccactcaaattctgccaagctttcactaggaaggaagcactgtgctggggattaaagaggacacagaatcaaagcagatacagctcccccaaccgctagagctctggtttcatggcgggagtgaattttccacaatgggatcacagtaaggtaggctcccctcctttagggacatgcacagaggcagaggtgtggttgacctgtgagcagctgaggcttcccagaggaggcaacactgggaagaatgagggtgtgggccccaccagttctgatactggagagttccagggtccttctgcagccctgcctttgtcctgagggcctggctgtcacctggctctgtatcaggactcatggaatcttagcctgcatttttgctgtgcttcccagagctgaaggactctcccttccaaatacccgcgaacaagcacactgcttgacctgcttctccctcactcagttcatgcagttgacttatctgcatatagtgcctgttttatgtcaggaacccagcagcagctggagtcacagattctctgagctggcagggcttttgttcatctggcccaaacttgtccatccttagtacagtttctttccactggatcgtgtttgtcaggaaatgaacaagaagcctcaggctgagtttgctcaggattcatttttacctcgttcttcctagttctgcatttgttccttataacaatccttcatgctcatgaagccatgatggattgtagatgtagatggcagacatcattcattgtcatttacagatgaagaaacggaggccaaaacactaaaagcactgcattccaggcctagctctgtggctggctgctctttcccctcaagctgacaccatctgtattagttcattttcacgctgctgatagacataactgagactcggaagaaaaagaggtttaatggacttacagttccacatgactagggaggcctcacaatcatggcagaaggcaaggaggtgcaaatcacatcttacatggatgacagcggacaaggagagaaagcttgtatggggaactcctctttttaaaaccatcagatctcatgagacttattcactatcgcaagaagagcaggagaaagacctgaccccgtgattcaattacctcccaccaggttcctcccatgacacatgggaattgtgggaattataattcaagatgatatttgggtggggacacagccgaaccatatctccatctaaggtaagcttcttttggagacccagttagatagttctaccaatctgtaaatttgtggaattataaaaaggtgctggaattgatcttagcagtacagcagctagctcctttgacgtatatagacccttgttaaccagcttcccttgttggggtgtgaaacccccttcgtggggataagaggaactcttctcgcaggctgggaggaaatctaccagtccagaagaggaactgccttcacctcctctacactgaggagttgctgcttctggtcattcacagagaggaagctgagggttttttgcctatgctattccaaatttaatgtaaatatttcactgcaagtctaaaacccgccctgttggctttgcttggcctaaccagaagtatttcagtgcaatctgatctctgagctcagggctgttcctcaggacctcaggccgcatccggcaggtctccccacaaggcttccattccaacccttacagaaaagagtggccttgtgatattatgaagcctgccaatctcatgtcccttgtgctgcagaagcacttggccagcgtgttgcaatgcaagcgctttctgatcaatatctgttagcatcatggccctaagcagctaaaaatcacacaccaaatggttcccttttgtagcaagaatcatttcatttgctccttgactttcaggtaccttggacactaaaacaacagtgtatcaaaagccagccacagaaatcagcctttacacttgcaaagcattgtccactttccaaagcacgtgcacctccctcagcccatctggccaaccctacggggggttagtgactcagggttactgctacattaagcaaagggtcatgtagtatacaatcaaaaagtaacttcacttttatctccccctgtcccactaaatgtgtccagaagagctggctgttctctgccctttggaagaaatctagggcacatcccatgatgttttccatccctctttaggtaattaaaagtcttctaggaaccaagattccttagagaaagcactgattctaaggctagggctcagaaaatacaagaccagcctggagaaacttgtagtgccagaaaataagaaagaagtaaaaaaagaagttaagaaggaagaaaggaacaaaggaaggaagtaaaaaggataaaacctctaacctgaaaaagcttccaatgatcaaaacatccaatgactgatattccaaaggtagaacaatttgagtaacaaaataaacaacaatagcattgtattatgactcaaagaataaaaatctttgggtcaatactaatgtaaataatgtattgaataaataaataaatggataaatggggagaagggacaactctttcttacaaaagaattctaagtaataaatgaaaaattgaggaaagtagaaaaatcactcttagaataccacagtaaaaatggcagcaggcaagattcactgataaatgctaaaattgttttttgtttgtttgtttgtttgttttttgagacagagtctccctctgttgcccaggctggagtgcagtggcacgatcttggctcactgcaagctctgcctcccgggttcacaccattctcctgcctcagcctcctgagtagctgggactacaggcgcccaccaccacgcccggctaatttttttttttgtatttttagtagagatggggtttcaccatgttagccaggatggtctcgatctcctgaccttgtgatctgcccacctcggcctcccaaagtgctgggattacagatgaatgctaaaattaaaaggtaaagctttaaggagaaacaggatatctgcatagcctcaacgtatctcccccagaatattttctaatgactgtggtagttttaacacgtgtccgaaaatgatttgatattcctccctgcagcaggtggagcttcgttcccctgcttgagcatgggccggatgtattgactggcttctaatgacagattatggagaggggacaatagtgacttcgcaatgaacccggcagataccaccttagccaagtgattaacataatgagcaataaatattattgttgtcatgcgccccccaatataatgcaatgagaaggggacagcacttctaccatattttccctcaaagtccataacctcagtctgctcataagaaaacattacgcaaacccaaggtgaggaatgaacattctatagtatgcccgatcagtatgttccaaaagtgtcaaggtcatgaaaagacaagaaaagactaactgtcacagaatgcaggacactaaggaggtatgacccccacccccaaatgcaatgtgcaatcctggattggatcctgttccgggatgctgttgtgctaatgttaatttcttagttctgacacacctaccacagtagctttgtaagatggctacattaggggagacagggtgaaaggtacaccagaactctctagagcatgcattgtcaacggggcatttctcccccaaggggagaaaattgtctgttgggtagaaaaaaaaaatcacaatggtttgtggccctctaaagggccacagtacataaatagatatccagcatatctgtgggactaaaattttatgggagaaaaatcatagaaataaacacctaaacagactcctggggtgggagtggagcaatgatgaaaataaaattggttgagaaatcctgctctagaggtaccatctttgcacctcccttataaatagaagattatttcaaaaaataatttcaattgctgtttctaaaagttggtctgtgaagaccttacctccccacctccccccacccccaaaaaattaatttactaaaaaataatcctctggtcacttgtacctgtaaaacagtttcaatttagtaattaataaggctgacctggagtaataataataggagaaaagaagttaaactttagccaaattaaagcttctctcctccggagctcaggcctgcctcaagctggcccctgcaatgggaaagcagtttaggttgacctcttctctcctctcctccctgccccgcgtgtctacccctccttgctgggctgccgctggctgctttgtggttttggcaggaggggctggaaggggtaaggaagcaggaggagttggatttgactgttgctctcaggaactgacagtactctcggggcttggcaggtttttttgttttgttttgttttttgagatggagtctcactctgtcgcccaggctggagtgcagtggtgtaatcttggctcactgcaacctctgcctcccaggttcaagcgattctcctcagtctcccaagtagctggaactacaagcacatgccaccatgcccggctaatttttttgtatttttagtagagatggggtttcaccgtgttagccaggctggtctcaaattcctgatctcgtgatccgcccgccttggcctccaaaagtgctgggattacaggcgtgagccaccgcacccagtccctggcaggttcttaagctgactctccctctcttgggtccagtttgggtttttcagagactcccacttgccacgagcggcctctacctgcagctgctgccgcgagtgatgccacctcaagtaggccatgcttgacctcctggttctagtggtcactcttaccagaagccactaaaaaggcacccagggttgtgcattcactctttgcaccaggattcctctatacaccaggaaatctacacttgggcatgaacagggccacattcagtcccatttgccgtcaacaccttccatcttctaatcatgtggaatcctgctgagaggagaacgagagctgggatgaactaatctcttcatggctttttggggacatgagatgtgccctccttcctggtgcatgacaggcacatttccacacaggttaagccagctgcaggtgggttttctggcacttgcagccaaatgcatcagagctctcaaagctaatactatgatgcacgggagaggtggcagggaaaggaacaaagaacaacagaagagggaaggaggtggcagccatcagaagctaacagtgaagaaaaaggtggaagaagccatcggcatggtttcagcagacccgatgtggagatcagtgacaacagagaacaaacaaagaataaaatagggccaggcacggtggctcatgcctgtaatcccagcactttgggaggccgaggtaggtggatcacttgaggtcaggcgttcaagaccagcctggccaacatggcaaaaccccatctctactaaaaatacaaaaattacccgggtgtggtggcaggtgcctataatcccagctactcaggaggctgaggtaggagaatcgcttgaacctgggacaggttgcagtgagccgagatagtgccactgcactccaaccggggtgacagagtgagactctgtatcaaaaaaataaataaataaataaaataggacccatttgtgtacttactgtctaccaggcactgttctgaacactgtatgtgcactgcatatgccccacagattgacccattttatggagtttacaggaaacaggttcatggaatcagtaagtggcagggctaggacccaaacaatatgatcaagttcagatgtagattcaggaaacacctactggtcagccagatgctgtgctgggtgcttccctcacaaggccccatttcatctaaatgccagctttggaaggtgtggactatttactgcattccacaggtagagaaactggagcacacaagagtgaagtcacttgccaagtgactggtggaactaagcccagaactcaggtcttgtgattcgcagttcaatattctctctgctgggcaaggctgcctttcctcatctgcaggaatgtgaataaaaacatcacacagggatggcgttcagtagggatgtgctgaaatgactgtactggttgtgaaagtgctgaaatgcctctgtaccacttggtaatcagccaccgctctgagcatcctcaaacgctgccctggctccttcttcccagacaccctcccggaatccagtatctaaagaattttaactgaggcctccaagatgctgttttggtgctctggcacacatccacttcagccaattggtaaatgcttggaatgtcatctctaacaaccatctattcctctggtgcttcattccttcctaagcactcttgtactgttacctcctctgatgtgcacagatgagaaagctgaggcccagagaaagtaaaaactgcccgaggttgcctggtgatgctgagttgagctaggcttaagccaaagtcatctgacttctggttaagggctgtctccattctccagcttttagtcagttaaatagaaaattttatactaggtagagttaagaattctaaaatagataaaattagaacatgtcacagatgaaggacaagtctttgtgaatgagatttgtcaattaaagacaaaatcaatgctactggcaaagattcagtaggcctgagttaaatgtaacactcttgcccattgtcatgtgacctgcctgagcatcctaggagcagatgcttctggctttggacttgaccatatgacactttccaatgagatgagaggggatgtgctgtgtgctgggtctgaggcaaagctgtttctagtgattgtgaggttcaggacagtcactcctgcacctgcctctgcaacaagagaacagcgtgtctcgggtttggctgcaccttctgccaaggtccctgaataggaaggcatacggggccttcagagcccagagatgccaccatcctcacatcatgtgagtaagaaaatacatgtttattttcataagttattaacatagtgggttgttttttctatagcacaagctgactgatgcactgggaagaaagaatgctttgaaaatttgaagaataaaaatgatttgagtttaaagtgttaaaggactctagcttctaattaaacatcattttgtgagaaagaattcaggcacataatgggcaagtacttagaagatatttcgattttccagaaatacttttacatacacatatttcagaaaggcttgtaatcaataaatcctgggccatacatattatggaactcctagggctatctgtgcagattactcagaaatagaaaataaatcacatctttcccaataaaaggagttgctcaattcacaggatgattaaataatacattttagagtaagatgagatcttaggatcactgcttctaattaaagtcatgtgtgaattttcacttaagttttcacaagcatcttttattttatttatttatttatttatttatttatttatttattttttgagactgggcctcactctgtcactaggctggagtgcagtggcatgaccttggctcactgcagcctcgatctcctggactcaagtgatcctcccacctcagcttcctaagtagctgggactacaggcatgtgccaccacaactggctaattttttctttttgtattttttgttgagatggggtttcacgatgttgcccaggctggtcttgaaatcctgggctcaagcaatcctccctcctcggtctcccaaagtgctggaattacaggcgtgacccaccgcacccagccacaagtatccttatttactatttttggtaaactgaatagccacatcacattctgttttctggtgttgaaacatgaatattttgaaacaaactccctccctccctccatccattcgtccatcatattctggatacaagacaaacatcaaaagtctctcctcttagtctttgtggaagaagacatttctgcggagcatataaatttgaatggcaatatactcccttaagagggacttcagacactatgctgttctttctagcagagctgttggcttcagaatctaaacaaaactcctgagttgccaaaaacagccttgcattcttctttcagatcacctcaaggctctaagaggatggaaggagtgttttttgtttgtttgtttgtgtttttgtttttttgtttttttgagatggagtcttactctgtcgcccaggctggagtgcagtggcgcgatctcggctcactgcaacctccacctcctgggttcaaacgattctcctgcctcagcctcccaagtagctgggactacaggtgctcaccaccatgcctggctaattttttatttttagtagagatggggtttcaccatgttggccaggctggtcttaaactcctgatcctcatgtggtccacctcccaaagtgcagggattacaggcatgagccaccgcacccagccagaaggagtggttttgatacctgagcttccaacatggagagtccatgatttcatggattcactgtatggcaaaataagctcctgacatcacacccacaaaaaggccagcatcctactctgcagacaacccaacagcccagcattctgcctagtcagttatgtgcagttacatgtggacacagttatgtgcctccacatccatttttatgtgtccactgtcagtgaagaatagatcacagaagatccactgcaaggggaaatctataaagatttgggtttcctgcagctgaaataacaataataaaagggatgagctccttggcatttaaacaaagccctcagtcagaacgtgaacaaaaggaaagaggctgccaagcaggccctgcccgtgcagtccataaaagaaaatcttgtggaccctagagtttacaaaggcaagaaacctgttcttctcattgatgactgggcccagaacttaaacactggccacatgtccatgaagaaaaaagaaagagccttctcttgagacaggtttgaattcagaggcagagacgttccctgagcatgccctctgtgccaggcaccactggccttgtccacgcttgagccagtgttttgggcagtggggtgtgtgcatatgctctgggggcagggtcaggctgactgggtccttgagataatctctttccaccagtggccgtgggacatctcggtctgtctttgggtctgtctgcttatgaaaggtggccctttgtccttatgcaggtgaagatgaggctgcagaccagcctgtgacacccattcaggtgggtgttggcttttagccccccacttcactttacctggatttcttggttttacgatatagtcttcaggggtgggggtatgaggtcatagctgttgtctgctttcagcaaagaaggtgtttccctctccatttctgactcttgttcattctggaggcttcagagaaggaagttctgaaaacaggcactctctctgccatctttctggaaaccccttcagctgcttcaaaatatttagggaacacctgctattcctccctcccttcactcttacagcagatcttcactgtgagtgtagtgggtgacaggcagggaactaagctctttctctgagctcccatgacagctctgggagggaccagggaggagaggttaagcaacctgcccagagccacagacatgagcagttacactggacttcagcccaggacttggactcctggttcaggttctcttcccctgggttactccccgagtcaacaggagggccgtgggagaaaagaggtcctggcttcagctgggcagcctagggtgctggtcgcctgccaacctgggtgcagagcctgatctggggctctcccagaggctctccttggctggcaagcaggaagctccaaatgctgggctgcagcccagagggaaaggaaaggggcttctctatgcttctgattgtccccgtgactacccaggaacaaagcggggactcacactgcctcctgccaccagcctccacccagctgttccggccacgcagccccatctcttcagcctgtctgcaggaacactgggcatttgtcagctttcagaatcacggctgtgtgcccagggctctcttgaccctccagctccaggcctcatggggcagaccaacagaggcacaggccctctttcaaacccccaaacccaccacccagtgaagccaagtccctggtccacggtatttaactattatatagcctaacaccccactggggaggttcacaccctgatctgattaagctaaaactgcatataacagttcacatgcattcgctttccgtgtgtgcagaggaaagagctttgggttaaaagtcaaggcagttcatcggttagacctcaccaagcctgtcatcatctctcaaatgggaacagtagctgccaattctaaaagcaaacatctgctgggggcttcttagtatcaggcgctttcctacatcccacgtgtgtcatgcatttaatccgcacagtagtccacccagctccttgccctctgggaagagcgcagatgttgctaatggaatcttggtaaaaggtatcatgtggccccagaatagtggtatgcatcagattaccgcgtgcttcacgcatggtgtggtggagcttgcaacgtcacactttcaacaaatctattcaatcggcgggggttcttggcagcaactatgtgccagtcactgtgcacaaccaaccaaatccctgtcctcctgggggtgttgttctggtaaacacagcaaaggctcaaagacagcagatgatgccattagttgcacgcacttcattgaccgaaaagttgattttctccttatcttcggtaatgaacgaaggaagaggggacaagcagagggggtgcttgtcatttcctggcgtttgagtggatggcatctgctctgccccagcagtacaaggtacctcctgagtggccccatttgacaaggcaagagagtagaacttgcttttctcttgtagtagtgcagaaactcagtgtcccagtgtagttcaggtggctctccaggccctggtggtagggttcctgacactcaccatgagcctgcccggcttggcatatcacagtcctctggctaccacgggtccctgataagagcacctgaaatgacattgaatacctgggagtgcagctgggactcactggtccccaggtacaggctcagccttgccccaggctcagggatccaatcttgttgctggagggcggggcaggtcagcctgacagttgatcccgttctgacatagttttaggggctgagctctcgcttcattcatttattccctctgtaaataatgtttattgggcaggactatgagccaggtactgtcctggtggctgagaaaatcccagggagtaaaacaggccaatctctgtcctcctgggagcttatgtgctagaggggaggtgaattaatatgtatcatctggcagtaagtggtaagaagaaaatacaacagggtaaggagatggagcatgatgaggggtctatgttacatcgggtggtacggaagatctctggaagaaggagatatctgggcagagataggaagggtgagagggagaaagccaggcatgtatctgagggaagagcatcacaggtggaggaaacagcatatgcatatggcctggaggcaggaacgctgagagaccagtgtggctgaagggcctactccatacctcataccttcatgccagcagctgggcccatcagttcctcctgcatctttgggcctgggcctcagcttgctgcttcctgccctccaacccaagatggtgcccacctgcctggatcacttgccttcctcccaccccctcctgctgtcccccaaccaggtgcatctctctgttctccacctctgcacgctctccttgcaccaatgagaggtgtctgcagtggagtggttaaagtgctgggctttggagtcaggctgcctgggtggatcccaactctgccattccctacttggggaagcctgggtaaactgctcttggtgactcagttttctcaactggaaatgaggatatgatagtgcctatcacaggggctattgtgagattaaatgagttacatgtgcaaagcacatatggaatagtactcagcaaatattcatgaaaaaatattaaggtgacagaagccccttctttttcttttcttttcttttgagacggagtctccctctgttgcccagcaggcgggagtgcagtggcacgatttttgctcattgcaacctccacctccagggttcaagcgattctcctacttcggcctcccgaatagctgggattacaagcataaaccattatgcctggctaatttttgtattttttagtagagatagggttttgccatattggccaggctggtctcaacctcctgacctcaaatgacctgtccaccttggcctcccaaagtgctgggattaaaggcgtgtgccaccgtacctggccagaagcccctccttaccaggaagggtgaccagaattgggtgcttgctgcatggggagaaagtggaaagggcacaggctttggggtcagacagatgccgatgtgcaccccagctgtgtgttcttgggcaactaacttagtctctctaaacctcatttccctcacttccacaaggagatcatgatctgtcccccacagggtttgaaaaagggtaaattaaatgacaatgacaaatcacggagagattggcccaggacaggcagcttcactgatgggaagaaccaaccttgctagggacgaggttgcagatcaatgatcagggaggagagaaccaaagtggagagacaaaaagactggggagcagacgctcagggtctcaaagtgggggccaaggtgggccacagccagttcatgttgtgcagaggcccaccgcagtgaggggagagctgggccagtcgtgggatttgtggggcgtgggggtggggccttggccactctgccaaggctgggggcaggggtgtcaagtgccaaagggagcaccaggtgctgaaagccagtgccaaggggtagtgaagaaaagagagtcaggacacccatggccaaatccagacaagtcagacctgagccaggtgagtgctgagccagagcagggcagggcaaggattgttctgaggctgagttggttgtgctggtttattctggggatgctccttgcctgtcttaaagtggccatggtcagggcccacctcctaaacctgcagattggagcaggccccttgacatccctgcaggaggctctggggaaaggataaggcaggaccttcctgccccacagaggtcaaaccagtgaatagacacaaatgcaggaccgaactggaggtgccagctgacccaagggaggcaaagctgcttctgtctggggctcgggagtctgaacagcccagatcagcaaccaggtcaaatctcacaaacatgcacctaggggcttctggtgagcaaggaggaaggctatgctaagccaggcatggaaggtagtgcaggcctgattcctgagacaagaacaggaatgacctccccagaggccaccaagacaagcatttgagaaagaaaagaatgctactgacttagctccactgacatttgaatgaagagcaggagtaacaaaaacagagaattttaattacaagttcttgttcccccattgttcgtgattttgttaacgtctctagatctcccagtggtaattggcaataaaatctcttaaaacaaacagggttgtgcagtaagtggagaaatttcatttggttttatagctggctgaccagaggaatgagaaggccgtgtgcatttgggtggattgagcacctctttgagcttgtcttcccttttgagtaaaatccatgcttggaccagaccatgcctgaaggggtccctatcttaccagtgtacacaaccaggtggggaaagttatcattgtgacaatgtacaatgctgtccatgttagaagcctcagagtcactcccagctcctccctcctgctcattccacactaaaccctaaatgccatttcttaatgatctccttacccagctccataattgctgctgaaatgaaataagtccatcacatccaaatggctcctgggtcctgtctattctacttcctaaagggctcttgaaatggctgcctcttttctagccaactgccatagttcagacgctctttctcactagactgaggcaacaatctccctctggccttctagctggagtctttctcacttgaagaccatcttccatatggccacagaaggagctcttctgccttctaaaggctcctgaaaaccctaccatggtttcccagggtcaatgggatagagaaaggtgttctggctcttaatgatgggccccatatccactgctcctcaatacgcctccttgactgtagccaggcctagctacttgcaggcttggaagaaaccaagattttcttgcctctgagcatttgcacatgttatttcttttgctgccatgtccttctgtcacttgtcgctcttcaagtctcagctctcctgtcacctcctgctgttctaaggtgtctctcctctgctcccaggtgatctctatgcattataaggagtcagccttccacccataccagaaacccctcaaaagcaaagaatgttctaggcactgggaaatgcccaggatggagaagagtgtgacacaatagtcaaaaggcaagaacaacccaggcgtccaacctttgatggatgaatcgttcaaccaaatgtggcatggatatatgcacactccagatagcactcaaccttgaaaaggaaggaacttctgacatgtgctacaacatgtgtgaatcttgaagatattatgttaagagaaatacgccagtcacaaaagaaggacaaatactgtataactccacttatgtgaggtacctagagtagtcaaattcatagagacagagagcagaatggtgattgccaggggctgtgggcagaagggaaagggaatcactgtttcatgggtacagggtttcagtttggagaggcaaaataagttctggagctggagggtggtgatggtcacataatgatgtgaatatgccactgtaatgtatgcttaaaaatggctaaatggggccgggcatggtggcttacacctgtaatcccagcactttcggaagccaaggcgggtggatcacgaggtcaggagttcaagacaagcctggccaacatggtgaaaccctgtctctactaaaaatacaaaaattagctgggcgtggtggtgggcacctgtaatcccagctattcgggaggctgaggcaggagaatcacttgaaccggggaggtggagattgcagtgagctgagaccaagccattgcactccagcctgggcaacagagcaagactccatctcaaaaaaaaaaaaaaaaggctaaatagtaacattttaatgcataccacaattttacaaaaagaaaagtgactacagaggagtttaagaccacaatataatgaatgaatgaaggaggagttaagcaaggaaaatcttaggagatgatgtgaccaggtcagaacggaggagcctggaggctggggtgggggccacaacacctcactccccccacactccctgtcaatgtcactccttttcagatcagcagcggggcttcagggtgccagggctgtggttttcaaacctggaaaccaaaccaggttccagggctcctgggttcctcccaaaacaaaaggaatctttggggatgcagctgactctggtgggtgtttgtcctcagggcccctgctaagttctcctgggaaccgagtacagagtcaccaatgggacagaatcacaggagaaaaggagaaacatggtaagcccttggcagaagctggcacggactagattgttgtcgggtgtgggtgttggggccaggaggagcagtgagaagccacaggaggaaggctggcagagaggattcattccgtattcattcccctagtgagccacacgcttcggaaggatcacattaaagagatgaatcacacactgactcaaagagagggggtggcacggttgtaaatcagaggaatggcttttatttgtcagaatgctacaataaataacctctccgtgtgccacttaacaaaaggagagtgggagggagggaagcaatgtggcataggccggagggctcgcagggtgatgggagggatgcgggcaacctcacagctaccagggcccttcaggacactcttgccagtcactagatactctgtgctccttcacacacacacagagacacacacactcgcatagatcatctttccctcaaactttctgagagcaccagctttattttatacatacaggagatgtcttgctggagatgacattcgtgggtattactttttcagaatgaaggggccagaaaatcacccagggcccctcgagggctgaaccccgctcagaaagggagaaaggtaaggctgctccctagaatcaatgaagttgctgttctggcaatggtctgttaggacaagtggtcatgcagcaaaatcatggaaggaaactcttccaaaaagggtgcagcagggtggcggtattatctattgtccattttcttggggtggatttagaatcagacttcttgggtcgccaggagtaaaagtaaaacgctttaaaagtaaaaagctgcctggctctgcagggagtaggtagggaagaaggatgggaattctgggtttgcagaggggcagacaggcacatgacaatcaggcaggagggaggcagctgtgcttccagggagagcagggttcctgggggaagcccagggtcccacctcccctgccctagagcagggctacaggatatggaagccactagccacttgtggctattgaaatgtggctaggccatattgtaaggtttaagcacatactttatttttaacatgtagtatgaaaaaataaagaatgtaaaatctgttattaatttttttaatattggctacatgttgaaataaccttttggatatgttgtgttaaagaaaataagctattaaaattagtttcaactgtttctctttgcttttttaaatgtggctaccagaacatttaaaatcacacgtgtggttcacatttgtggcttgcattatatttctactggacagcattgctccagaggagtcctgggacccagaacagggagagcaattgctcttgacttgctgcttttatacctaggtgagtggggagcttacacttatgcactcagggatattttgggatacaggagcaacaccccaaactgtgaggggctggggcaggcaagctggttacacaccccatgggacggaggctggagagtttccatgacttactcaagtaaattaaggagaagagcttggcctagaatcaagccttgtaaattctattgtagtcttcttacaaccacatctccgtttacatagaaaaatgctcttttgtaattattagccacaaaacaggtttctggtgagaatgtaagtttttacatttttttttctggcagataatttacaaatttttatcaaaaccatataacctaaataaaactggacctaaatgcctgtctccacatggagatacacccaaaagaaacacaaatccagttccccaaagttttgaaaaatactgttaattgttgactgagatcccccaagagggcagcaaagggaaactgtcctgcacaagtcacggaaaatcttctaaaaggtctttagacatagttctctcttttacagaagctgctcaaatcactctctttcccctcctcaaacctgccctgacttccttctttagttccctctctcctctctggccaagctcttctgagcccctcttctctctgggatctgttctcttttctcttatttccatacctccaaggcccttctgtatgagaaaagttgttttcagttttcctctctgcccatcatctgatcagtcccaagaaatcctaaaaccaactgagtaggcagagaatggggagggttgcatcggaattttacatacttcgagcaaataaatccacttacagggatttaggatggatcaaaggagcaacagaccaaaaatttacatacaaagatacttatcatagtattatttaacataacgaaaaaactagaaatgacctcaacatttgacaaggaatagtggttaaataaattctgacaactctataaaatggaatattgagaagtcactaaaatgtctggctttgaaaatatttattggtgtgagaaattatccatgataatattaaatgagacgaaaccaagaatataaagctgtatacaaattttgatgctaatttcctctcaatttatatatgaacatagaaaaattcttctctgggctgggtgcactagctcacgcctgtaatcccagcactttgggagaccaaggtgggtggatcacctgaggtcaggagttcaagaccagcctggccaacacggtgaaatcccatctctactaaaaatacaaaattagctgggcatggtggcaggtgcctgtaatcccagttactcaggaggctgaggaagaagaatcgcttcaacccgggaggcagggaggttgcagcgagccaagaccgtgccattgcactccagcctgggcaacaagagtgaaactctgtctcaaaaaaaaaattaggttactaaaccccacctcataagggtgttgggagatgtagtgagggaaaaaaagacagcatgcgagaggtggcactgcatgcagagtcacagccggctgcctgggcatggatcctggctcagcttacactgtggtcctaggcaggtcacctggccccacattgcctcaatgttctcatctaaaaaatgggaacattaatgatacttgcatccaccctaatacaggcttgttgacgatgacaggagtcaacagaggtgaagcatgtgaaaaatgcctggcacacaccaggcactcagtagagatgagtttcttgtcttgtgatctttctagagggcctttcttaccctatcctctgctcagggcctgccccacttctcagcctagccctgaggctgctcatctcttcctcatcacttctgattttacagtccattactggttggctgccattactctagactaagagtctgcaaactacagcccacaagccaaatctgagatgctgcctgtttctgtaaataaagttttatggcaacgcagatacacccattcatttatgtactgtccctggctgcttcagccctacagcggctgcattaagtagttgtgagactgtatagccagcaaagcctgaaatatttactactacctggtctcttaccaggaaagcttgccgacccctgttctaggccaacactgtccaaaaaatgtataatataagctacacatgtaattttctttctttttttttttttttgagatggggtctcactctgttgcacaagctggagtacagtggcaggatctcggttcactgcaacctcctcctcccaggtccaagcgattcttgtgcctcagactccccggtagctaggattacaggtgcgcaccaccacgtccagctaatttttgtatttttagtagacacggagtttcaccatattggccaggatggtctcaaactcctgacctcaagtgatccgcccacctcagccttccaaagtgctgggatgacaggggtgagctaccacacccggcctacatatgtaatttcctagtagcaacattaaaaaaggaaaaagatacaggtgaaaataatttttatatttcctttaactcaatattccaaaatgctatcattttattgagtaataaccataaaaaactatgaatgaggtaccaaaataatgcccgtgtctgatgcatgcactacgccgcaacagtatctgacaggatgcaaaggtgaaagtgaactgcagtacttcccaaacagtgcaactgtctgtaatggaaacatattcctcactgctttagcttttaaatgtaaatgtaaatgaaaactaaaagttcagttcctcagttgtaccagttacatttccagtgactaccatactggacaatgccgatctgggcataccccctccctacgtatacttacgccccttccatgcacacagcagatgagttttcacatggcttcattgacatgcaaagtgattttctcttttccttttctttctttcttttttttttttttttttaatgggattttgctctgttgcccaggctggagtgcagtggcatgatcatagctcactgcagcctcaaactcctgagctccagcgatcctcccaaatcgctgggactacaggtgtgcagcaccatgcccagctaattaaaaaaatttttttttttttttgtagagaaaaaatagagaaaactatgttgcctaggctggtctcagacttctgggctcaagcgatcctcttgcctcaacctactaagatgctacaattacaggcgtaagcctctgcccccagcctacaaggtaattttcaagggggagggaattttaggtgaggaatgggggcagagatagtgaaagaaatatgtggggaggggggtgtggatgtccccaggttcccctggtgggttctgagcccctggggagagagaagtcagagacagaagccaagggaactcctcaaagggatttaatgtgactttgggctcaagcaaagctgctctggggctcaggtgacccggtgccaccctctgtctacccagcctcccacctctgtccagagtcagaactgccctgggcctgaggactggaggcttcagactatccagacaacccaccgcaaggagtggccaccccccgacagtgaggacaggagcgcagcgtctcccagcagcttccagggcagcaatgtgcctcagtgtgaggcagtgcaggaacgcaggaggggagcagacacccatggtccctgcggctaatggtcctgtttgtgggcatctgtaagaccgcttagaggactcctcagaatcactaggagccagtctgggctgcatccagatgagcataggctcagagaggcgaagtggccacccaagaccactcagccaatgacccctagtagaaggtcagcagccaggagccccagggaaggaaggagagagaggcctgagcaggagagagagctcaggctattctccctcccagccgggatcaaagcaccctggagtctgctctctgatgcactctgggacccgggcaagcccatttgctacagagcagcacaggttaggcacaggcatcctgctagcagtcctgggacatggtccaggtaatcagtgccctggcctgtggatttctccatattgtatctcatccaggagagcaaaatttgaagaaagctgggaatggtaaatccttctgctaggaatgaatgcttaatggaataaggaaaactccaaataagtgcccaggaacatccccgtggaaaggaggggtcatgtcagccagctccaagaccttctcaactcattcctccttctcaacttgcttggtagctgagcccagctttcttccctctgaggccaaatcctacatcctctgccacccctgtatcctttctatctgtggttcttcccagctccatggaacgtgagagcgaaagcctgcagccatctcgccccctggctcctcgtccctctaggtacccagtgagtcaggacaaccctgtgctctcctcacctgctcctcacagcagctgcaggcaccctccttggacaccgctgtcttccctggaccaaggtcatggctggtctgttcatctcacagctcatatgaccacacctgcagcagcggaggtaggtgtagaattgtggcacctcagatggagccaaagtggggagcacttacctaaaacaagactgttttaggtggatgtagccatatgattgtgggcatgttatgtaaccacttcatgcttcagtttcctcatctgtaaaatggggataataaagcatctgcctcacaaagtgactgaggaggggaaatgagttcatatgcgtacaaggcatgagttcaacgtttgtgagctaccattgtcatgaaaaccaattttagcattttatttgcagctgtgagtttattttacacttgatcttagccagaatgctaagaagtgatggttatgagtttattttaatatgacctacagaaaatttaaaatgacctacggaaaattacaatcaagctcataatttggcagaccttattgtttaggtcaaagctaagtaaacaaatcaatgtaaacatatttaaagaacataaataaatactagtgtaggtgataggctagtgtgtcatgaattgccaagatggggcacacagactatttgggagctattgatctagtctgagccctctagttctataaggaggaaactctaaacaggaagtagtgagctgagaccttggtcaacaatgtagtcaccggctgggttgggaccagacagttgccccatgccctgtcctccctgtcctgtcattctgccccctcaacagactcatcaaggtcacatttaaataagtacacacaaaagcagcttatgcatagacagcttgtcatcagacaggatcacacgtaacacccaggtcaaatcctctgccatgtcaaacaagataatcccatggagtaaaagcaactcctttacaaaacagggtcaggtgctactttctgactccagggtcagagaggctggtggaactggcttctctggctctgccacttcttaactgcgtgctatgatttggatgttcattcccccaaatctcatgctgaaattggatcccagtggtggaggtaaggcctagtgggaggtgtttggatcatggggtggatccctcatgaatggcttggtaacctatccctcaagagctggttgtcaaaaggagcttggcacctcccctctctctcttgctccctctcacaccatgggatctctgaacatgccagctcctctttgccctctaccatgagtggaagcagcctgaagccctcaccagtagccagtgctagtaccatgtttcttgtatagcctgcagaaccatgagccaaataaaccgcttttctgtataaattacccagcctcgcatattactttatagcaatacaaacagattaacacaccatgtaaccttggaaatgttgcttaatctctctgtgcttctgttttcagatgtacaaactgagataagaggtggtaaatctagtgcacagaatgtgaggattaaatgtgagtttcctttcttcttcctctaagagcaagagcaagtacctcccgccaaagatatgggagaatccttacgtaggaagctctttatctatctgtgagttcacccatcactctctgactacaaaaccttcagccactccctgtttcttaccactgcaaatctgcaggcctcaacaatgtggccccttcccatcaagccaactttatctccttggtccctaacacttgtcctagcatatcccatgctccctcatggccccatggacaagatgcatccatactgactcccaacccctgtaccattttcttccccacattggtgtatagactgatcttgcaaaaacccacatctaattaaccttcctcctgaaagcctctgcacaattcaccctttcctgtggaataaagtccaaactccctaccactgcagtcacagtctctcatcatctaaccccattccctctcctgtagtcatccttagttatccataattctctccccacagcacaggcacacatgtgtacacacacacacacacacacacacacacacacacacacacacacgagtctacactcaagccagtcaggtccgctcactgttccttcaatagcttgggctcctttgcacctgcatatttgtgcactagctgctttttatccctggaacactgcattcctttctttgctgggtaaatgccttctaaccccttagcactttgctgaaacagagcattttgttttgcaaactcccacctccactcatcccttgcagcttaggtgactaagtcctggccaataagatgtaagtgaaaatcactgggtggaactaccaagaaggctcattgaaaggagcacagatggctgcatggcctttccacctttttctagtttttttatatataatggatgtgatggctggtgctccagcagccatcttagacacaaggtcaccttcagaatgaaaatcatgctctatggatggagaggccaaagagagaagttgcctgggaatgctgatattgtggtgctaccatataccaaggctagactggctccctttggttcttttatgagagaggaagataaactcttatgtgtttaagccactgttattttagtttgttgttatatgcagaaaatcgaatcctagccaatataacagacatacaagtcatttcctgatttggctcctacacacctctctagccacacatttcccctccccacccccaaaccccatactccacacctactaatctaatttcagtttcctcaatgcatcatgcttttctcaggcatcacacccttccccctctcctccatatccctcctcagaccacctgggaacacctgctcagccttccagacccagctcaaggaacacctcctccgtgaagcctttccagatgcactctctatacttctcccaggcagaagtgaccattcctcccactccgtatgcccccaaatatctaccatgaaccctctaacatgtcatcatttagtcatccacctgtacctccgaggtcctgagttgcttgaggcaagagctatttcaatcatctttgtctccagcatgtagcccaggacctgggaacactgagcacaagtaaagttgttcagggaaagttcccctgaggcaaggtttcatctgggattctggcccaaggggcagggctatgtccttgggagaggatgggggctcctgcagggcaaaagggcttgctcttgagcatattctgccctaggaggcaccaggaaatgtctgttgggtgggtaaatgaatgtgcaactcaacctcccttcaagcttctctctctaggatgctgacttcctccagccgtggtggtgctgcctgtcaccatctgaccctctctgcttcccttcccctgccatacttagcaggcactcacagctggaggcaggaggctctcaaagtgaagggaaaaactcttagctgccaccatcctgaaacctgccctccccacagccacaaaaggccaaggagcatggaaacagctgctgcaaggagaccagtgagcaggaaggtggggcagcctcacaggagctgccctgactggggccttccctctagcagtgaccttgacttagagaaaggacaccttccatggccactcaaacatacacatgacagtttccctccaccttcattgcatacactgaagacaactggacagaaaataaagaaagtaaggagaacttccagaaccatagccagaaatgcagagtaacttaaagtagctctgttttaatatattgcttgcttcccccaaggccctgcagggatggaagctgtatccttcaagggcaatgggatgaatagtggggagaggagaatgttcaggggatcctggattctgctctttccaatgtgaatggccaccatatggaagaacgattgggccactctcccagaaagctaatgatcagtgtagcatcagcccacacaggagtggcctgtcatgggaggctcatacactgtgtgccatgaagcagtggacatactcagaatcacatgccaccacaaagacttcgggttctgggaacttgggacctcctgccttctggggcttcttggaacatccatgcagtctggccccaagaatgccaattgctcctgatacctgagccaactttctgggctccccctgtctcatcagggatgctctctatctgcagagcactacaagtggctcaagcctggttctctgactgcttcaaaggtccttctcttaatctggtttacctcactcttctgcctgcttcttggagctcagcttcctatgactggtgccacaaaagttcctagggtcacacacagaggggcagagaagctgatccactggagaggctattagaacaggtgggaggaggctgcactgtgaaccagggtctggggccatgcctttcccaccacatcataagcattaattcattaattcattcacaaaatatatatttaatgtctactacatgctaggcataattctgggaataaagcaatagaaaaaaaacatgtgatgaaatatattcagggaaatatattttggtttaccaaagtagaaagatttctgtcctgcaggaaggactcagaatttttactatgtcagccacaggtactgtgacttgcccagaagggtcttagcatataggccctttgaggaagaaacatcagtgtagaaaatttgaaaaacgtagaaatgcacaaagaagaaaataaaaattactggtaatccaaccactcagaaaatactcttataaacattttttgtgtttgtcactgaaatatttttatatacacatctataactgcatagatgtacccaccataacttacaaaaccaattcccacattcttgtgtatttagattgtctccagtctcttaatattgcaaacaatacagtgaagagcatccttgtaagtaatcctgtattagtcagttctcatgctgctaataaagacatacccgagactgggtaatttataaaggaaagagttttaatggacttagttccacatggctggggatgcctcacaatcatggtggaagacgtaggaagagcaatgggacggcttacatggtagcaggcaagagagtttgtgcaggggaactcccatctataaaaccaccagatttcgagagacttattcactatcacaatgacagtaggggggaaaatgcccccatgattcaattatctccacctggccccacccttgacacgtgggaattattaaaattcaaggtgagtttgagtgggaacacagagccaaaccatagtagatccttatccatatcagtgattattttactagtataaatccttgaaaggggaacttataggtaaaaatgtagaactatttgcttttatactgccaaaatgccctttggatatttgaagcaatttatgctcttaacagtggttgtttaccatgcctgggtcctcacaccctaacaaacaaacaaacaaacaaaaaacaaaaaaaccctaagtatttggtttttatttttaaaaactgccattttgataggtaaaaatggttatctcattattgtaacttgcctttcttattactaggcaaactaaacttttcccatgtttattaggctttttgaatttctttctctattttatatttattttgtccattgctggggaagaatttttttaacttttaattttgcaataatcttagaattacaggaaaattgcaaagatagtgcagagtttccatatacccttcaaacaatttcatctaatgttaacattctccataaccatggcacagttctcaaaactagaaatttatttatttatttagagacagggtcttgctctgttgcccaggctggaatgtagtggcacaatcatagcttactataacctcaaatggacctaagactatatagtcatgtgctaccacgcccaggtaaactaagaaattaacactggtacaatacaatgaactaaactctagactttatttggatttcaccaatgttttcttgactgtcctttttgtcttccagtatctaatccaggatctgacattgcatttagatgtcacatctccttaactgtcctctggtcagtgatggattttagcctttccttttcatgatcatgatatttttgaagagtcctggtacagtattttgtatgatgtccctcaatttggatttgtcttatgttttctcgtgattaaacaggggctgtgggtttttggaggaatgtcacagaagtgaaatgcccttttctccatttctgaggtcacgtgataccaacaaggtgcattactggtgatgttaaccttgaccacttggttaaggtgatgtccgccaggtttattaactgtgaagttactattttttccttgccatactctattatttggaagtgagtcactaagtctagcccacactccagcggagggaatttaagctccatctgctggaaggggagtagtatatatctagaattctcctgtaaacaagatttgcactttcttcccttatttatttatttattcaattatttatttacaacaaatgtggtcagattctttgggttatagttcaatactatcattatttatttcggtgctcaaattgttctagttttggctgttgagagctctttctggttggctcctgggtccttcagacatcctaccatctttttttgtcttgctttgttttttgtttttaaacacttccttactttctggaactacaaaatgttttaggctcatttttttgtgtgtttgctttttgtttttccctgcccaggcctggaatcagtcatttctccaaggagttctggttctttttactagagaatggtctttagagactaagatctgggcagtgagtgtgcccatttctactagggtattattggttctaggctctttcagcggacagaactggaaaatatatgtgtgtatactaatccatgcatatctctacttctgtatacttctatctgtacgtatattaaaaatacatgatatttttgactctaatccagcactatagagttcattcgagcctttctagggcaaaaatgttaaacctctaaagcacctctgaatactgtctggaatctccatttcccacccaattctgagcaaaaattaaatcaagtagagcattgattggctatgactgatcccacggccatctgccgggaccacacgacagccccaggatggctccagctctgttcctctgggcctggagaaagcaacagaggacagagaactatatgaggacaaagaataaggcagccttgcccagagttcaaatcccagccctgccactaactacctcctggtcgattctttttccgtaaaatgaggggttaaattagatgctgcatagatctggtattctgtgattacagaaggcactcgattcatgttggctgagtgaatgagtgggtaaggagaggagtttggcacatgccagggcccctctctagttcaaatccacggtccatcattatcttgagcaggtaatttaccttgccaggcatcagcattttttattttattcttggtacttctctgtattttctagattttctacaataaacatgttattttatacttactaaaagaaaacaattagattttttaaaaaaacacaatagcatataccatccttctccctagaattattatcagtaagtacttcacaggctggcactgaggagcactgtgctcgtgtggatgaacttgaacccatgcaagcttcaagttcctgccataaagtaggtgttcaacaggcactagtttctgtcctttcttttctctctcctgctgatccagaagctacattgtgaaactggtggaaaaagtcttcctctcccttttttccctagtgtgagtgtgatggccatggcaaaaaaagtccctgtcaaatgagcccctttctttctcactcagagttctccctccctggcatcctccgtgaagggcctcctcaaggtgtctttgcagaaatgtggagtgtccaccatcaaggaagatggagggtccattcccaggtcccacacctggctgaacacgtctcccagtccagcatgaagctaaggagcttatgctccaggaagctcctgctcattttcaaccagggcccagctatggttgctcccctgagccctcattatctgtgctgaagaccttaggttgcagggtttgaagcctcacagagagcagagcacagtatgtgagcttcaggctacaagcctccaccccagcagtcctggcttaaattctgtttctctgcctaagatgaattcctccaggaaactattcccttccctccttctgagaggagggaggaaagacggcttttaaattacatgcttcttcttatttaaaaaaaaatgatggagaatttctggtaggaggaggggaaatattttgtacttctagaaccaagaaggcacagacgttccaccacgacagcaaaagtcccaagtccggaaaagctagcatattcagcaaaagcaaagggaactgagggcttctcatgaaaacaaatctagaaatacttgaatttgttttaaaaaattaggtcaggcacggtggctcatgcctgtaattccagcactttgggaggccaaggcaggcggatcataaggtcaggagatcaagaccatcctggccaacatggtgaaaccccgtctctactaaaatataaaaaattagccaggcatggtgcctgtagtcccagctactctggaggctaaggcaggggaatcacttgaactcaggtggcagaggttgcagtgagccgagatcgcaccatggtactctagcctggcaacagagcaagactccatctaaaaaaaaacaaaaacgaaaacaaaaacaaaaaaccatcattctcagcaaactattacaggacaaaaaaccaaacactgcatgttctcactcataggtgggaattgaacaatgagaacacttggacacaggaaggggaacatcacataccggggcctgtcgtggggtgcggggagtggggagggatagcattaggagatatacctaatgtaaatgacgagttaatgggtgcagcacaccaacatggcacatgtatacatatgtaacaaacctgcacattgtgcacatgtaccctagaacttaaagtataattaaaaaaaaaaaaagagagaaacactcttttccaatagggattccaaaatccaaatcgtggtcccttgtcagcaccattgagttcctaaccatacctggagggaatattacaagtccctttgcactgatgccaagcctcaaatttgtctgctttctgtattcatactgaagtgaacataaagccataggctgatgccacaccaggctgtgctgtcagtgaaacccctgaagaagtataccaacaaagatacaacagaataataaaatcaagcttggtcttttctccaaaaataattttaaaacctctgggtagctggttctcttctgctgccttttttttctccccaattaaaaaatgtatttttgcacctacactcttaatgttttatttttattgtctttgctttgttaaataatctattgtgtgtttgcatttgttaaatcactttggtccattcaataaatgtttattgaagaaaaaaaatcagcattttgtcatagagctcactttccacatgagctaccttcctttctagtggatttacaacccagacccctgcttctgatggggctccttcaaaattattaaagtgcttgactcttgtaatatcatgtagggttgggttatgtctgccccaatgttgacatgaagaaattcctccctttctaaccccacggacagacagcacttagcatctctcacctggagcatcacttcagcctcttgacttgtctcctccctccttttctttactgcagaacttctcagaacctttaatatcctgatgatcttccaagagggaaatacaacacaaaataatatatgtatttcctcaacttatttagtcatgaaatcttttattcaaagaacatctgttaatgcctctcaggccactaggttctaggaactcagtttgggaaaccccaccctctaaaatataatcctaactcctcagtaggcatgtgagcccttccattgtctgctgtctgcctccctccccaggatcatttttcacctctctcttatacctctgacattcgccctagaactgtttgtggttccttaaacatgctgtcttatttcaaacttcagtgcctttgcatatgctattccaccagcctagaatgctgttccctgctgtcctctgagttcaacactgccaactctttgaaatgtccccagctccctcaggctgacaaagtcacaccagccccaatgttcctgcagtgctagctttatgcttatcagcacttccccagactataaatgtgtttctcgcctgtaaatcgtcttgcttcttgctctctcctggcctaattcttcagctcctatcaatcccattagattcccatctccctttaatacatttcctctttttttaaaaaaagttaccaagaatgagtttcttagttgcatgagatcaaaaaaatcctaaattctacactcagaaagaagagttttaaaacacttttagtccaaaaaatgcatgttaaaaatggcacccccccttccccccaaccccaagcatacaggtctcttttcatagggggaatcatgttcacagggccccagggaaaaatgcagcaggatctgcctggtgcctgagaagctgcacactatgctgactcagatccagagagacagcattactcaggccaatcagaaaggtggtacccacatccctaggagcagccttacccaactctactctgcaaatggcctcttcctgggctttggggcaggcagggacaagagcatcaattcctgaacttcctgaccatgccacgttcagaatgcttccttagaagccatttcacgaaggtttccaaaaggaggatttttatctttcaaagtaaatgaaagaggatatagtaaactattgctaaactgtcccaggccctttgcaatctgactttgcccctcctttcatcaggggtggagtctatttctccctcccctgaatctggctgggcttgatttttcctttggtccaaaggatgtggcagaagggatactgcaccagttctggcctctgccttaagaggcatggcaggcttgcttccgcattcctggagtcctgagcctgccatgccatggaggagctgggtctggcccactggaggacaagaggtcatgcagagaaccaggctgctccagccaagagctggcaccaggcccctcgatgtgagggaggctctcttggacctcccagctcagccccaccaccagctgaatgcagctgcaggagtgagcccagccaagaccagcagagaaccacccagccagaattgtgagaaataataaatcatgattttaagctacagagtttgagtgtagtctgttaagccagcaatagataatgaaacagaagggaaggctcagaagccagcagggaactcaaatgtgtccagtgatagaggatgtgggaagtccccttgctatagaaaatgcaagagcaaggcaggtgcccctttcactatatatgcaaagtaccaagggtatcagaaatgcaagtgatcagatgcctcccacatagagatgggctaggatatgcccttcctgcttctcccataatgttccagacagggcctattaccctgagacaaaggaaggaattcgttacctgcctacctaaactccctccctccctttcgtctacattatctggccctgaaccatgactgtgcagagaacaaactacaattaatgctatcttttacccacaaggagctacaattactaagtggagttaaataaagtcacaaaggacttaaaagcaggtacgatgaagggaggtcagaagacaggcagtgtaaccgtgggcttattagggcccagaaaagaagaagatgcaaggctttttgctgaaggaccctctgtgctgagcctggaaggaagagaggtccctgcaggaagagattaagtgaagatattattaaggttgagggagtagcaaagggatagcataagagcaacatccccctcccttgccccaggtaattcctcccttcaatctggtctcccttcttccctttccaaggttcctcaaggccatgccacctaggctgatgggttttcttatctctctactccctcctgcacccagccctaggttgagttaattgggaatactaatcatttgagaagagctactaagacctgagaatgccccccaggtagtagttccagccttggtaattttaagactcttacaagaaattactgatacttttagcatctgttgattgagaaaatacacatgtgaaaatagatatcagttctccttataataatgcccctagggaatcagctgggcatggcagcatgcgcctgtagtcccagctactcgggaggctgaggcaggagaatgtgtgaacccgggaggcggagcttgcagtgagccgagatctcgccactgcactccggcctggggcacagagtgagactccatctgaaaaaaataaaataagataaaaaaaaaatgcccctaggggtccaggagcaggttgaatccaccaaaaaccactgatgagaggaaataatcagccaatgaaacagacccatgcttttagaagggccttcgttgctttgaccccaaaagacaatgagggaattgcaggatctgaagctggtatgtcaaggagtggggggcaggggagaggcatacccttggcccacaggtcctactgggacaccactatccagctgctctgggagagaagcaaggtgtccaaatgtaaatgccatggcggctgggcctggcttgcctagccacaagttcaaactctgctcaatgctggactggtatcatgtccctgccagtttagaaagcatctaaggcagtttggaaaagcagtagactagaaaccactagttaagtaactttcagactcagctactacctagctttgggagtttttccaagctttttgtttttgtttttggagacagagtcttgctctgttgctcaggctggtgtgcagtggcgccatctcagctcactgcagtctcaacttcctgggctcaagagatcctcccgactcagcctcccgagtagttggggccacaggcatgtgtcaccacacctggctaactttttatttttcatagagatgggggtctcctgatattgcccaggctagtctcaaactcctgggctcaagcagtcctcctacctcagcctcctaaaatgctgggattactggcatgaaccattgcacctggccccaagcttttttctttttttggctttcatcttcaataaaaaggtgatggagggtgggaataggagaggaatgctgaacttgctctccaaggcattgccaaagtgccaacatcctgagcaaatgattctagtcgacttactgtttctgagcctcaggcttcttacctgtaaaatgggaatgacatgtaacaattaaatgagatacaagttgtgaaaatgacagtcacatagcaagtatcaattaacatgggtttttctctcttcctcccttctgtccttacaatgacagatggttctttcttcccagtcccatccccctgctcttactgagttgctaatttgacctctgagtataaaatgtgtccacttttagtgacatgaagctagtcctcccagagagaggcattgccaaagtgagtatgatgacttcaaacacgctcagaaaccctaggaagcagctggcagggtgcccccactccctgcccctggcaatgctgggttcctctttggcatttgtacagaagggaactggcccaaggcagaaggatgggcctaggctggtgaggccacctccctccaggcctggccaaagccaaggcaggcacagacagcaacaaccacccattttgcaacaaacaggaaaccagtttaccagcctcaaaaatagaacagacaaaaaccccaaaatatgaggctctgacagtggggcagctcagctttctcacatggcttcctgacaggctgcggagtatgtgttgttattgttgctttaaatttcacaggcgaaaaagtcttgcaatgtctttataaaggtgaccagcctctggggcccaagaccagcaggcagcccagccaatcatgcttcctgcactgccaaggccccaccttctcagtctctgatccagctactaatgaccccaactgcaagggccacagaagccttgattcctgtcatgtcctaacaggattggccctgacatgtctgcaaagtgagtcttccacaccccagcattgcttttcctgtggcccctcacctggtgccatgccactcaccccaaaactgcttccataggtacccagaggccccactgggccacatggtccaagagccacactgacaataggcctgcagacattccctccacgtgaagctggactcatgctgtcccctctgccaagaacagtgttccttgcctggtacactctcctcagaagcaatcatactggaatgacatggttagaacagcaatgttgctaaggactatgtcacacaaactccccttgttgagggatcacggggaaaatgtatcttaggtcttagccccagggaaagctgtgcacatcctgggcactgggtgcatttttaatcctctggacatgatgactaagaaccgcctatcgattatgttccctttttgtcttcattgttaggaagcacagtgccaaacctgttcatcacctctagcaggtttatgtcctaacctgtccatggctttattttagtttctcctcttattttcccttgcatattatttctttattaaatttattttaccttaatgtagaatgtatatgatctcaaatctttatttggaataaagtgaggtatacataaataactgagcaaacagctcctacttactctgtaaaacccacttcgaatgtccccacctccgatttctgcctaacgactccacaaaggtgggcttccctccccagtggtcccacagcccctgcctgtacctgcctggattcacactcacccacagttctgtattttactgttttcatggctctccccaccaaccgacagaaggttcctgtgtgaaagctaaaagcccgccctctgccaaaatctgcccagtgctgcaggcacacgggcttgtttaatcctcaagacaaacctgccagataaggctggctgtgcccattttacagctgaagcaactggagctagccaccaccaggtgctcattcaaggtcatgtactattgagtggcagaactgatacagaaggcttatctccctaaggtcacccaagacatgaaaaagagtttttatgtgaaagagagaaaaggagagagagggaagggatttagatttccttagattatcaaatcattcactgcagatgtcaaagtcatctgcatcactggaaccatttaaaatatggcttgattcataacaatttatcctctacgactatctagaaaaatctacatgtatttaattgtggcagactcatgctgaccctccaataggctggtcagagcaagtggattagaggagttactcacatgctagattgttttagagcatctcctatcctcactccctcacccactgtgtatacacacatttttaaatcctggtaagtagttacaggaaaaaaaatatatactcagaagacaagagctaattctgcaagaagcttctaggagaaaacaaagcctactttcccggtaggcaagtgcacatgacccatgaggccaatcattaccctggctttacagtgtacagacaattaaactacatgaaatggccgggcgcggtggctcacacctgtaatctcagcactttgggaggctgaggcgggcacatcgcctgaggtcagaagttcgagaccagcctggccaacatggggaaaccccatctctactgaaaatacaaaaattagccaagcttggtggtgcgtgcctataatcccagctactcgggagactgaggcaggagaattgcttgaacccaggaggcggaagttgccaggagccgagattatgccactgcattctagcctaggcaacagagtaagactccctctcaagacaaatttaaaaataaaaaatcaactacatgaaacaatttttaatattccaattgagaacccacttggcctgaggcctttaaatcaaagtggccactggtatctacacgtgcccttccatggaatgaggaaggcaggacaacagaggctgctagggtctgggttcaaatggccttgggcaagctgggggctctccctctgcccctcgtttacatgcgtgtgcgtgggagatgataatgacaccacctcttagggttgcagtgaggacgaagctggcacagggataatgttgaataaatcactgcatcccaggcaagaggatacgtgaccaagagctggagtcctctttgtagaccttgtgttcttccattttaaaatgagaacaagagccagagagaagggaataaggcataagctatgaatggacgggaaggagaaagatttctgacccacctcttcacaaaagcagcccttccatcctgatggagagcacctcttttgggggtctgatttgtgtctctcaggccaccttacgccttgtgttctgtgtgtgtgtgtacacgtgcacgcacacacatctcctctgtaaagctcatgcacccaggtcctgagcctgattccccccactccctcccgtgtctggtacgtggttgagatcagtaagcacaggttgagtaaatcacaatggtagaagcagtaccagctgaggcacagaagggatcttcaaatgtcagttctctttgtcctccttgccagatgaggcccccagagcctgccctctgccttccttcctgaatgttccagggactcccctctgctctccagacaaacaccctcactctgccaccaaggcccctctcagcctgcaccagcagccaccccccagggctgcccccttatcatcccctctcttcctgttgacagccttggatgacataaccttaggagacccagccacggatcaacctgactacacagcgtgggcatggtaggggaataggtgattcaaagatttcctgggtgtggtcccctgccctctcccttcaccccctctgaagcatgtcacagtggttgacagattgaaggcccagccccggcatggagcccctgctatgccacttacactcttctggaccttgggaagacaacttcacctccataagcctccatttcttatgtgtgaatgggggtaagaagagcatggatgcatttcacctgcctctgaaggttgtcactagaatgagaagcactgatctccacccggcacatggcgagggccagcgcaggtggctccgtcccagcaccatgatgagtaaaagctgagcaggaagggggaaactgtgcttcccctctgtggcactccagtgggcaaggaggccttggaaggcgcagggccggggccagcgggaccactcaggctcacctgggactccagagggaaggggcatctcaggacgactccacagggtagggggctcctagctcaacatcttccctgctttacccaagagaggtcaagacgacaggactgagagtatgatgtgctcgccaccccttgccctcaccccacgccccacccacacagcccctacaccttcaggaggatgggatgagtcatcattaggtcactgggtcatcgagtaagcagtgggggccacagggtgcagtttcctcccttcctccccgcccagcccacctacggctctcctcctactctctgcccccgctactttcctgtgctctgatgtgggagggatatcgctcattgacaggtttcaaaactaaaagtagagcgcatttagtcttctcctgtggctgagctcagctcccagctcccagaactttgccatgctgctgcagggccggcatgccccctcctcaccctcacggggagggcccccatggtgttagccagggctcaagaatgaagctaggacaggaggggcagaagacgatgaagggaagtgcaaacatatgaccctgtcatctgttaggccttgaggtagatcctgggaccccagacgacagaagagtggaagggaaatcagaaaccagcatacttcacctgtctggagtgccagaccctgccaggtacagagagagagacagagggagtgagggaaggagggacctgtatggagactgaattacagggcagacacaggatccctacagaatcctgccaggcagttgttccaatgtgtagcgataagcagtgacagggcagaaatgggaggcgattttcccagcctgtcacctccagcaaggtgtgagccagaatgcacacgcaggcctgcgtgtctctggggctgatgacagagtcacaaggaaacagatctccatagcacagcgtggaaagggccaatgctgttgggtgaaagatgctctgggaggtcaagagaagggccaattaaccccatctggggaagcatttcatgacggttgtgatgcttgccctggatctgaacagcacatgcatgggaataggtcaggaagtcaaggggacaaagatcagggcaaaggcaccaaggtgtgtagtcatgatggggggcagggggaaggcatcaggaggctccagccaaggaggaggctgtgaaggaggcactcagcagcccatgctgactttccttataacttggaccccagaagtcactgctatttccagaaaattagagtcacaaatctgataatattatcaaccactaacagggcatccactatgggctagacattgtcctaagcacttcataaacactacccccatttaatcttcacaacaaccctataaagtaagattactacccccatttggtagagatcaagaactaggcccaaagaggttgactcacttgcccaaggcacacacctctacaaggggtggggctggacttgaacctgaggctccagagggcatgctctcctgaccactcagctgggttgccccaaagaccacaaaatgcctttcctgctccccagaaggtccagttcatcctctccactaggctgcaggcatctccagagcagggctgtgtcctctcctccttctattgagttcccctacctgagcctggcctttgtaaagaaatttgacaggcacatcatgacaggcagaatccaggggaagaaagcacttgtcacagtccagtttgggctgggaaccaacaatttgttgacttaatcaggcagatgcaaaaaggtgttgtcatggtggcaagctttctattccaggcggccaggccataattaaatgtcctgacctgcacacctccaattacagcacaagagctggtttcccaggcctgttaactagcaattatagaaccttccagtgaaattccaaatcacttagtaaaggtcaacttcctttatttatttttcagatttgggggtagaagtgaaatggaattattgcccaaattatgtgtgacatccattacttaaaataggtttattcaaacggcccatatggagcaagggatggagcctgcagttcttacaagttgttataagggatctcatttatggagcacctgctatgtggcaggcaaaaccacagtggctttaaatgtgttctatgatttaattcttataataaacttaagaggtaggaattactatttccattttgaaaaggagtaaactgaagatcagaaaagttaagtaaccttcccagggtcatacagctgatgcttcagaattcaggatttacagccaggtctgtctgcctctggacaccaggctcttcccattactaggtggtctcaagctaagtaacacaatttggggttcagagcacagctcctatgtgttgtgcaaggagtgctgagacctaaaatattcccttctcctggcctatccatgaaggcacagttgaggcacaggtctcttccagcctctgggatggttaccatgttagggttaataacccttcattgttgacggctcagacagctttttatattgataagagagacttggaacagtgtgaggacagtaggccttcagaacagaaacaggtggtaccaaagacacggtcttcatgccatcacttgccacgtgatgcccatggcaggtgccactaatcaacagtgaccccaggctccttctcaatacaggtgattcttccaatgcattgaactggcccaggagatgcaaattgttttctctctctgtcttagatatatggtgaccatattttctgcatgcaaaattctgacatgtaattcaactgaagattatttccctgatttatgaatttatttatgctttacaaaagctaaagtcaaatcacattcccccatatatttaacaaatcacttttaatgaaaagaataaatgccccttaatcagaattgtcccagatgatctaggccatatggttgttacagttgactgtgggtgcagatcctgggcctgtgcacaaaaagacactcagtaaacacatggggaacaagtgaatgggaggagggttcagatgaaagaaaaaggggaaggtccctgagaataaatctgctgacatcaccatctcgccgagtccatgcttgactggggactttcctgaagctataaattacttttcaatgtctcattccaggagagaaatatccaaacgacatgtccatctgatgaagagaacagtgtacatgcacacaccagatgcatgtgggtgcagctgcccaaattgcagccagtcaagttttatacctgactggcataaaacttaatcaggctccagtgttcagggccaaaagccacaacaaacatttcaaagtcaggcctcaccctccatctcacagatagtcccccagctgcccacaagacctggactgattgggtaattgtagaaatccacatccaagaggttgaaatggcagaactgctatgaagcttgtcccagtttttcgattctgccttcaggcagcaacaatcctttcagttgcttatctcaaataactaagtcacctccactgaagaagtgcgatcaaccacttgtaagaaagcaaaactccacaagcatcctagcatcagggcccactagttgactccaggatgagtgcaatgatctctcctgggtaccaagaagactccatccagagagagggcagataacaaatgtccatcttaggtcccttgccccccatccaccatctcctagtccctgggacctccatctaagaggagaagcaccagccttggcaatggaagcccacaccagtaggggctggccccacactgatcctggtaggttcatgcttatgcttctgcctcatgctgaactagtgcatgcctcagccctttggaaccccttggagctctccaaggtactgaccctcattcctggctgggcccctaaaaacagtgtcatggtgaaatgtggttattttgagtttatatatggttacagtcttttaaaaagaatcaattcaaaataaatttggcttcactgttgtacctcattttaagaagtagttttctaacttttcacctccaatttatagtgtggatctctttaagaagccaggtggcctatgtggcatgtggcttatggatttgcctgtaatggccctgaagcctttgacatcaccaagtcctcactcctttggatcttgcctgtcctatttcttggccttgtgcccttcccaatcccttcctatcaactgcagactcctaggatgcccttttccagcccttacagggcactatgattgtttattgaccagtttatttcccccattggcctgagtcctccaatgaccagattttttttttttttgtacctaatgcagggtttgtgtcacctgggtcctcagttggtgtttattgcccagtgggcagctagtgaatagtctcctgggtgtgacccaggagatcttccatctcttaagcccttggcttttcctactccccaaggcccactctggcagccagccaggtgtgctgtcctcccaatggtaggaacagtggtctgtgctagtctcctgctcataagaaacttcaggatccatgtcttctgcttgcttgtttgttgtatttcctagaggaaaacagtctggtgttaaccttgggttttactggctacctcaccccatagaaacacaacaataacaacgaatgcttctttgaacaccatttttcactattctaagcattttatatgcattaattatcagttacatttgctgttaggcaaatgctaccacatcctctttttacagataatgaggcagacagagaggttatgtgactcacttggggccgcccagctggttagtgacgggcccagagcaccctccagagacactgtcctgaaccatcgtgctgtgctgccacccactgagcttggagcaccacggggagggggtggggaaaggcgaaacgtcaggagagggtgagaaatgggaatttggaggcataaagtcaggaaaaggttgagtcctttttataataaattcctaaaagagggaatacgaaaatcgcagttgctgtagttgtacagatgagtccttatctaactccatacaattaatataaagaaccatataattaatttacaactggaaaaaaaaatactttattctaaagatgagcaagcagaggcccagagaagcccccgagtgcccaagttacaaagaagagtgtccagaggcactggcttaagaagacagaaggcactcagttgaaccatttttacaatggtataaagaacccccaaggtgatattttaataaacaaaatgacccaggtcattaatctctctgctgctttgagacatacacaggtgctcccagggctgaggctgtggaatcccagccagctatcctctagggggagctagaggcagtccttccctttaaacagggccttcattaagcaaacttaacaaacacgaggagcacaaacagaaacctctttctcagcttgcaacggacagatgtttaataagatgccatgggccgggtgcagtggctcatgcctgtaattccagcatttggggaggctgaggagggaggatcgcttagggccaggagttcaaggctgcagtgagctatgaccatgtcgctgcactccagcctggagaacagagcaagactgtcttaaaaacaaaacaaaacaacaacaaaaacaaaaaaataaataagatgtcatggatatggaataaatagaggataaagcccactgaggaaatgcctgaattctagacaatctcagcagctttcttgcattcctctggaatgactgggccacatctgtattgtgttcccatctggacacttcattttaagagtgatagtgacgcatttatcctgggaagggaaattagcaaataccaaggctggtagggggtggggggggacctgggctgctcaccccagagaagactggccagctgggctgcgaagccaccactccaacagttccctgtctgtgaaaaacagagtgtccccttccctgagggtgcactcctccttgggggtggggggacagataagttagaactgccaaggttctctgctccttaaatgcagcctagcaggatgggtggagggggtggggggcggtccttgcagcactcagagccaagcgctttctggacctggtaaagtgcctatgcactctggggcctctgagactcctacagcaagaaggaccttagctgtctccaggccctgatccaaccacttcatttcattttatctattttattttattttatttttgagatggagtcttgctctgaagcctaggctggagtgcagtggtgcgatcttggctcactgcaacctctgcctcccaagttcaagcgattcttctgcctcagcctcccaaacaaccccttcattttcgagatgagggctctgaggctctgggttccatggccagtaagaagcagaagtgggactggagtccagtcatgcagccccccatcaccctatctagtcctcttgccatttggcccacagcctccaccagcaggagcaacactaggcgccaatcttgccctgtctttctggtgatctggaaacagtcctatcatggcagctggaaaacagtggctcacactgctgccaggcaatgttcaccagctggtcctcctcccaaacacactggcaagacctagtgacacacagggtgcctgagagactgtgcacccacataccgccttgcaattgtccatccccagccattaacaggtgcgacttctctccgcaggaccacagtggatagaaatctctgtggaaatctcctcttggctgctagccatagaggacagatcttctacgccaaagggagaaggctgagaaccataaagccatcaagtaggagggaccatgcagtgctctctgatgcccaatatgtaaccataatacatgagagaccattaaaggagaagagctggggaaccccacccctgccccatgccatacaactcttcctaaacacagggtcttcacagccagcctcgacaagagacacatgtagaagggaaccatgactagccattccacagaccagaccagcacagcctgttgtggtggagacagtagcttcttccccaaccattcagcactgcggcctgggcttcctcacctacagatgtctagggctctgatgccttcctgtagttacccacagcagcccacagcactgccctttctcaatctcagcctcctccccacccctacacggtccatcctccagtggtgggggcttcatctcctgatggtcttgaccttgggcactcttatcttgctgtccaagggaaatccccagaagacactgagtaatgagagctgagagaatgggaccttgcttttaggccatgggtgaaattcaagccccagtacgtcatgtctgtgaggcttgtggaaagctggcttctgagtgagtgtccctcagccagcactcagcagacatttatctggcatgacctctgcgctcacactgccagggctggagtgcagagccacaggagagtggggtcacgtggggacagttcttcccctctccctaccctgtgctgtatgaactatatccatcacctcttttagctctcatgccaccatggtggttggtatgttcccattccacatatgagtaaatgtagacccatgagggttaagggaatggcccaaagtcacatggctaagatgcagaaccagaacttgaatgcaggcccggcttccctaaggctagtgcctgccaccagattatagccatgaatcttgcataacctgggtgaaacgcttttccaaactctatttcaaaattatgagttggcctaaaatatgactcccacagcatgctaatcttgtaattactattcatttatgaccactctccattgcatttgcaactgaaagctttattatgcattagtgtgtttcggttccacaaatatttatgtttccattccacaggtaagaataggtacccaagaaattcttttccccattttaaaatggagagttgctcctttatgaaagcattcctttcagtgaatccatttattcaactgcccattgattcaaaagcatttactgagtgtaaaaggcatacacgttatatgcatgatatgcaaaatcagcactgctctgggttttggagatacagcagtaatcaggacagataaggttcctgctaaaatcaaacttaggttctagcagaggagacagacagtaaataagtaaataaataaataagatggttcaggtaagaggtgctatgaagaaagtaaaacaggatggcctggggatgtaataagaggtaacatctgaactgatacctgttacctgctgactgaaaagaagtcagccatataaagattaggtgaaagaaagttctaggcagaagggggtcaggtgcagtggctcatgtctgtaattccagcattttgggaagctgaggtgggaggttacttgaagccaggagttcaagacctgcctgggcaacatagtgggaccctttctctacaaaaaataaaaattagctgggcatggtggtgcatgcctgcagccccagctattcaggaggctgaaacaagaggatggcttgagccaggagtttgaggctgcagtgagctatgatcacaccaccgcactccagcctgggtgatagagtgagaccctgtctcaaaaaaagaaagaaaaaaagagaaaagaaaagaaagttctagacagaaggaacaacaagtacaaagcccctgaggtaggaatgggaatggtcacagccagtgttaatgggacctagacagttcaaagggaagcaggggaagatagggaggctgacccataacaggcctcagaggcccatggaggaggcttagcttttatcctagtggcatgtggagaaccaggcatgaaaacacatatcatgaatcgccaacaagtgccgtaggaatcgatgcttttttattgttttttttttttttattgttgttgttgttttttgagacagaagtctctctctgttgcccaagccggagtgcagtggtgggatctcggcccactgcaacccctgcctcctgggttcaagcaatcctcctgtctcagcctcctgagtagctggagaaccacatccccaaaacttagaaatcagattgccttcagaattaaaccactgaagcccacgtgccgttgatgcaattagtcacctgttggttctggagtaagtccccaaagagctgtggagcatcctaaactaatcaaggtggccttggaagcagggccagtattagtatgtagaaagtggcagtaccagcatttgaacccagttcagcctgactccacaatcccaagtcttgtccactccagcctctcagtagcttccataaagcttagacacatagcacacataaagataacatggagaactgttgccagcattgaacagaaagcacattcttgtgtggcattttgcttatggcacaatcggggtgggtacatggaaggcagccatggagtaggccattcaaacctggtgaaacaagaagtttaagtgtttctcttatttcagatcaaacccagaaggcaaattttcattaactaacaactaaaggcatctgttacggctgggtgcagtggcacactcctgtaatcccagcactttgggaggtcgaggtgggtagattacttgaggtcaggagtttgagaccagcctggccaacatggtgaaaccccatctctaccaaaaatacaaaaattagccaggcatggtggcgtaatcccagctactcaggaggctgagacatgaggattgcttgaacccaggaggcaggagttgcagtgggctgagatcccaccactgcactccagcctgggcaacagaaggagacttcagcctcaaacaaaacaaaacaaaacaaaacaaaaacatagcatctattcttacagcatttgttggtgattcacgatatgtgtttttatgtgtggttctcctgcaagccccatgagaaagaagggctacaaacttgcattcctaacacaccacttgcttcatcttgccatgctcttgccctctgctagcactgtccacctggaaaactcgtccccacccttccagattcagctcaagtgtcagctcccataagatgtcttcctgaccatctctacccacttttaggccaaatcaatcacttctaagcacatctttttgatcaactcatcacactggatgcatctggtggcttaaatgtctgccccttcctaaagtgagcaaatgaagagcagggattacatcactcactgaggaattgctggtgcccatcatagcacttaacacatagtaggcatttactgaatgcttattgaggagcccgctgctggctgagtaaggttttcttgctactgctgataaatggcaaagctgagacccacatccaagccttagaccacatttttcggccatgagaaatggctatataaaagtagctaggtcaggacaaaggtgatggagacatcagacagacaataatttggggtggagggaagtgatgcagagaggaggatggatcaaaggagttgcaatgaaacctgacacagcagggaaaaaaggatggggccggatggggcaggacatggcagaaaacggggtggaagtgagccagaggtgaattacctgaggttccttacgtgggatgctggagaaatgaggacactgcctgctgcatggctaggctgagcaggggatgtgggcacactgaggaagttttcttcacatattcatcttgggttgtcagtgggatcccaggtcaccaggaggacctgtggttcaatgctccatttagaggtatgtttaacttctgataattacagccaggaaggtgacagttaccccttgctaaggtggacgaggagaaatgagagcttccaacagctccagaaaaggtcttttacaaatcacaaatcctcaccctttaggcatcaacatggcttctgaagcactactgggaggttaccttgtgcaatttctggagatgcactactccctctctttccaaatacccacaggctgccttgactgagtgcagaactgccctctttgaagaaagcaggtggggagggaggaacactatggaaagagcatgaactcctgagggagactggcctgggttccaatcctgattccaccctcttgagctgagtgactaggggccagctctactgtccagtcaaggacacctcagcaatgtcacaggcatatgaagactgggagaaggcatctgcgatgtctaaacacaacataccatcaatttctagaatatacaaggaactccagaaagccaatcagaaaaggacaggaaactcaatttaaaaaatggcaaagcatatgaataggcaattcatggaagggagaatccaagtgggtaacagcgtatgaagagaccttcaaatgtactagtaattcaaaaacccaaactaaacacaacaaaatactaataaactcccacaggtaaatattaataatgcctgtgttggtgagcagggtgcaaagattcctgtttcttcgtgtcctgctggtgggagttcaaatggattcagccgttctggaaaacagtctgcagtatatagtatttcttctttgtgacccagaaagctcactcccagatgtaaatccctgggggcgggggcattgatgaagaaatgtgttcaagtattgtttctcttagcaaggactgaaagcaacccaagtgctttagactaggggtgaggataagaagaggttatggggggatgtgaaacaccattgaaacaccacgcagtcattggaagcagtggcctgaaagtacaaggttgtggggacattggacataccataccgaatgaaaacgaacccagtcagtagcagatgatattattattcccgtctataggaggaaataggtattcacatttagcacactagcccatgcactgtggagatttaataaatgctggttctctcccccttgtgcattccaacctctgccccttcttcattccctccccacgcttcctgagtggcatcccaagctctccaggtagtttaagcattgctgtggaaggtgagggagaggtgttaagtaattctggggcaaccttaactagagaaagagttttaaaaatcagagtgaatgaatccttgtcctgaattcccagagcctcatgaaggaggcagtgtggaggtatgggccggaagctattatcacctccattttaaagagatgcatttaagtaacttgcccctaagatactcactaataaattgtagaatcgttgttaaaattcaggcagtttgaattcagagcccactctcccttttttttgtttatttgcagattttatttcatgtctgtgtgtgtatgtgtgtgttgaaatctttcaaatatacagaaatgtacagagactaataaaatgaatacacttcgcccatcacccagcactctccagtgctttgccatttaaccacaaatcagtttcattctcagtagtgtctaattgttccatttgtcttttttttttcttggtctgtcttgctaaagaattctttatcttttgttttctgatttagttgctcttttctattgtctctttattttctattttgttaatttcccttctgctactttctttgaatttactcttttgttctttttcttacttcttgatttgagttcttctttaccaatataaatatttacagctatacatttcctctcagaattgttttagccatttcccactcattttgaaattcattcaaatatataatttccgctaagatttcttctttgattaattatttcgaagaatttttaaaatttcagacttatgggggattagttatcttttaattattgatttctgattgaattgctttgcggtcagagacatatatgatattgggggtttttcttgtagttagagatgtttatgatattgggattttaaaaattagttgacatttgctacatgattaatttttgcaaatgttcacatgtacctgaaaagtatatgtactctttaaaaattgttaagagtcaggattttatataaatgctttagatcaggggttagcaaatgtgctatagtcaagactttcagctttgcaggccatacagtctctgtcatggctactcaacctgccattgtaaagcaaaagcagccatagacaatagccatagaaaataaggaaataaatgaatggggatgtatttcaataaaactttattgacaaaaacaggtggtgggctggaactggcccaccacctgttagatcaagctttttacttgtgttgataaaatattccatatcccccatacattttttgtctatttactctgtcagttgtagagagagttatgtttaaatccccctttataaaaacgtatctgtccatttctacttctcattctgccaatttttgctttatttattttgaagttatgttattaggtacaaacaaggtcagaattgttacgcttcatgaacccctcttatctctatgcagtgatctgttttatccccagaatgaccataggtccctgtttgcctgagatagtcctagttaacacatgctgttctcacaggtcttattaatagcacctcttatattaatacatgttgtccccatagactttactaatagcatctcttttaactctgaaaagagtcctcatttgaacaactgattacatggtcacttttaaaaaatatccttaatgttctctgttctccaaggataatgtagttatttcagctttcttttggtagtgtatgtctgagaaatagccatccatttaaatccaaatgttttaaataattgttttatatttacctgtcccttgaattttctactgtcttttaggtaacagtcctgtggtcactaagacacaacatacaatatcaattttaaagtgtctagtcctagatattaatccattaaaatgttagctccacgaaggaggatatttttatgtattttgctcacggctaaatccccagtgtcaaccaatacctagcacagagtaggaactcaaatatttattgcatgaatgaacacttgaatcttcaattcaaagtaagaaatcctttatctctacataggcaagttgcaagtggttcctaccctccctagctagcacctgtgacaggtgggaacttggggtcagggaaggaaggtacagtgtgctgattttcccctttcccctcttgccctcagattatgaagcagggctccaagctcctgaggggctggagcccagagaaggaaaggaagcagagccgtaaagctcttaggtggctgctgactgataggtgactccagcttcagagactccccagttgtggtctggctgcaaatcccctggggtagaggctgtattctatccctccagctttcccacctctcagccccagaggtcctcatcaccggtcctcactccgtcttctcaggcaggtcttagatattagggctcccatctgacttggcataatctgcctctcatcaatcaaatgtaggcatgcatcccttgtcttgctgtagtgggaatggaggcacttctcaaatgccatcctctatttcatcttccatgtgtcaaagaccactcgagctttttgggcctatgtcaagcatcggagcagatatctctcaactgcaggacacaaaaccaggctctctgagtcattctgctgaagggcttcccctactccaccccagccccaaacatactataagttgaactgagagatgaagcaccatctcacctctctccacaatccaaaagtcctcctcacaaaatcctctcttcaaaatactcacccagatccctttttacatattggaaagaagccctacttcccttagttcccaggcactgtctgaatccttcccttagaacaggaactagagagatgggtaatgggtattcatcatttgtccagtctggtcctttggctgcctgagcaaggtgagagaatggggctgggccttgggcagcctctgtctacatcctagtcttcagggtctcacttgctttaattgtgttgatcatgctgcaacaggacattcccttgggtcaggtatacatccagcctacgtggagtgctggcatcaggatgcacaggccattttgatgtgaaggtcctccttcatttatccattgctgcctaacaaaccactccgaaatgcagtgtcttaaaatcatccttttattgctcccaattctgtgggttaggaattaatgtagggctcagtgagggcagcttgtctctgctccatgtgttatggctagggcagtgtgactcaggttggagggtcccagcggggcactgaggctgttgtctgtgtggccactctctctcttcatgtgatctctcatcctccagggcctctctccctatgttgcctctctccagtaggaaaatctgggtttctttacattgaagttgggttctgaaagaacagtagtataagccacgaggtctcaaaaggtctgggcctagacctggcacagtgtcacttcctccaaatcctatggacaaagtgagtcaaaagccagcccaggttgaagggaatctgcttctggatggaggagcagcatatgcagagatggatgggggaactgttgactgccatccagaaggactgccactgtccttctttgattgatgctcatattccttgctaattgcttagaatttttttcccatccttttcacagggatgaagaaagaataagagtggttagaggttcttctggcctaggtctcaggatgcaagtatctgtcacggaagaagcttcaagaaggcagttctgcattttttcccagtccagctataccatgacagtccccagatttgggggttatcagtgtagtttctcaagctttcctatatttgctttgcatcacacaaaactgcttggtctgggaaggggacctctccatcaactccaagcgtcttcctaccatttgatctgcattgttctggatctgggaaatggctgttgacagctgcagaatgcggcagggacccatccttagtttcagcattcatgttctagtccttgttctttttactaccttttgattatattgtccaattccacccttcatgacgctatggactgaattgtctgccccacaaattcatatgttgaagtcctaactctcaatgtgactttatctagagaaaggctcttaaggaagtaactaagtttcagtgaggccataagggtggggccctaatctgaaagggctatggccttataaaaagaaggagagcaagaaggagatctctatctttttccaccatgtgagtacatagcaagaaggcaaccgtcagcaagccaggaagagagacctcatcagaacccaaccatgccagcgccttggtcttgggcttctggcctgcagaactgtgagaaaataaatttctgttgtttaaaccatgcagtctgtggcatgctgttatgacagcctgagcagactaatatacccaaagactgcattgtatgcttaatctcctcacaagaacaccaagatgcagatacaaaagtccccagctcacagatgaaagaaatgagacccagtcttagttagactgacttgccccaggttgcacagtgagtagcagataagaacccagttcatccagctccaaagcccatgttctgtgccacatgccaagaggctttttggccatctccttgtaatttgcagtttggaaagaaggcggagtccctgacttctccctggctgctggctgtttgctcctggctctgccctctacctcattctacactctccacaggcataagcgatcccagagtggtgacctcaaggggaggggcagggtgcagagaggaattctgcctgggctgcacattccttcccagcctctggggagggcaacaaagaaacccaattagcacaaagtgtgtaggtgggtggggagacagccgcttttgtccttccttctggtgtcactgggggtacacacagcttcgtttctaggcctggatcattccaggagggcactaggactctagcagactcctgtcaatgacacaaaagcactgaaaccaaatattttaaaaatccatttatttctgtcttggcacataaaagtctggttacttgctattttagagtaggcagcagaggcaaataagctggcttgtggactctgataacagaattaagctgtagtggaagcaccattgtgtaggacttttcagtgtttcaagcactttcatactaatctagctttatcttcatgtcagaagtcaggggagtgagtgcttgcatatcatattcccatttcataggtgaggaaatgaagacacagagaatgtaagaaactggtcccaggatacaccaagaatccccccaggccttctcattctgaatgctacactcttttcatccccaaaggctccgtcaccctggagatgcatattgtctttcccccaactgcttcaaatagtcatttccaccatttactttccacagttccttctcttgtttgatcaaaatttcaatctaacattttgaaacttaatacaatctaccattttgcaatttaataataacctagtctagtcagaaaggtaatgcctccttttcagttcaaaacaggatcacacagctaacgttgtaagtggtccggaccccagccctggcatttttccttgtgacccacacaacctcgctgtgcactgacaacctcaacaacccagttaccacttaagaaccctcaaacatccaagctgtttgaacaactggaaaaggtatgtttgtgtctgatctatactgtttttcgtgacaaggtagtccctcctaggaacacaaggaacattaactcacatgaacaggaatcagagttaacatttatatcaccagataccaagccctgttccaagttaaatatatatatatatatatatatatatatatatatatatatatagagagagagagagagagagagagagagagagagaaagagagagagagagagagagagtttatatatagagagagagacagagacagagagagaaagagagacagagagatggagttttgctcttgttgcacaggctggagggcaatggcacttctcagctcactgcaaactccacctcccaggttcaagtgattctcctgccttggcctcccgagtagatgggattacaggtgttacccatgtctgtataagagaccacctgaccaggcttagtgtgagcaacaaggctgtttattcacctgggtgcaggcgggctgagtctgagaaaggagtcagcgaagagtggtgggattatcattggttcttataggtttgggataggcgttggagttacgagcaatttttgcgggtagggggatggaagttacaaagtacattctcaaggcgggaggatgttacaaagtacattcacgagggcggggagggcatattgtcacaagggcagggaagaatgttacaaagtacattcacaaggaccaggaatatcacaaaatacattatcacaagggcgggggaatgtcaccatggcttgaccatggtagggccagcttagaggaccttacaacaggtgctcgccaccacgcccagctaatattttctattttcagtagagatggggtttctactgttggccaggctggtctcgaacccctgatctcaggtgatccacctgacttggcctcccaaagtgttaggattacaggcgtgagccactgcacctggccaaagtgagatatatatatatatattcatttaattctcactatatatattttttgaaacagggtctcactctgtcacccaggttggagtgcggtagtgtgatcacagctcactgtagccttgaccaccccagactcaggtgatccttccacctcaacctcccaagtacctgggactacaggcgtgtgccaccatgcctggctaagttttgtatttttttgtagagacggggtctctccatgttgcccaagctggtctcgaactgctgggctcaagtgatctgcccacttcggcctcccaaagtgctagaattataggggtgagccactgcgtctggggagtctcactatttttgacctgacctcctgggaccccttggccccatgagcaactccacatccctgtagccccaagagagtaatgagtaatgagccatgatgtgaagatgttgcccaaaactgtgcagtgcatgacctgtgcaactggacatggctgccctgctggaattgtcactgttactcccttgctctgacataggactatttgcagtctcctctctcataagtggggccaccctgcttcttttccagaacctgtgagccattagcatgtctattgctcattaaccgatattttgtaaaaggcttatttctcttgtatataggtcactgtcacagaggtaaggggctgagaactgcctgtcactgggagaggctgagtgaggaatttagggtctccaggaaatgggggatcctaaacagcatgcttgattttgcattagtagcagtactcactcagcgcttcaagtgtgcttgcatgggtgtgagatgccctgggtgttttgtttgtttgtttgtttttgagatggagtttttgctcttattgcccaggctggagtgcaatggcacaatctcagctcactgcaacctctgcctcccaggttcaagtgattctcctccctcagcctcccgatgtgaactggacagtctgacttccagtgggggccctcacagacagggcacggcttaggaggaatcccaggctgtgagcattccaaggcccagtggccaggcttttggcatttgaagcaaggaggaggttttgaaggagcccctgggaactgtggcttggatgttctgaaggttttgtatgctggagacgtggttgtgagttgtcttacagttcattcattctataatgaacctgtattgctttaataaaatcagggagaaatgttactgacttcaaaacctgcttgggcaatgtggactggactaatagtgactgagccctgccatgcacttggtacccagctggccaccttaactcactcattcttcaaaggaggacttattactgctgttttacagatgaagaaactgaagctcaaagaggcatggcctcttccccaggtcccatggagcccacattcatctgcttaactctaaagtcccagctctcttctctacctggagctctttgctgcctctatggtagctgaacaggagaaacacccaggaagatggtcaccacgctgccccagagcccaggggaccagggggctgctgacggccataatcagggtattcttcctgaaacaggtaagcgacatgaacctggcccaatggagaggcactttcttgttccaccacaaatctccattaaaatcgccttttccatagtcaccaacagtaccttattgatatccttctggcatcacctaaaacctaaaaacagcctgacagtttttgtgaatcagtttccattcctcatcctcttggctggcttggtgacacctcttccctgctgctgtttgccaactttaccaatttaccatcacctgcaagtgaatgaccctcttatgcctagttctagattagttggattttacattgtttcaaggtatcatagaggttccagggaagatgcctgaggcactgctggggagggggtgggctggggacagtgaggaatgggttgagtcaatcccactttcccctcccccatcctaaccaaagcagctgtttccatctttgggtgaatactgccctttatttgagaagggatccaagtctataggctgataggggggccacagatgtagatcattaataaatatattaaatgctccagtaattaaattattccagtagaaccacatcatagtgaagaacatgaagaagattttttttcaaggctgcacttacaaatcattgatccaaattcactgggcaatttcatcaggacctcccttttccacaggcttcttgggaaaaggatatgggcagggcttggggggcatggggtaaagtagggagagagagtcaatagaggaggaccccagagggacaggaggcagggaagggagggaagagggagaggagaggcagagaagtcagagtccttgtcactcctaggacagctctctggcttcttcacacactgacatcaaagaacacctttgaaaagtgaccattattttatttataatttcccaaccagtgaagaacaagcttctgccagcaggagttcctgggatgatgccgggcttcccctgcaaccccagtatggaagcagtcactctggaccctagtaaaggagctggtgtagttaagagtttagagggtccttgcaaggtcacagccctgggtggccacccagtgtccctgctggacagcaggactccccgctgcccctcacagctgcatcatcatgtctgcaattcgcagatgttcacaatgatctttggaagaaactgccttcctcagagccaagttctaaccacaccagggatttactctccttatttagaactcctaactcacttttttgggaaccgtccaaatggcattagctacttcagttgataaactttgccttttgactgtttccaaaatatgaccccctcctttaaaagatgaatggccttccctggggatttcttagacaagaggttctgaaggcatttctaagagatactttaagccagtggttctccactttggctgactgaatcactgggaccagaaatttatgtatttggtgctgcactcagatggtattaggtacttccctgcacattaggaaaatctgtaagagcttcattgtatagatgaagaaatggaggctgatagtgaacaggtgccttgcccgagaccttagggtgagaagtgccaactcaggctcctcaaatatcatttgtccagccccctgcaccctggccagtctcctaattctccatccagaatccctttcattgtgccagggcttgcacgtagtgcagctctttaaagtctagttcatggcatgttttatctggcatacacaatattttataaaagcccaagtgagtcagctaaaaatcagaatttacagtaaaaatctgtaattctggccaacattgcccaaccctcctgcaaggcagagttcacctgagctggctcaggggtggcctcccttgatggtccaggctctccaggagccacccctctcccaccccacccctatgacccactggcttggcctgcctggccaggccaggcactcacatcagtgacccggcactatatcatgaatggagtggaagcgtcacaggggtattattccatggaaacaatacccacttcgatatggcatgcttactaaaaaagtctttgcttttatctaaagacactgcaatcagacctgacacacatttatagaagtccagatgatgatgacacaccaaaaatatcacattgatgtagtgttttatcactttccaattactttcatgtatatcaatttatttgagttagaaaatccagagaattcatcctgaccttccctctctgtctccaccctacctctgttgcttatcccaggccctgaaaatggcccagatataaatccagaccagcggccattagacagacaaacagaaacctctgtgcatggaagtcattgttctattgcttctcagaaatgcagaattaaggggcggggggaatgtaaccccaacatataataaatacaattataaataaataaattaaataataataaatataacaaaacagcagatgtaaatgacagaagcaagcacatacaaacctagcacatacaaactgataaaaactatgaaatatattcatatacattgaacaaaggtcaaaagtaaatttgaagagtccatataattttagacttgttagccttttttaaaaaaaaatgttgccttcatgttcccagttaaaaaaaaaaagctcaagaattcttaactttctcttataatttcctcacctgtaaagcggaaagatctgtatgtaattttcagaacagtataagcattcaataagtattagttacttttattatcatttgcatgtacaaggcaatctttccaatttccctccttcattttcccagaaaaagctaatcaaatgggtttatcagcttccatgatctctgtgcattgaatgaaggtgaacatattcaggtgtgatgcacttcatgtcaaggtctcattgaccccgtagatttgaatgctgaagtgaccatcatatccatcacagaagaagtatttttgtacaattcatcagctggaagagctacatggaaatacatgtctaactatctctctgtctacttgtgtctccacaaagtcctgcaagctccaagatgggaaatttgcctaattcatttctgccccttcagtgcccatcccataagttggaagtcagtaaatgtcaacaagtatgtgaccaataaatgaatattcaaacaaggcaaaaataagacaggagaaaggtgtttttatgtccttcagtgggagaaacctgcaagcaatacatctttggtgccctgatgacaggctatggtggatgctgcggtactgcccaggtcccctccagcatggagccactcattcttctggctgctgggaatgttgtctgctgacagctcacacttgagtctctcccaggaattctgaagggagctgtgttaccaaggccatacacctttcccaaaagcagtctttatccactgactgatcactcgcacagggacaaagacctggctcctttgccgcaatgtgggacaactctaaagagccatttcagctccagaactctgtagcatggactcaggcccttgttggaattgcatcacagttcaacttttccctctcccccaccctgtgtccctcccaccccagtgaacttcctacacatagatccatcatctctgagtctgtttctgaggaagccaacctgtgacagtgggtaccaggagtaagagctgggaggtgggagtatgttggctcttgctggaagcttcttatccctacgcgttcgtgactcactttattcatggcttgtctcaaatgtactatctcagagatgacttctctggcagtgttgtccaactattcccaaatcattgctagcatatttccccattttgtctcctcctatgcagtcatccacatctgaagtcatcttgttctttttttcttattgttttttctcactctcacatgaggatgtgaactgcagaggacaaataccttgctatactgctcactactatctccagcttctaaacagcacccagcaccatgtaagctcctaagaaatatttattgaatgaatgaatgagaatctgcacacacattcatagtgggaagaactgggctgagagtgggaaaccctcatttccagctctgtttctgccattaaccatctgggtgacctcaggcaagccacctgacttctctgagcctcagttttctcatctgcggaatgagatggtagaatgtgatgatcactagaaattgtgacagctccagcatcctataattttacatggttattcagcttggaattgttctgtctataaactacattctatgggaatcatacagttttttatgctgaaacggagcttcccagagcatttcacaatatccaatgagtatcggctttcagatgccaatttcattattataccaatgctagaaaaactttcatgtgagacgctgcagttaaggatatgttcaacatggggttcatcaaagctttagagcactgtgaaataaccattctcctatttgcataaatatcatgagaactaagtctctttctcaagtcccacgaggtaatgaaaaagtgaacactggttgaggctgcctgtgcaccaggcatgagtctgtgctcatgggaggcagtgaacacctcacctggcctggagcaagcattcaaggaatgctggctcttaacatctgtctcatttaatccaaacaacagtcagtttgaggtgggactcttaaccccaccttggagttaaggacacagaagcactgagatttacctaatctacccaaagtcatcgaactaataagtaagtgatggagccagggttggaatctggacagtcagggtctagagcgttgccatttatccactacactagagctgtctcaattttcttaaaattcagattctgaatcagaatgtttggggtcagcctcgagatctgcatttctaactatttctaggtgatgttgatgcttctagcctatggctcaggctttcagttgtaaaagtacagaagaaggaactcctgctaaaagtcagaaactagcctctggtccagccctggcaaatgctggcaatgagaccatggctaagtgacctctcctcacaggctcactcatgcctgtgatcccagccctttgggaggccaaggtgggaggatcacataagcccaggagttcaagaccagcctgggcaatgtggcaagaccctgtctctacaaaaattttttaaaaaattagccaggcatggtggtgtgcccctatagtcccagctactcgggaggctgaggtgggaggatcacttgagcctagaacacagaggctgcagtgagccaagatcatgccactgcactccagcctggatgacacagtgagacccagtctcaaaaaaacaaaaattactgggtgtgtgtgaaagcactttataaaccagaaaactcaaaagcaaggggacagaaatttgcttatccactcgtctttttccctctaggatgtgagtctttgagccagcacaaagcagtggtgcctggcacatagtagatatttagtaagtgttcaaagtgccaagtactttaaatgttatgtaatttaatcttcacaacaatctctgattcacattttacagataaggaaactgagactgcctaatacaccctcaaactactaaagcagtaaatgctgaagcccagattttaaatgagatctgtctggttccaaaaccaatgctgattttaccctccactcccattattcctcccacataggggtctggctgaggtctaggaatggatccagattttgcttctgcacctgtcacatgggcactgggagtccaactccttcttagaacaaatgagggctctggtctagggacagatcctacaaatgcaagtagaagctcttcattttaggggtgggagaaggcacggaaataattcagctaaaataaacccttcaagtattctgcaatgagaagcaaagtcaaggtcttcctattatcagggcccccaaagccaatccagaatgtacaggttcaacaagttcaaaggagcaaatgcctggaacagtggctctaaaagtggggtccaccagggtctctggatggccctgctgaccaaagtattttgttcttgacattaatttatagctccagcattggtaggaaacttaggggtcatggagtgcagcttcccacacaatgcaaagccacatgagggggctggtttttgaggtcttgagtccactgaccaactcaatttgaggctcaatggcttagagaaggaaaaaaactaaagtaagaggttgatactgttcctatcctagaggcaaggaaacaatgctcagaaaggctaaggaatttagtccaaagcacaaaggcacgaatggtagagataaggcctgaacctagggacaactgactccaaagtctatgccctctcctctgcccctccaggattgtaattaccattataaaagcagcagaatctgagggctcaaggaggagctggacatggctccagagcctctcctgaactctgctggcatcaaacatcatgatggacacaagaagcacgcctgagcccacagtgataaggtccacacacagtggctcctcctttccccaagtcattctgtgggtggtacccagctcatctggataataactaaccacaagctgaccatggtggaaaatccaagatctgataaacacacaaaggaaaatccttcaaagaagctaccgagcctgctcagcgtgggagcctccagcttgtgaaatggcgagggggtagtattgtgacccagacttgaccacctggtgtgaccctagcaaggacctccctcctgctccctgagggctgctttcctacctgtaagaggtgtgaccaggaatccccagcatggtcacagaataagaaaggtcaagaggctggaaagggcctcctgagaccagtgagcccggctccctctgggcctggggctgggtctagcataacacaccctcatttaatcctcctcacaaatgggtcagagaagtatgaagtctttggggacaggaggggtgatggccatctgggtgtctcatcagctccatctctctgcagagaccacggacatcttcattgacacccccattcccccactgtgagtaaaccactctctcaggggaagggggaatatgtccatgccctccccaagaggaccttggcactggtgctgttctgtgggctctgtctggctgccccttaccttatgaaatacaggggtcacagttcagttttcttaacatctagtacattctccagcacaccaagtgttcagtaagtgttggctatgactggataatcatcctataaagggtctgactcaggcagaacactatagctgtaacagctccccaattcttattgaataagacagcgatgtggtggttcctccacaaagcagtgattagaattccaattgtgaggttcatcatttcatccagtatttattgagcacctactcagtgccaggcactatttggggattcagtgatggacaaaacagatataaatccctgacttcatagagcttattttctagtggaagagacagacaaacaaagacacaatacagtatcagttagtaataaatgctctgaaaaaataataaagaaagatgagagaatgaagtgttgggaacactatttgagatgcatggcatgaaaaggccttccaagcagagagaacagcaagtgcaatggccctgaggtgggaatgtgcttggggacaggagagcagtgaccaggaatgatgagctgagaatgaagctggagcagcaggcaggggtttgggccacagtggtcatggcaaggactctagattttattacaaattccacgaagccattgcagggttctgagcacagtggtgaggccatctggtttacatgatctggggaccagaaggactaattcttagcatgtaagctccaaggaaatgtaagtacattaaagaaaccctaagtacatggagagtaacttgtttgaaaatactattgtcttagcctactaggactgtcatcacaaaataccacagactaggtggcttaaacaacagaaatttatttttttcacagctctggaggctacaagtccaagatcaaagtcccagccaattaggtttctggtgagggctctcttcctggcttgcagacagccacctcctcactgcgtcccagcatggcctttcctccgtaagggcatgcaaaggagaaagtgagctctctggtgtctcttcacataaggacatcaatcctattagtgactcttataaccttatttaactcaatatccaaaaggtgctatttccaagtacactcacactgggagttagggcttcaacatattttaaagtaacacgattcagtccatagcgtctagattcctatcaaattagattttacaaaatctgctcttccatggttaacttcagacaaactgatggacaaaaccaatggtgaagtcagagttagtcaacgcagaggaaatggatgtagatcacgctaatattccttagggcagtagctctccgccctgggatgattctgattcagaagtgctgtggtagggcccagggaaagtgcattttaacaagccactttgacagactgatgaacagtggacaaatgcagtgctccctgggcccctctaagaagcagtaccaaagataaaagttaatttcaagtcactatagatagagtattatgcaaataaaagattattttttatgttcctcacactttcaccaaaagaaacagatacccctaacctgccatatgagctccttcttatccacctgatatttgtctttctagattatgtgatttttgtgaacaggacagtccatgaaccctgtggctgctatgtcttcagagattacaggcagctctcagcacctgagctttcgtgcatgttttgagtcccatgatcctctggccatgactaggccaagaatatgtgcacatgccaaagacaatgaccttcaggagagacgtcaaggactccagctgcctcagtcggggcctggctgagccctctgccccgcagacttgccctctggtgaaccagccaatccaagcagactgtccctgctgagcagctgggagtgtgagacccagagagagaagaacaagggaggcatggctgcaggagaaggacaggcagagagcacagctgggtcaggttcagcctgggttagtggctggcatgggaagatgcctggtctccagagctgctgagggtgacaagggacatgctgcagttctccttgggcgtcacagggcaacttccaggatgtttcagaacgtcctcatctccttgatctccttacgagtaatcccatcaacaagacaatctgagcatgttctcagttcccacagcaagagctaagaagcagatcaatgaaactggtcatgtggattcccacactactccaaacttactgggtctcagctcaattctcatttatttctcatgttttccccttgaaggaaattcacaagaatgcaaccagtcctttggagttagttgtggtaggatgcgactggcaaacctaagaggcatcctggcttttctcatttcacccacccatgtctaaacccctagtgagtctgcagtggctctacttccaaagcatccctataacccaacaactctctccatcccattgccaaaactcaaatcatacaactatcttcttgcatgaactattgaagtggcacatcatggtcttttttccactgttgctgctctaaaatccatcccctacacagcagatcatgtccctacttagaaccttctaggagcttcccaataccaatccttaccaaagcctacaagagcctataggattgggccttgcccttctcttcagcttcatctccctccaccctttcaataattcccgcccaatggccttcattttgttcctccaacacaacaagcttattcctgtctcaggaaatttgcacctgctcttcctactgctaggaatactcttcccgacacatctgcacagctgcttccatctcatttggggtttccctcaagggttacctcctcagtgaagccttccctgaatactccagcaaaggcagcccctcagtcaccctgtcctactttttgctctttttattatttttatttttattatttttttgagacagagtttcactcttgttgcccaggcttgagtgcaatggtgcaatctcagctcactgcaacctccgcctcctaggttcaagcgattctcctgcctcagcctcccgagtagctgggattacaggcatgcaccaccacaccccgctaattttatatttatagtaaagaagaggtttcttcatgttggtcaggctggtctccaactcccgacctcaggtgatctgcttgccttggcctcccaaagtgctgggattataagcaagagccaccacgcccggcctgctcttttgtcttcttcataacccctgttagcaccggacattgccctgttcacttacctgttccttgtttaattctatctcctattctaaaatacaagacttacaggcaagcacactggctttcttccccctgaatccctagccctggaacagtgcctggtacccagtaggtacttgatgagtgtcacctgcctgcctggccagtatttattccacatggcaccacctctggggattctggccatctctgtctctcccattgccttctatcttagcaacaatctcaggaaggtggttcctctcagccctgcaggggcccaggctaagcctcagtgcattgcatatggacatctgaatacacctttgctttggaataccatgttccagctctcctttcagtccatgaaaggaacaggaattctgcccctttgacacagatggcccggtgaattccttgtattctttttgtttttcaggacttatatatatattttaattgaacttgttgagataattgtagattcacacagagttgtaaaaaataatacaaagagatctcaggtacttttccctcattttcccccaacggtaacatcttgcaacactatattatatcacaatatcagaatccacataatgtcatcgacagaggcaagattcagagcatttccatcgcacaaggatccctcatactgtgcttttataaccactcccatccctctaggctccaccaggacaaccaaaaagctgtctgttcccccttcctataactgtgtcatttcttcactccttgccttctttccacactttcagaccacatggcattgctgtcaggatgcttggctgcctcatatccgcttgtggtcggcctcggatctggcctccccttccctcctgagccacattgtctcgtccttacccataaatggcaccctgattttttaggacctgctttctaattcatcaagaacatttcagatttatcaccatcctcctagggaggcagcatctccctgtgcaaagaacacaggctttgaatcctactctctacctctccgagcctcagttttctcatctatagaatggagtcaataataccagtatcagggatccatggagaataaatgacacagtgagaggaaggactctgcccagtgtctggcacatagcaggcacatgctaggaagggtaatatgcacaatttaggattacctacgaatctcagtcagtctgcgaaacaacaatagcaactaatcaaaacaccatttcctgatgggattaaaatcagaaagagcatctgatcagagagcagatatcccacagtgttaatagctgacaactggaccaaattatcttctttcaagaagggtgtcaaggatgtcagggggttgggggtccaggaatagatcctcaaaatcttccaattgacaatattcatcaatttgctgtgtgaccttgtcaagtttctctacctctctgaacctccagttcttggtctgccacagggatgccagccttgacctgtgatttcctcaccctatgctacagggtccacagaggagggaaggtggagccctgagaaggtctctggcctccttctcctcccacctccccatccaaagcagcacccacctctgttactggctctacatatcaagagtacaggtgatctttcctttgaagaagagcctctggtggtttcagaacttgcaagaccattgtcccgatgattgctggggttccttctggttctaaagacctgcagtcctaagttctcagctcactctcacgtactgaaaacagacaggactctgcagcagcaactggtctcagctcaagcatcacttcctccaggaagcattctttgacccaggagatgaaggtagggccacctgtgggcacccccaaggcacctcctttctaagttgcccataggaggattccagggatggaactaacaaatcgcagggcccagggcgtgagtactctggagtggggcatgggatgctctgtgtgtgtgactacacatgagtgaggtaaccactcacagcccagattaatggccacgcctggggtccagaggaccccaagtgaaatgcagcctggctggctgtatgtcacagaggatttttcctaatcaaggagggaaacagagtaacggtctaccttgcttagccttgtaagcccccggtgaccaccctggatgcaaatgaccttgcccaaactattaaacattcaaaccctccttctcttattttattctcaggagggtttagagcctcactgtctgccatggttgccactagtcctgtgtgactatttaaatgagatacaatttaaaacccaggtccttagccacactgggcatatttcaagtggcatagtgacagaactgtatcccatcatctcaggaagatcgactgcacagtgctgcctaaactgtttgggaatcctgagcctggctctcgtcgcgcctccttttatgaatcagtttgccaccgtccccgcctctttgtcacttgttcctgaaaaacccggactgggttgaatagtgtccccccaacgttcacatccacccagagcctcaaaatgtgaccttatttggaaatagagtctttgcagatatcattagttaagatgaagtcatattggaatagagtagaccccaaatccaacatgactgtgtcttataaggagaggagagacacatgcatggattcacagagggagaaggccatgtgatgacaacagaggccgagacctgatgacatctctacaagccaaggtcactaaggattgccagcaaccaccagaaattagaagaggcacagaaggatccttccctagagactttggaggaagcatggccctgctgacaccttgatttcagacttctggcctccagaaccatgaaagaataaatttctggtgttttaagccatcagtttgtgctaatttattatggcagccacgagaaattaatacaggaccccatcacgagaccctacattctcatccaactctctccctcaaagacagccaggaccttcaaatcccttggatattaacccctggccagtgacacccacggagcccatcagatcctggccgtgccagccagccagtcactggacgacataaccagaggaagcttggcactggaaggaggccaggcatgctgggctggtgaggctgcctaggaaggagccaggagactcaagtagagcactcaaattccataactttctctccttttaattttaaaacaatatcagaagggttcccagaaagcaacaagccccaggccatccagtcagtggttaaacagtggagcctgatcacttactttattaacttgctaaatcaaagggctgttaaagtctctgtccggtaataaaatgcaggaaggagctgaatcacccacctattagtggcagtattggtgcagttaatgactgtagcctggagggccgtgcagacaacaacaaagccagccctgcgtttccacctacaaaccccaccacttcctctgcccatcccagtgcccccagcacacctgcccacacacacctgtcttcaagaaggctgcatcagaatctgtggtggcttgatttttaaacacacccagaatttctcctgtcaaatacacttccatccaactcttccaggatcccacctccatgaccccaaacaaaaacaaagaaaccaaacatccagaaacgcggtgtttattaaatcaattctttaaacaggcagccaacaccaagttttgacaatgcattacaaacagtgcaaagcctccggagccgaatgctctgtgaatatcagtgcagcactgataagctggaccctgaaccagtatcaccctctgaccacacagagccaggaacagccctatttattttcttcattccaccttctcctgccactttaaaatgggggagaggggaacggcctgtgtgctgttcttccagaagctggtggaaagacatgcccaaaaccgctgacttcgtccatgtagcttatcagcagggccattttgaacaagttatctaagctcagggcctcaatgtcctcacgcgtaagtgatggctccagagggagtgttcttctaagacctggtgaggtaagtgtgcttatgagtttggtacatcataagtactgcattaatattcgttgttggctgggtggggtggctcactcctataatcccagcactttgggaagccgaggcaggtggatcacttgaggtcaggagttcaagaccagtctggccaacatggtgaaatccccccatctctactaaaaatacaaaacttagccaggcgtggtggtgtgcacctgtagtcctagctactcaggaggctgaggcaggagaattgcttgaacccaagaggtggaggttgcagtgagtcgagatcacagcactgcactcagcccgggcaacagagagagactccatctcaaaaaaaaaattcactgttaatgattatgatgaataatgcacctagtatatagtaagcactcaataataacagcaataaagtgctgttattatttctaaagtaacatctaacaaaaccaggctccaagtgccataaaaactcattattaaatctttataacagatgcaactctaaaactatccaaattaaacccttcagaatattcccaggacacccagaaaagattgagcctgaatcccccattggcactaaaaacaggacccacaaaggagcctcgaagtcatgtggagccaggtttggcaactcactccccactgtcccattactggcccctcataaaggcttcctgatttatcactgcagtaggactgaactcttccaccaggaggtttgctccattatgctccattactctggcctcatttgaaagcagcctctggggctttatccatgccaatcaggaggtcttggtggaaagagctccacgtgcccctgagataacagaatgctagcttcccacagctcagacccactgagaatcctgaagaaggagcccagcatgagttcattctccttcccaagagaaaagagagcagaaagaaagaaaaggaagcagcattctttctcatccctcgagatggtgaagctccttttcatttgcttctgagatctgcaaatcaggtggcaattttagctctttttgccccccgcttcttgctagagtatcagaaaggcactaaggccagcagcctctttcttcatcagcaattagatctatggctaggatctgtctacctggcactgacctggggtaacctcagttccaatctctgcagctttccagaaatgaggcttcagtgtggagaaagatttttgtttcaaataaaggcttttcttacgctcaaaagcaatgtaccctggaaattgttgctgggaggacaggaatgcaggatgcaggccctcagctgtgaagtcctcccctccgttccccgttaccaagcacctctacttcctccctaagacctgaggaaacgctaaaagcaggcacaagcagtacacagcaaatccccacatttcacggcatatgcgccttcccagatgactgcatggatacactccataacacattgttaaagtgataattagcgatagacttgttatgaatattccaaatacagtttctctctacaacagttgatggagacaaaggacatcacacgaaatgtaagaagtaacagagggatttttgtgcatatatttttaaaaggtcctgggaaaatagcataaatcagaagttgatttcaacaaattaaacatttcaggacccatttccaatgaaagatgcatgggcatcagtatttcctccgcaatgcttagggaacacgccatcctcccacaaactccagtaaagaatgtgaaacccaattccagaagccactcttctgttgccctgtttcacagcagctaggagtgctaaagacgggtagtttaagaaaaaaaaaaaacagaggaaatgctgaggaataaggaagaaagtaactacagccaacgtgactcaccctttaaaagtaaaagagaaaaggcttctattcatgtttaacatttctccctctaaatgaaatttctggaggccccaactctgcccccacacctttacacacattctgattttttttattatactttaagttttagggtacatgtgcacaatgtgcaggttagttacatatgtatacatgtgccatgttggtgtgctgcacccagtaactcgtcatttaacattaggtatgtctccaaatgctatccctcccccctccgtgtgtggggcctccacaacaggccccagtgtgtgatgttccccttcctgtgtccatgtgttctcattgttcaattccctgatttttaaattcacagtgattttgctccacatgggacaatgttgataccaatgacacactccctcctctcattgcctgcttcaccagggtggatgaaagacttcaggcagccaaactgaggatagtaaagaggggagggagcctctgacaccaaggaacaaaagaaggagacccagccccaccaagtccacctccactgcaaactgagaatcagttcagccaaggggcatggaaaacaacaaccccttcagggctgaaagggagcagcacactaaactaacaaggagaagaacgcaatgaacagtgctgctgcatctcctctgtgaacatcagggattctggacttactcagatagaatgttctattttaaggatgaacctgagctcttctagtccaagagggagacacaagtagcaacacacgttatcatgcacacagagtcctctgcaggcaaaggcgcccttctcctccccagcagtatcgctagacgtcatccgatgccgcttcttaccttaactgctcgcagggtcacagggcttgaaaaccacagtgttggggacagccctagagccatttaagtacacccctttcattttctaagtggggaaactacaaaccatagaggctgaataatgtgctcaattcaaaaggcttgaaaacaagtgccaaggttggtgtaaaatctaggaccttcaagtctcaatcttagtccaccctctacaacaatgttccccgcttttccccttattcagactaaactaacatccaaagcatagaattatcttgaaggagtaacattaaacatcaggatcaaaatataaagaaaggaaaatctaacatctcatatagaataatctcagcactatacctagaacacaccagctgacctgggcttctttgggtcctgagggaggccagccaggggcagaggtcaccaggaacagcctggagaggggagaagagggccgctggaggccttcagggctcaagcttctgccacagggcctttgcactgcctcttccctctgtgggagctccatccctgggcatccacagggctcactccctcacctccttcgcatctatgctcataggccccattctctatgtagcctcccctgacaactcacttgaaaatttcccttgatagtccccatctcttgcaccctacttaagtttttccatggtatttatcactttctaagagactacaatatgtttattctctaccaccttccattttaaataatatccatgaggacaaagagttttggttcactcctctatctcctgggtctacaatagtgtctgacacataataggtgctcagtaaataaatactagtagaatggataaatgagtgctcattccttcactgtctccatcagcaacaaccacctacacacctcctatacacacacacacacgcacacacacacacacacacacacacacacacacacacacgcctctttctgcccttttctctcttcttcacctataccccaggcctgccactaggaacaacagggatagtttaggttaaacttagaacattcagtaataatattgccaagccttccattaaaaactcatgttttatatacatatatggttttataggcacaaaaactctagaaggatacacattaaactgatatcactaggtgtcccagggaactagatggctgggcatgtaaacttttcactctatatgcttttatactatttgaattttgaactatatgaatgtaattacctgtcaagtatgtttaattaaaaataaaattggaggctgggtatggtggctcatacctgtaatcccagcactttgggaggccgaggcaggtggatcacctgaggtcaggagttcaagaccagcctggccaacatggtgaaaccccatctctatgaaaaatacaaaaattagccaggcatggtggttggtgcctgtagtcccaactactctggaggctgaggcaggagaattgcttgaacccgggagacagttgcagtgagccaagattgcgccgctgcattccagcctgggcaacagagtgagactccatctcaaaaagaaataataaataaaaagtaaactggaaaaaccaacgcacgaataacattcattcctcagctctcgtcctcacatcatcttaatacaaatttttcagggtgacggtcactagaatgctgtcagccctggattagatagtgaaatatggtaacattctccttttctctcatcccccaattttctgaaatgtgcatgttacttttacaatgaaatatttgaaaaagtttccattgtgcagaaggatatgaattaatgcaaatttccctacatacataaaacatggagactttgtttcaactcatgaatccatttacctttcattctgttaactcctgttggatttttcatttaatagatttcagaggaagttgtctaagatggtgccaggtcaccagaggtgccaatgcaggacacaggcaatgccgtcaaggttgtatccggtgaggatgaccacaagcaagccaggctcatagcctaaaggatacacctgaacgtgttcgctgtgaggaatgggccagaggattatgtgatgtttcatattttttccttgggactttcagatttttccaagttttctgccctgagatgcattactgaacttctgtttttcctcttactacactgtgaagtaaatgtgtgtgatgagtcactggcctttgccaggctgtgatcttcccaagaatgaagtccctatttaattcatctttgtcttctcagcctcttgcctggtgccttgcaacagcggctcctccatagatgggtaatgaaagaatgaacaaatgactgtttctcagcatccaatgagcactcatgggatatagccacatactaaccccaaagagacaacaccactccctcattcactgcctgctcacctcagtcatcattcatgggtattccctgttccaggcaaggcaacggaagccagagccacccaagtgtggctatataaaggcatccaggaaagggcatatgtggccttcccagcaacctagtctctcatgcatttgggttctgagcagttaatgctggctccatactttgacatctttgtaacttttgcaaattttcttttgattcttttctggggattcatcttaaggaaataattagtcataggaagaggaaactaaaaccacatttattaatgctgtttaggtggagaaaagttggaaacaacctaaacatcaaaccataagagatgaggtaaacaaaggatgctgtagctatgtaaatgagtactcttacattacaattgctgtaaactaagcttgttgctctagaaagttgttcatataagatattaagtgccaacgtgttttatgaaagactatacatgatattgtgacactacacttacattaaaatatatgtgtacatattatatatgtatgatactatatgactaaatgatcatcttgtctttggggtaagtaggatttggaagtagctttttcttctttttatttgtctacacttccaaagtttttgtaacaagcatgtgctgctttgcaataatgaaaaatagcaatgctaacatttaactgaaaaaagaaaagcacaattatcctggagtagggcaggcactaaaaaggcgggagtaagagcgatgagagtagaacgctgagctgaggctggcctccttcacggccaccttcctccaggggtggatccgtgttccagtcacctccaaacacacaaagatgtcagtgccacagaccatactttctctcacacatccagtcaaagcaccaggaggggacagagtcaccacagtgcaagtctcagctgggattgggcaggggagaggagaagggcatcaaggagctgaccaggagacacactgatctggccaggcagcctcttgcagaagtggatcccgttaacaatgaaacagatatgacatgaacttggcaacttctgagaacaggaatgtctagtggtgcttctagcctaaagtgacccagtttcagataagacagtttaatccagaactcagagggagaaaagattaatattttctcctagggaaggatacccagagctaccacagctgaaatgggaataacatgcttaaaggtggatatgagatggccaaagtcccatgaggaatggcctccaggtatgatgatgaaatccagtgcaggagggaaggtctcttctcatagtatccaattgcaaaactggtcaaaattcaaccattttctcagggttattctaaaagctgttggacttgtactgcttctttggcttctctggctcttgttccagcttttgcagttacaaaatgagaaagacctcgctgtgctgtcctccattcagtgggttctggatggattgccagatgatgtgaagggctcttggtcatggctggtacctgcaaacacggagagtgcttatcaccattggactctactgtgccatttccatcatgtcaatcatggatagacatgagataaggaggatggaatcggcagtgggcaggacacaataggaagcgagggaggggagagggcaacagggtggaagggtagagagaattgcaggaagaaggagggacccaggaatggcccaacatcctcagagatgaaagattacagaaagagggcagaaggcgagagcagagaggccatgccagcttgggctggagcagtcagattcctcaccacacccttgtccctgctgtgcccatctgctgccctttctttgccttctggccctgtaggagccatcccagccccacatcccaagccctacctgtgactacccctcccctaagccctaccagagaaatgaacttacttctacccttcgtgggccgcatgcctccagctccagctcttcttggggctccagagtgtgccagtttcccttcaagcaccagtgtcctcaacctctggcatggtattggaatctgtgccttcagaacctcctttcttcccattcttcaggacgtttgtccctcgactggacaagatccagcaggagtgggcaacacaggaacaaatccgagacaccagactgagagggacaggaaggggaaacacggggcagtcctgggtgatctggaccatctggtcacctcattctagttcacgagtggacatttagataagggaaaccaaactgaatcagaactctaaactcagtgtgcagcagggtcaccagattgcttattctatggcacctgagacctttcatcaccactgatcttcacgacagatgcacgcagatatatctaccaaggacttagaaacccaagacagtttcatactttaaaaatgtgtggaaactaaccatgcacaaacttctccaattacatcagtctccccagaagcacatccaacagcactctgtcacaacttctggaagcagcctgcctccttgctaacccctcctccatgcagatgctcacctagaggagtggatgggacataataccaaggaggagagtgtgggtccagtcctagcacaggccaggaacattttctgctttagagtcacaggactgttcaccaagccaagctgaataaacatcttattgcaatatttgcacagacatgcaactacttgctgtgaccatgacagtgactggaatgtaaggatccatcagtggtagacccaaatcttttttttttttttttccaagtcttgccctgtcgcccaggctggagtgcaatggcgcaatctcggctcactgcaacctctgcctcctgggttcaagcaattctcctgcctcaccctcccgagtatctgggactacaggcatgcaccaccatgcccagctaatttttgtatttttagtagacatggggtttcaccatgttggccaggctggtctcaaactcctgaccttgggatccacccaccttggcctcctaaagtgctgggattacaggcatgagacaccacgcctggccggtagacccaaatcttaaagcacatactctactctagtggttcctaaactttagcatgcatcagaatcatttgtagactttgttaaaacacagagttttggttacactcctacggttttttaatcagtaggtctggggtggaggctgacagctagagtttctaacaagttcccaagcccagctattgctggtccagagaccacactttgagaaccactggtctaccaccaacagtgttcaatagtatcacctgtcttatatcaaaggaaccactaatgactcactcgcactcagccctgtaacctcatccaaagcagaggcacagaaaaggccaccacacacacaaagaaaaactgtttacaaaatgtttttattttaaggttaagaataaaaggagccttagggttcatataatctaactacctcacttaatataatattaattaaactaagcttagagagggtaacttgcacacagaaacaatgaaacaatcaatagaacccaaaccaggaaccccagcagcactactctcaaaatcgcaaacgtggagtcctagaaaatctcctaatttttgtcgtcattagagtcacaaggctcaagagtctgcaactggcaaattagggcttccccttctggtcctccatgccgaagcactcaggccatgccatggtcatttcttagtaaggctatgatggaagcaattcttggttccctccaagttcaactgtgagtccactgcctagaactcagaactggttttctcagaaatcccatagcacacgtggagggttcctgggagaactcttcctactaggcaccacattgttgaactgcagtgatgatagcccacaggatctaaccatcatgaagaatataatttcctaaaattccattctgagtttcaacttggacctgtgctggtccctcttcctggaaaactgctgccccagttttctcatgtcaggctccttctgtatgtttcctcttgcagagtatctcctgatcatctacccaagtagttctcactcccctcctgccagttacactgcatctcatcagccttctctacactccttatagccctagaactatataaaacatttgttcatcatctacttgctcattaccccctgaaagtaggatgtgagcttcgagagggcaggaactttacctttctgtctaccactataaccgcagcacctagaacagtgcttgggacacagcagattctctatacatatctgtctaatgaacaaatgaatgtacagaagaatgatgagagagcaccttcttcttcttcttttttttttttttttttttttttttttttttgagacagagtcttgctctgttgccaggctggcgtgtagtggcatgatgttggctcactgcaacatctgcctcctggattcaagcaattctcctgcctcagactcccaagtagctgggtctacaggcacgtgccaccacacctggctaatttttgtatttttagtagagacaaggtttcaccatgttagccaggatggtctcaatctcttgacctcgtgatctgccagcctcggcctcccaaagtgctgggattacaggcgtgaaccatcatgtccagatgagagcaccttctttcaacgtggtttccaaagttggaatttgagactttccttcctgtttctctcattttcaatagtaggagttagactactgagctttaatagaacgtggaaggagaaaaacgtgcccttaggctggtgttctcaatgacaggacagagaagaggaagttgcagggattgggggtggtgtcgatttacttctcagctctggtgtcctttcgcacagaaagcatgctggtgagtcaggtcttcctggatacagggcttgggaggcaatgaggtgtactggaatgagatgtttttgagaccaaagagttgggttcaaaccctcaaaaagtcatgtaaatctctctgagcctcatggggctggtagaaaatacccaagggatagggtgtttgtgaggatcaaggaagttaacatatgtggacactctctgtaaatagtaaaataatataagttgctattaaatgattattgataagaccacataggctctggagagatccaaataggtgaaatttctcggcatgcatctccattcagtcttgctgttttgccttccttagttctaccagcactctcagaccccaggctgctgcgtgggagccccggctcaagagcagaagccctaaggtgctggcatgggctcctcagagccccgtggggctgccagcagccacagcacagccatgagcagggcagccaacaggaagcccaggagaagaccactgtgagaggccacagagggacacagggacaccgtcatcggccctgagccaggggcaggtgtaagaaacaagccggaagccctcacttttggcccaaatgctttggataggccagaatcccagagacaggaatatcagagaagccagcttccctcttatgaccaggccctggcttcttcatgtccttagggtgggttctacactccactcccaaaagcagggcctatacttcttcccttgccaagaaggtggggtggatggtattgggatctttggatggattcccaagattggagaaggtctcctttctcagtcttcatgggctgcactgccaatttctcattgaccaaactttaatgttccaggcaacgaggctcttggctataaggtgtcctcatgttacagaaatcacctcctctgacccagttactcccaaactgtttccactcttccttaagtgataaccttaatgacaagtctcatgcaaacagtaatttcttatcctttcttccaagagttcagttcactccagcaactggctactaactacttacagctgagcacagatttcacgcagaactgtgtaaagttgtccttgggaagacaaacacagcagccagttcctgccaccaagcagcacacagtctgggtgggaacagagacttcacgtccccaccacgaatggctgtgttttagagttcattacctgaaaagaaacagggtgggaggcatgtggggaataaagtgagcaggctggaggaggtcttcttcaagaaaacagagactggcccagctctcttctggctccaaaatgctgtgtttattgggttgtctggatcagaggcaaattcttggatttctgacaatgttgctatgatgtaatgagggctagaatcttcttgaatcaggaaagtttcagggaggttctattagtctgttctcacacggctataaggacatactgagactgggtgatttataaaggaaagaggtttaattgactcgtagttctgcatggctggggaggcctcaggacatttacaatcatggtgaaaggtgaaggggaagcaaggcaccctcttcacaaggtggcaggaaggagaatgaaagcaggaggaactaccaaacaattataaaaccatcagatatttcgagaactcactatcatgagaacagcatgggggaaactgcccccacgattcaatcacctccacctgctctctcctttgacatgtggggattatggggattacaattcaagtgagattttgggtggggacacaggcaaaccatatcagaggtgttatatagtaaggagcttaaaaaacagaaggatttcaacgtgtagaaagggagaggaagggagttccaggctgagaggagtgagtgagggaaagtaggagtgaagagggtacccagaaactggatgatccagcagctttagttcagtggggtttgaggcacttgggaactcaccaaggcgaacctgccacaagctacccagggtctccacctgccaaccttcagcagcggctctaggctgctgatgccagctagagaagcctgtctgtaaatgatgatgaatgtgtgagctcaccaagggagaaggccagaggagctcacacatcgaggagctggctttcaagggatggggaaagaaaggcaccagagaagcagagcgaagacgtggaaaccatagagccttactaagtgtgttcactcacccggctgtacctagggccacctgttgtcctcttggatggaggcagatcggctttctctctccctctctctctccctctctctgtcccacctcctctctctctctctctctcagttctgggctgggacagggaagaacagcaggactctattacttcaggcaaattttgacagatgggccaggacctgcatacagggccacccagcaggcgctggggaagggagcctgctaaggggctgactgcagagccaggcccaggtctgaagggccacgggtgcctggtttcaggttggaaagggtttcaagttgggcagggttggcaatggagcatcccactgaaaacagaagagcctcacccccaccccactgactcctgttcgctcacccctctgagcttctgcccatgccgatccctgtgtctggagcactgctcagggctccctcttggcatattcttgctgcacttttttttttttttttttttttatactctaagttttagggtacatgtgcacattgtgcaggttagttacatatgtatacatgtgccatgctggtgcgctgcacccactaatgtgtcatctagcattaggtatatctcccaatgttatccctcccccctcccccgaccccaccacagtccccagagtgtgatattccccttcctgtgtccacgtgatctcattgttcaattcccacctatgagtgagaatatgcggtgtttggttttttgttcttgcgatagtttactgagaatgatggtttccaatttcatccatgtccctacaaaggatatgaactcatcattttttatggctgcatagtattccatggtgtatatgtgccacattttcttaatccagtctatcattgttggacatttgggttggttccaagtctttgctattgtgaatagtgctgcaataaacatacgtgtgcatgtgtctttatagcagcatgatttatactcatttgggtatatacccagtaatgggatggctgggtcaaatggtatttctagttctagatccctgaggaatcgccacactgacttccacaatggttgaactagtttacagtcccaccaaccgtgtaaaagtgttcctatttctccgcatcctctccagcacctgttgtttcctgactttttaatgattgccattctaactggtgtgagatgatatctcatagtggttttgatttgcatttctctgatggccagtgatgatgagcatttcttcatgtgttttttggctgcataaaaaagcaatggcaacaaaagacaaaattgacaaatgggatctaattaaactaaagagcttctgcacagcaaaagaaactaccatcagagtgaacaggcaacctacaacatgggagaaaattttcgcaacctactcatctgacaaagggctaatatccagaatctacaatgaactcaaacaaatttacaagaaaaaaacaaacaaccccatcaaaaagtgggtgaaggacatgaacagacacttcttgctgcacttttaaaacctgcttccaaactcaccttctccatgaattccctaactcttgaagtcaaaaatcgatcttttcctcccctatacactattctcacaacacttttcatacacaaaaatcagatatggctctatctcccccactggaccatagaactcctcagattagaaacggcactagggtcacaaattcaaatgctcacagagccaggcagataacataaatgggtgaagctgctggtttaggtgacatgggtggtaattgtcttggtgatggccagacaataggagtcactggaagctgtgatgaatcagaggggctggaatgattgattgattgagacagagtcttgctctgtcatacaggctggagtgcagtgatgcaatctcagctcactgcaacctttgcctctcgggttcaagtgatcctcctgcctcaccctcccaagtagctgggactacaggtgcatgccaccaaaggggcctgctgcccctcctgcccatatggagaataccagagcatgggaatgtgacctgtattaccagaactgcaattttcagggagaggccaggtatctgcattcttatatgaaattaccccatctttatgtgtcagcagcaaatccaaatttaagacaccatgttgcaagccaaataaaatgcatctgcagccagatgcaatgaaagcttgttgattgaaaagcaaatgaacaaatgaatgaaggaatagaaaagaaggagcagatgggtgggagggggaaacaggatgggtgcccaagtgtcaagatgccaagcggtgggctgggcacgctcaaggtgaccccgttgccaagctgtcagtgtgaacatcagcacggtcttgcttgttggctaaggggaagagaaaagcctatggccctgtgaacttagcaaccagcttctccaaaaacattacaatcagaagctcttgttgcagccaaaacacaggtgcagaaaacaagcgggcgttcgcacatgcacgtgcacaaggtgtgcagaagttgaaggctcagcatgccacaaattccgcactccctccaagcacaccttatgcctcatgttacagatgtcttgagggaggaagggagggacaatttagcaaattgggaggtgcagcaggggaaaaggagtcatccagccagaattctccccatctctacccagaaactccctctccttgctttgttgacggcgctgaagcttgggggaggcataagtgagcctggtgtgggactgaccctcagcctccaggaacactatcggcaggaacacagcccgtgtgggatgcctggggttgcaaaagaaaagttatttcaggttcaactgagttataatttattttttctaactgatcattactgctgcggctctataaataaccacctagggagtctgcttttctgctcccaaatcctcaaaaagcattgccaggttctctgtggtttctggcctgccaagcacacagcacatttcttttctgtgcagcccttcagggaatccttctgcagtgcatgccaaggaatctgctgagttctgcccaactcagtcctccccttcctgatccaattcctctcctccaaactggccatccagccctcctcccccattccacaagaggcccctctccctggacacaggtggttcccaagccaaggtcccggcttctctctgtttactctgcttccatccaactgcaaccctccatgcttagaagacaagagttatttgtactacagaaatccagctgtggcatcatttgaggtcaagcccaggaagaaaagagggttggtctgatggtatcaccagtaaaatatcaagggtcaataccaccccaggaagggtggctgtggtttacatgaaatcaatttaagtgatttaaagaagaatgtatttcaagtacaactcagtttaaccaagtatagaaaaaaaaaaatcatgttcctgatgatgttctaaaggatgtacgtttaggccctttctaaataacatggggttttctccttaaacagaggaactagacgggaactaatattcatcaagacccactccacaccaagcaattttgtttcattttcacaacatgatgcctatgaggtatgcatcctcatgcccatcttgtagatgggagtcctgagaaaaggacttgctcaaagtcatgcagaaggaaagaggtaggggtgagactcaagcccaagtttttcccctgctacctcctattacctctctaagctagaagactggagtttcaatgtatgtttatttttctaactttcagattacttttgcagctcagaaagcaaggacaacctggatatttcaccacagttccttaacagccatataactctttggagttagcctctccaactagttaactgtgaaatctcaatcaatcaatcaatctctctctctctctctctcaccatttattacgacaatgaccataaaggctatggtcattcaggttgctttaatggtctaaaaatgagagcttatgtatttttgaatagttttaaaaatgatcattcctaacatttacaaaataatggaaaacataagttttacccagtaatcaatgctccacggaaggttaggtggccctgcagatgctaccacagcactctgctctgttgggacaccttttccaccatattggaatggactgtttccttgtctgactctccttctaggccggtgatccccaaagctttttggtcatatgccctaacaataaacatttgagtgtacctgcctatgtgcacatttgtttatttataaattatattcatgccctgtcattcacaaaaatgggaaaaaggatgagatgtgtgtgggtcatcttcctatgtgtctatctacttctcaatcataatttcttcctgccccacaatggaccatctcaccttccatggtctccaacaccgacatcccactttggagaccactctcctaggatatgtgctcatcatccctcatttattcatttcccactgtctccagtaacacctaccctatgctgggtactatgctaggtgctggggatagtgggtgaaccacatggacaaggatcatgttttccatagagcttacaatccagcgggtgaaacagtgtcagataatgtcagagagagaaaacagccacaagaaagtaaaacaagatgatgtgatgttaagtgatggagaatgtctacaggggtaagagggaagtcacgatggaccagaccagcagctcagcaaaggcctctgtgacctgcatgaggagggggtctagtgggagagggggtgcctgggcagacagaatgtcaagtgcaaagcttccgaggcaggaaagaaggccattgtggctggattataatacatcagtaagaagagaggctggagaagctggagaggttggcagctcaggctggagagtcctgaccccactgcttactggctgggtggccttgggtattaatgctatatgctgcccagggttattaaaggaattatgtaaaggattgaaagagtaaatctatgaaacatcaacatcagttagaagaatgcccagcacacagttggcatcaacaaatgactgcccctagggtctgtttacttatttatcattagtctcccctgtggcatggaagctgggcctggccagttttctaccctgccgaaccagagtagctggcaccatgcccagcctatagaaagaactcaatgaaaatttggtaaatgaatgggttttaaaaatgggtaatggctaaggaaaatcagaatttggctaaatattaaaaaatagattttcgtaaacaattttttctaattataaaagtaatgtcatgtcttcaatattttaaacaaaaatggggtcatattctacataccgcttagtacctattttccactccacatgtctgttacaagaggcaggagaatgtaagggtagggatgtgggctctggagacagattgcctggattcacatcctacctccaccactggccacctagagcatctctctgaagttaccaagccaaaggacatttgggatttttaaggctttttaacacatattgccaaatagtctttaagaaataggtgtgagcccatctcctcaaaccttcatctacgctgactgctaacctttagacaatctttgccaatttgttaggggaaagaacaacctttcattgttctaatttgcctttctttaattaccagggatgactaacagtttttcatttgccttgttcctcttgcgaattgcctgttcatgtttaaaaaggaagcccgttttcataattagatgcagcagagtaggtggcctcaaagtgaactccctaccgctgggaagggttgagcagggccaggtggttgcccatcagggaactgggcatctctgtgccttgtggacagcagaactggatgagctctgaagtcctttattacactgggatcatttcactcttgtccagaccagcaaaggtagcaggcaaacctcaaagaaaagatggcttgcggatcaacaactggattctgaagacctccaccaggatttcccaaggtggatttgatgcctaaacatctctcataagcttctgcataaagacaccccagttatatcggagagaagagtcaaatcgacatggttatgcctctagtagctacagcatgccacagtgggggaattccttaaatctcccccttgacaagatggaaaaccttcgtggtcatagatcaaatcctaccacaacaaacatgttcataatcaaggtcagcatagcacaaagactcctaaggtggggccagtggtctgtttatctcaagctataacttttttccctgctttgcatttggctttggtacaagaatttgacataaacaccctcctaaccccactcccctacaggtatttacatagcaattttctcctgagctggtcaaaaccctgctaggacttggagaattccattgtgtttgtagtaagcagacacctggagccagatagctcttagagaataaactattcttggattggaaagggatctgaatgtatctgacgccctccttttgcaaaaattttgcagtgttttcagaggaccttctacattttcactaaggggatatttccccctaatatctccaccattgccattgttggagtttcctgctgggtctggcccccacaggtataatgccagctggaaacagaacactcacatctcttaaattactccactaacgaagaagtcacacgtggaattagaattctggctaattttcctgtgggcacaccttaagcacacaaacctgaaagcagcagagcagcgaaactggcagccaaaataaagcaaaaagaagaacatcttccaggagggaggtggaatcagattgaggcaaagccaggactaggttcttggcaacgtgattaaaatcccgaactacgagggaggagaggccttgctgccagcccctcagcacactcgagccagggcactggaggtgggtggtggttaaaagctgtgtgccattcacagcctatagcactgcctgtgtccgtcagtatgggcagaatggctaatgactccaaataaaactcctacaccatgctccatctggggaccatgttatagctgaatacacaaagtcactttgtagcttgcccgataagtccactttaattcctccaaaataattcatggaggcctgtgagcacactgcaccaggccaagcactagggttataaaaaagaaatgaaaaaagaaaaacctagttgctctactctaagggcttatgatttaaccaaggagatgagattcacaatggtagctggcaatacggtaaatcaaggcacaaagaatccaggagtgtgttctgctagaggcccaagagggcagctggcattttcaggaggatgcaggtcagcctttatgggaaaatggattgagtttaccttgaagggtggggaaattttaggcaggtggctaagaagtgagctggcctctggggatgtggggagactgtgagcgccgcatgagacaggctctgcatcctgcacatgctgcctgcatttccagccctgggaggaggatttgtgcaagggaggcagagatgagagcgttgataggaaggaaggaggccagatttcagagaggtctgaatcccacacagagaagcttgggctttctccaataagctgcagggagcagttggagacttgtgaacagcagattaacataattaaataaaaacttcaagactttagctttttgtggggatgcagactagacgagaggtgatgagaacattagaaagcttttacagtgtagaccaggctggccacggtgttggcaacgggagagaaagaaatagatctggaagataccacaaagcaaatatctaaagggcttggaaacaaatttggccggggggcggatgaaggatgagtcaggggcagttctgaattttaaaacttgggggatgtgaggtggaggtggcatcgtcagacataaagacacaggttcgagcagctttacaagaacttaaaaaggccagaccacccaaaggtggcactgactggaagcacgaggctacggacaatgcttcctcatttcaaaggggagttaacaagttaagtgaagttttatccaccaatgaaatggctgtctgtccaaacaaataagcaacaagtgtgggctctgcactcctctccacctctcttgctccttccgttgatgctcccctaacatttatctgaccataagctaagagcagtcatgagaacaagatagaaatcctcagaaatccagaactctaatccttccttctgctgaaatactgtagggcttagttattttcacacttatgcatatgcttcagtgtgtaagaactgagtcattgttttcttttctcctcccctctcccctctctttccctcctctttgccacccagcacctcctctgcctccacccccaagccactgcaaacatcctggcatgcatctctccccatccatttctgcatggctgtcaacatttcccattccctccaagcttgcctcctgcctcctatttctttagacacactgggagtctaagaaatgaactacagattcaacaggactgtggaccacagatcttgacaaagacaggcagcttgttgtgaaaagagaattggagggcaggtcagagacttaggttttaggagtcaggcaagggaatcagataaagatccctgaaaacaagggatatcatcactgcccagctttactgacgtagagacaagttttctcacttggcagatatagacggaagataagcaggttccctttcagatggtaaccccaagtgcagtggctcacagctgcagttattctgaatggcagcgggagggaaggaaacaatgaatgcacacacacacaagagcaatgcttaaggtgaaatggacttgaacagtctcaaatgcacacctcctccagttcctggaaggcaaggatgagtcaaacagaagttgaatttcacaggcgttcctcctccactgtcacatacgttcccagacgcagagtcatctgtgcacatgtcacccagcatcgactgctaccagcaactgcctcctgggaagttaagctgcagggtcagatctgcttctgctggggagctgaaagtaaactgcgtaaggtgggggtgatcccagtaatgtgagggcaggaaaaagcagagaacgctggaaaaggatggcaggaattaacatggctctgaagagaggagccaaggatcacctgatctgtagagcctggaatctgcagttatttctagtttcctagacaaccctgactaaactaggaagacatctgaactccggctcaaaaataatataggttcttggaatgggacaaaagaagaaaggaaaggggaggtgataccatgtgccagttcagggagtggggaccagaccttcagagaaaggaaggtcttcccaaatggaagctgaaatcccagtgggcattatgctttctgtacttttgcatttgtagccaagagcatgattctaattctggttctccagcggaggtgcgggcagcacatgtgcatgagttcgtcaaaattgatctaacggcacacataagatctgtacatttcactgtatgtaaattagatcctagtaattctacctctctcaattagttggttgtgtgaccttggacaagtcatttaaatttttgtagtccaggattctccatctgtcaagctgaagctaagaagctggcctctaagtttctccctggctctaaaatttacgattgtgagagctgattattgcaggaaatgagcaaatacatccagattaagaagggccgcaactattgatagaagctaagaagaatttctgaatgggattagccatctgcagaaaattccccctaaatcatccatcctggaatcagacgtggagagaggtgaagattccatcctctgcaccaaaaggaagtggcagcccctcctggctctgcattttcccctccttcccatccgctctcccctacagactctctaaattcttccactggagattccccaagggctcaggattgggacaggccttttcttcccttccttccaaatttcctttgggtttatagcaccctggtcgggttcacaggaagggaaaggagagggaagaaaccattcacatttgggtgtgcgtagcaagcagagagctggagggttacagaaacttagaggaggtcagagccagacaatcatctccccatcctatgtcttatggataagaaaatgaagatgcagaaaactagtgtgacttctcaccatttctaaagccccggaaagaacagatcaaggaggcagctgtggccatcttcaggctggttctttcacatagagatgctcctacttactccataaatagtttgtcatgggcaactttcagacagaggagctggaactaccctaaccgggcactggaacatgtgtaagtagaccacctggctcacctgtttctcttctcagaggggctctgagtcatgaggagaacctctggatatgcagaatggataaactgcttctgtcaggatggaaaggaattcacagatgtcttgccagcagctaaccagtgacacagctgaatggtagcaggcccatggaaacactctggataagaaagactatcaaaggagcatcaggtccagattgcaaattgctttagcagctaacataggcataaagacagaacgacccactctaatccaagggggttacgcttcagcgctggctgcctctgactctcacccttgacccagcccattcatcagtatgttgataagcagattctcttcacagagctccttaatctggtttcccagggaggtcttgcagagattaatgagagcactgtgcttcctgccagtttttgaggctgggacagttaaacagcaagggtgaaggagcttgtcataaagtacacaaaccatcccatcattggacttgaccccattaggtggttaactcaaacatcttctcaatgtagacacttggatctattttttttattcactctctccttggtagccagcaaaattaaagcccttcctcatatcatcgttcacgccatcttttataatagtcacagccacaacagcagctggggctaaacaaagattaggagcaataaggatcagatgggacagacaggagatctggtcctaccaaggggcatcaccaatgagctggacccactgtgcagcccacctgtcaaatgccatttgccacctctggcggtgatagcaggggcagctggggctgaatccatgaatcctgaggtctcacagaagtacagccacccctgtcatctagcccctcccctcagaatatgctctggggagctgtcacatcccacactgcaggctgatggaagacacagacacactcttgggtcctggcattatcgctgtttcctctggttacctttaaagaagggcgtctctgagtgctgggtcctccactggaaataatgtggggaaactggatgagctctgcagagatgagaattattttgaagcaaagtaagaaatgaccagggaactctagattggaatacagcttgtgaattcctaggtaggtgtagactcaagagtttataggaacttatatttgctgttattttttaaaagtcttaaaagttaaaatttacagcaatagcaagaaggaggacaaagtgcaacagctttaactatgagctaataccaaggttaacactatctgtccattacacgtagctttgggatttggcaaaaaggaaaaaaaaccacataacacggagctttgagctcataaataggtcccaaagacttgacaaataaactaacaaggcttttatggtagaagggagcatcgaaatctgaggccttctgtgccttctctccccgctgctgtgatggcagctggcaactgggccctactgtccattaacaaaacagagagacggataactatccagccgaggccagcttcctcacaccaggcagatccacagtggactctcaggaatcttcagcaccctttacaccagcagtggtcaaagtggggggtgcagctgccttgggactgagagatggggatggacacatctgcagggaggggtcaggctctagcccctttccccaggccaccactcctcagaggctggtcctccaccccagcttcagggacaggggatgcatggtggaaaccactgcagctgctgcattagcaaccttcaagagccaaagattctcttctctctagccagagagggaaggcaaacaggttagggtgacctgcagctcagggtcggccccaggccaggccactgcctgtactgactcctgggcctctatgcagtgcactccactttctagggcaggctgcttgccaaggattcacagtggacctggctgctccctgtgggactcactggatctggacccaggaccaagcctgcttgccaggagcagaaggtcaggttggtttaaaaaggtaacctctgtcctttcccagttccgttcctttctcttccccagctacctcctcctcttctccaaatcagccttctcttggctcagtttctgaccttgggtattttccccaaggaacacatccgaccatcaggcactcaaaggagcatgagcctagtcttttcctcaagcaaatcaccccggtacagtcagcagctgcagagcacagggagctcctggcatgctaaaggtcatttacagatcactgaaaaatctggacaagatgctaatgtcccagctcaatgcccatgtcctgacttaaaccttgactgtgtcttaaggacactcaacgtcaggatacctatgacagaaagagggacttctgagtatttcaggcataacaggcaaaacagacatctttaaagcttgcaaaatatatgattctgtcattcctctgcatcctcaccaccaccatgatggagagccagggccagtctttccaatcatcactcaagcttccagtggctattgggcactctccctcttagagaggggacactccagcaggaactccaggtagagagctgttctgcagtgggcatttctagctcagggccagcctccgagactctccaggagtggcatgaaatgaggtggatggggcttccttgtcctggccatcatgtgcctacagcaggcattggcaagctttttctataaagggccagaaagggttatggaccatcttctttgatgtttttattttacaactctttagaaatgtaagaatcatccttagtttgaggtgccatataaaaacaggcggcaggcaaatttggctcacaagcaggctgcagtttgcagaccccctcctagaggaagatgctgaggcctcaccaagcagcccctccccaccttccctctctagcctgactcctccagactcattccagctgcacgtggcacctgtactaggccgcaggatggccttcttgctgcaggcatttcaatgagaaaatatgctgcatggatcatgagtgattctgtctccctcgtgcttaaccttggaagcacaaggccctgctggcctcacctcaaggtctcacctgcccatactcatgcgaccttgtccaccatctctccactacgaggtgccatctggtaaatggcctaacttgggttcttcctcccacgcctcctgtgtaggttcagggcagggagaccaaggtaaatcctgtcagttctatctgaaggcagagcctggatccaatcacttcccacccctccaatgctatcacctagaacacagccacagcctcccatctggactccctgcttcgatctctgccctcccccctccccttccaaaagctcccagaggctttccatctcactcaaaataaaagccaatgtctctgagcagtgaaagccacccaccatggtcatccaggtcctatcactgacctgctgagccccaactggcccgcatggccacctggctggcctcagtgcctcctctttcccctagctgatactaactccagccacactggcctccttcctaccctgcttttcctcttagccatgaacaccatcagtagttatataatagtttgtgggggtttttttttttttggtcttgtttttctcactcaaatataagctctgtcaaatagagtctgacttcagtgttacactccagggcccagtgtcagccttgggtaggtgctctacaaatatacaaatatttggagaatgcatggggacaggatgccctgctgatgggtgagagatggtggcactgtcatgacactgtgtatcaatttgcacttggatacttttatgcaaataagtctcttgctcttaagtcccctcctcccccgccttagtagccagatgaaccgataagacactgaaaacagatacacccctggagacactagtctccaattttttgtttatattcaaccctaaagcaataacaacaaactcatattccaactgaactagtcaattatctcaggggaaaacaacaaacgattgctttatggtttagagcacacctgtgcgtggctctcccgcactcaccacaaccaccctcccatgagcacagcaaggaaagagaaagcatgggcttgctcagcagaggtctgggtttcaaatcctgacactgccatctataggtggtctgattctggacatggtaccaagtacactaggccttagctttaccatctgttaattggggatactaacacttatttcgtaagactgttgtaaggcttaagtgaacaattaaaacaaaacagacacctaaagcataatgactgtgcacattaattgctcaataaataggaatttctccccttttgtaagtgaggaagcaacagttcagaatgtgaaatgatttgcctgagatcagaaggcttgttcccagcaaaggtggggttcaaagcaatggtttctgtggatgtattttttccctagcatccagcctccttcctgttcatgtctacaccctataggctacttatgtcagtagaataaaacaggtgatggctctcccatcgacctgcttgttgaggattttgggacagttccattctaggctaatgctcattactaaagacaatgctcattaataaagacaacgctcttaaggaggtcaccccctcacacggagaaatctgtgtgtcacaagcaagggatcaaaaaagctaagagaattcacctgccctggatatcaactgcccttaagagatgcaaactaaaggtgactgccttcctttccccaagagacaaacggaaaccccactcagtgtgagaagagcacatgccatggaggccccagaccagtcagtgcccagtgaggagatgacagagcctgacgcagctacatctgagatcagatgccaaggacacagcaaagactgatgaagccatacgtgagacaccaaagtacgaaactcacattcaactcaaaggtttccatgtttgatgactgttatctccctgcacagtgtttttctttaaggagcacatgtgttctataatcctataaagtaaatttttgaaaaaaacaaaatgagaaacaaagggacacacagaaactcttgcaggtgacggatatgtgtattaccttgcctgtggtgacagcatcatgggtgtaagcatatgtcccaactcattagactgtacacattaaatctgtacagttttttaatatcaattataacctcaataaagttgaaaaaataaagaaaatttttgtagaacaaaagccttctcccattagctttcatcatgacattgaaatgtgttcctcttgaaacatattggcccctgacattataaaaatataaattattaaggaacaaatcttacaagtaacacgtttggaggacaaacaataaagagatggcctaaacaatgtctaaacagatttgaaacggagcagaatgtgagtgcgtctgactaaaagaggaggcttttctcaagtgtcagtcctgagacaaggaccctgggactgctgacatcccaaacatagtgcccctatgactccaagaagggaaggtgctgcaggggtgacggtccctccccaccccaccatcctcatctggctgatccctgctcatgcctcagaccttagctgaaatatcacttccccaaaaaaagccccccagcactagattgggtgactcattcactcattcactgagtcatccattcaacaagtgattactgaccccctagtatgagtcacattcgacttatcactctctcttttcaacgttgcaattaaataatcacacacacaatactgatttactgtctgtcaccctccctaaactgtcagttccaaaaggacagagattgtatctgatttgtcatttcattcccagcgcctgacacagtacgtgcaacatggtaggcatcctgtccatactggccgggtgaacgtacaaatgaatgaattaaagcatttgaaagctccattcatattctaaaattccaaaatgcaccctgctgtctactttacacagggataattgatgttacaatcaatatgacttttaaatttaacaaacgaaattgttttatttattaatctactagtaagtgaaaacaataagatgtaagacaacaggaagaaagttactctccctgagaggacagaacctgcaggtgttatcctgggactggcagaagcagcatagggtcatcgctgaggggagtgtggatagagtcaggctatctgggttagggtcttgacccctccactgaccagctatgtgactctgggcaagcaacttaacctctctgtcttccagttttcaaatctgtaaattgagaataagaatatcagcttcagataatttcattaacaagtaaatggattacgacacgtgaactgcttagaacagtgcctggcacgtgctaagtactcactaaatgtcagttgtttttattttctggaagaatgggaacaagatgggttaaaaccaaggacttggacatactgtcactaaattcacaaaccactcagaccaaatctccaagatttcctattacaaaatgaagtaattcaaaggcaggtggctggatgggttatctactccaacttccagacttactgctttacctatagaggtgatgatgccttatccatctgaaattaagggccaggtcaaacaaaccctcaaggtttctccaggactggagtctgggatttgattttatacaccccacagtgcccagcacaatgacgaacatgcatttaaagcttagaaaatgttcactgtgttaatttacaatgaataccatttaaagctaaaaaaaaaaaaacccctgcatattctaaagtatattatctagcatatgtgctagccccagaagaataaaatgcagaagtgaacaggagttgcttcatggaactgaaattaattatacacaattatctctgagatctttaaacagtaagtgaacaatgaaaatgtagattcagaattctcctggtaatgaataagatgatgaacatgtttccacagagggtgggatcaggttgatctgctgaaataaccagatagcaggataatttcactatctacgtgaaacattatccaagaatctgtgcgttactcgacaattaaatcagttcaaatgtcttatcaatgatttcatagaacaaccttcaatgagttaacaggaacccgtagataaaagacaagaatagggctacgtcaagaagctcaaaatcctcagctgctgataatgcaaaaccttggccacattgatgagcccaagaccaccagatctctttatactgagtcattttttaaagaaaacttttattttatatgttagttttccttataaaaataagttgtattgaggtataatttatatacagtaaaatgcaaccatttcaagtgaacagtgggttttgacaaatgtatatacccaagtaaccactaccctaatcaagatataaaaacttccataatgccagaaagttccctcatccttgataaaagaaaaacttcagccgaattaaatttaaaggagtttaattgagaaatgaatgactcgcaaatcaggcagcccccagaatcacagcaggttcacaaagactccaatgcagccatgtggtggaagaagatttacagacaaaagaaagggaaatgacatagtacagaaaacggaagtgaggtacagagtggcgggattggttacaagttggcatttgccttatttgaacacagtttgaacacttagcagtttataaatggttgaagtatggccacagggattggccaagacccagctattgttacaggcacatactcctaaatcttgtctacctattaagctaggttgcaattcatccacaagaactcaaatatagaagtacggagtccttctcaggccatatgcagtttgctttaacacactctttctcggttaatccctgctcttatctccctctatcccaccccaaggcaaccatagttttgacattccccctatagattagttttgcctattctaggatttcatgtaaatggaattgtacaatatatatatacttgttgatatctggcttctttcagtctaatgctttgaaaatccatgcatgtttttgcatgtgtcggtagtttgttcctttttattactgaataatatctatttgggtggactgcaagttgcttatccattccccagttgatgggtatttgggctgcttttagtcttggactgttttgaataaagctcttatgaacatccacgtacaagtcttccaccaacatatgtgttcacttctcttgagtaaatacctaggagtaaaatcactgggtcatatgctgtgcatgtttaactttctaggaaaatgccagatttatcctgaataacagaaatgatcaactgatttactattaaaggacttactggattttataaggaaaagaggaaacgagacgaaagaaaatgtagtgcatctgaaagcacatgggggctgctttgctgaaggggctggcaggcggcttcccaggcagggtctgctcaggactgctctagccagatgcctcccctggtgtttacttcacccacaggaaaatggccaccttcaccccaccttcagtggacgtgcagccccttcggtgctcctctcttcatctgccttcagaggtagtcctgattaacctgttgccagcagaattttctaggagagacaggacttgggggtaccactaggccccggggacatgcactcagctggcccaggcaccgataacctagcatgtccttttagaatttgggggatcccggcacccactgttctcagctttgggcctcagctaaggccaggacaagcatcatttaatgtcatgtcatataattagtatggaaactacaaaaacctatatgtttacaaaacaaccactgatctacattatttcagaggtaatgatacttttacatgagataacttcccaagacactaagctgaaattagataaatttaggttttctgtattctcgctgacttgtgtttttcacactggctttatcttggtttctgagggagaatcaattctctttaactctcttccagaatacctcactaccttcagaaaggaagaaggagggaaaaaaggacagagggaaggaggaggattagaattcctcatatcagagaatcccagagctttgaagctttaaagtgaattcaagagtgggattcaagagaccaaaccatggggtctaggggaaataaggaacccctctcccagaaggtggagaagcttctcaaagcaactggcccaggcagccttgtacttgcttcattctggggtcaggaagaagctgcaggccctccttcccaccctcgcttcccttctcctccacactgtcaactctgctccaggaaggggcagtatccccagtgtctgctgggccagcacagccatctctcacccacctgagttcataatgactcctgtgtagagcagacttcccttggcttcactgaaaccattccttcttgtcttagaaagcaatcagaaatatagttaactgccttaaagttcccttatcattgaaatgaactagatcacagaagtgcctatttgcattttttattcttattcactgggtttttaaaaggagccaagagaggggagaggaaatgcatttacttgctgggatttcacttgggatgttcatgttcgtctggaaagcaaaataaaggcatgaagattgcccactgatttcctttcatttggagaattctgcttgagttaggcttagctggctagcacataaacctgtcaagagaaaagtcttcctcttcctgggcctggtatgtctaccacctggggcttcagagacagtattctaggagattcacagtgtctaaggttcgaaatgtggacttcagcagcagggcagctgccaaacgctttcctgcccttgcagaaagccaccaccaaactcaccaccacctccctcaccgtggcctctctgtttcagtatctgagcagcgggtgaggaggactggattctagaagataaagagagactccacggtacagaaagtaagccctcaataggattctattagaaaacagctggaaggaactgtggagtcactcagtcccatggctgattttacagacaataagcaaacaaacaaacagaggccctgagggatttagttagcggtctccaagtgccagtccctgaggaaaggattctcctccccagctacctttcccttctccagtgtgtccacctcaggaaaagggcttgcatcctcccagctgctcacacacaacttgggctggccttggtgctggctctgtcctttctcccaccagatctgccttccgccctcgccacttgtctctgcccagggctcacttggaaggaccacatcaatgaacaaccttggcaggtcacagggagggatggagcgggggagagaacagcaaataggcttctgccctgcaagagagggagagccagaataccagcctggcttgggctgctcccgaaggtcctggctgctgcctgcaatgcagcgccttccttcagggctccagcaccatcccctgtcctcagcctttaaggctctactgctctcagccccagccctgcccttgaggctcccctgtaccctgtctttgtagatggtgcctgggaactgtcccgcttggagagtgctgtttgctaggatacacactgactcccatggctcccctccagctccccatccatcctgctcctggccacggcctctggcctgaagggctgcaaaacagccttccaactgggttcctggcttcccttctggcccctcttcatctgctgtccccagcagcatacagagctatcccatgaaatataagtcagaccatgtcatgccctggcttaaaacctctcaatggtttcctctggcatctccagtaaaaatcagaactccttgctgacttttgagagctgctctagacagggctgctctctgcagcctcctcttgtgccccgagcttcaggacactccagcagctgtggggcctcctttcccttactcatgaccccaggctctgccctgtctctgggcctcacacatgctgtccctgtgcctggcaggtgccccgtcactggtacaggctgtccccacccctctaggagagccttgccttagcagggtacatgccctgcaccttcttctctccacgaatttttattctctatccctggactgtgctcatttctttccaaacacctaacaaatttgtaattatgtgattttttgtttactttttaaatgactctctcccccaccgggatgcaagttccacatgggtacgaactaggtctgtcttgttctccacctgacatacaacagctactctagtcacatctacaaaacagcaactgggtttgggttcctataaagtggacaactctcctttctggggaaggattgcttcataatctgagattatgttccttctactttgttggggagagtgttaagttttttttttttttcttttatgaaaggatagtaagaataaggggtattcatcaaaaatttttaaatgataacctgatataattctccaaaatgtttttaaaatttttgagtctatgatatcccagattaagcaatgttttgggagtcacagtgttgggtcctagagaggcaaagagataggtgaagatagtgacagagaagagaccggctttgcagtcagactgcagggcctgggttcaagtcccaactctgctgcttggtagctgtcaaactctgagcgagttgcttaaactctctgtgccttagtttcctcatctgtaaaataaagataataatagaacctgtttcagaggactttataagaattaagtgaattaatacttgtaaagttaataaaacagtgcctggcctatagacaatgcttgacaaacattactgctatcattattatctattattattattattgctattgttattattactaaacccaggtctcctaaatccccaaccaggactcttttccctttaaaatgttatctcccagcattgtctctttaaatgttatctggccactcttaaatgtaagactgaaattcagcacttggaaaactatcccactccagccaagcacattttttgaatagctaaacactaaccctgataaaatgtatccatttaggatagaaatgtttctacaatatgttacatcttgtctactttctaactgggttttttgagatgagtatcattacagaaattatctgctgtgcagcctggaaacagcaaaaggaaaactcagcacgttctacagacgtgggttcaaagccctgctctgtcctccctccaagccctaaacccctcctgagtttcagtttccttactgaagaagtgggaaggccatgtgcattgagaggttactgtggttttgagtccagtgaatacacacactgctaaatcctaaaactcttctttcttttttggttaataatattaaactcatccaggagaataccttaatttaagactccaggcagaattctcctttccccaagctctgccaacacccaaacccctccccagaagacagcctggttcacacaacagaggaacagacccctcacgactctgcagggggaattcctttctgggagagaacacatgtccaatagggccagtccccactcaggctgctgctgtcactcagccagaaggcaggacaggcttttgaagctgtgatatttctgagtttggttttggacaaaaacaccattcttcctcatagcctttcacaccctgattcaagcaattttaactgaattctatttcccttcaatagaaggctatttgaagatacaaaaaccatatttgtgaatgaattctaggattgtatttgcagagtcactcctgttggatttcgtgctctataccaagtgtatttctacctctgggcctcagaaccatttctcacaccccccaacaatatctcatgccctcatatcccaaatatgcaattacctatcagttgtgaaaggtaaaaataaaattcatatgggtttcataggtcaatggttcatgttaaaggagacccatattaaataatattattaagtagatatttataaggctaagaataaaaggtggggaaatgggtgggattcatcttatctttctaatgttcattacctagaacctggaaaccaaatcaatgaattttctgactacagactcaacaaatatcatttgtttttaatgataatcagataatttaaatcagataatctaaatcaggtaatttagaaatatctgatttctaaactagtcctggactacacttacaaagaaacagcactgctatagagaaaggatgaagacataaattggagacaggaaacaggaccagattcagaacactattcctgcatatgagatttaaagaaatatacatacataattttacaactcctacaaagcctaattttatttgtaaaatataccagggtatcttagcaagtttctttggaaccacgcaactaagagtgctttttaattaattgcacatctagcaatccacaaatacgaattaagcaccatgagttggcactgaggagaatttaggtctgttctcccacagagcaagcaatttgcgaaactttgctctaaaacacataaaaaccctggccttagctaccaattttaaggatgttctattctgcaagggttcatcttcattctctccaaaaggatatgagggtcctgctgtatttcaatggaaccagacccccaaggctcagaaatcaatcatttcacaagaaaaaaagggtaagattatatctaaacatttcattagcataaatctgaatgtgtgatatttggtcattttgtcttagtttacaaccacctttgcaagtgataaaatatagattgatggtggggagagggtaggagaagaaaacaccacactcacatcacgggatctaaattccaccagcaggggtgggagctgaactggcctaacctgaatgtatgtacaaaagaattccttccttcctctctccctcccttccctcctccctcctcctccctctctttctaactccctcccttccttcctctccttcccccctccctccctctcttcctccctcctcctccctctcttcctaactccctacctttcttcctccccttccctctcttcttccctcccttccttcctccccatctcctgccctctcttcttccctccctccctccctcccctccttccttttttttcctacctttcctttccatcaacaagcccaggtgatggcagggataccgcatactccacttgtctcttccacggctggggatggctctatcagcacttgccccatttttaggttttacttcccaggtcatcccagatttataatccatgcataatgcaggcacctaagcacttctgggcccctactagaaatccagaggcgaacaaggcccagtgcctgcctgttctcaagtctccatgcaatgggcaccctagcggaaagaacacactctgagattaatctggcattgcaggggacttgcaggacctgttccaggtgcctgacattatctatctagaagaggtctccctttcagcacagttattgcctacatgaaggtggcctctctcaactgcacaggatgtgccattcgccaaggaatactaggcatccctccatcgtccagacagatctcaagtgagatgctcaatccctataagggttggtttcccctcagtggattacaacactcagatcccaactttccactgcacaggataccttgcagccatttggttttgaatgaccttctcttcccctcttcctgaaaatataagtttccttattgaagccaattaaagccaattctgctttaacatattctggagcacttcacagcatgctttaaattaagcaggaacaccctggtctagtggtactgcctccaaggcagtcctcccttcatctccctgcctccagccaataccctgcttctctgtctcctcagtccacctctgcctgctctgtccctggtttcctccacctagaaaagtgcatccaactgattttaagtacctctgacttaggggtaccacactgtgaaacctctgcttctatttcctcttctataccttgcattgcaagaaaatctaggctttttattcattttttagaaaaattagggaagtcacagcctaggtagttactagaagaaacaggcaaggccaagaaaaatagccaactcacatagagctcttcttaggtgcctagcatggtcttaagtgctttatagatactgaccattaaacctcaccacagtcctatgatgtagatattattagtgtgcccattttacagatcatgagcatgaagcccaaagaggctaattagcttgcctgggatcatcctctcttttttcttttttctgagatgggtctcactctgttgctcaagctggagtgtagtggcgtgatcatagcccactgtagccttcacctctcagtctcaagcgatcctcctacctcagcctcttgagtagctgggaccataggcatgccaccatgcccaagtagagatgggggtctccctatgttgcccaggctggtcccgaactcctaggctcaagcaatgcccccacctcagcctcccgaagtgctgggagattacaggagtgagccaccatgcctggcccatcctcttaataaatggtagggctgagatttgaacctaggggcctgactcaggagtgagtactgcttaccaggaagggaatgtggtcagcatgacaacaaaggcatctctgtcctccttaaatgcagcaccaactctgtaaacacacagcaggagctctagatacaccacgtttgtacacatttactgagtctacatttccatgtcaccttcaggaagagtggattggcttgggtgaggagaaggaagaagagcggagacttccgcccttgagagattctattttaatttttaagaaaacactgaacagaccaagccctggatttcaagatcagttttcgaggtctccagacatgaggcagtcatctgaaaaggaagacatgacagaggagtctgacctctgtgtggcctccttgctctccctgcactgccttcagatctcccagtgaataggaaaggaggggagacctgcatctgtggggcgagcatcccctaatcctgataggcttcaaaaggttgcgaaaggggccacattctctagtactaagacaatggcattaaatctaaatttcttgataaccaaactaaggcataaaggccagttaactatgtctagttctaatataacactctggaacatgccctgtgttatcttagcctagcttcctagaaatactgaatcgcaatattccacaatgcaagttcctcccactaaaggcctctttggagaaaggagttggctgtgacaaaggctgtagtatatagaggatgatcgttatggtggtgatgacaacagtgctgatagattagacaatagcaacaatgaccatgagggcaacgaagaccatgagttgtgcaacatctaatacaggtcaggggtgaatacttttgtgctgactgcttttcaagcattattatgttatatcttcacaacaatgatgagaggtgggtatcagcacaatgccccctttgaagatgaggaggagttagatgagaaaggccaagtctctggggcaagttgccataatttgggtcataacatgaacccaggccaatctgactccaaaatttcacattcttatccactgctcatctctctcttcctattagaaaaccttattatagaaagttctaaaaacgatatgctgattagtcaaattttctggtaaatacatagtaatcagttccaaatactcaattgaaaaaaattgccaaaatgttcatggtccccagtcctgccttagtaaatatagcacactaaatataaatctagttctactttattaatagacacatgatggactatctcccagctatttgccagaacaatctgttcttattgtagagtatttcagatgtaggtacagcattgagaaggaccatacactcagcccagggcatgctctgaaactacggtattaaacattaaaatctttttaaaaatgtgttttattatttgcctttttcttacaaaacttcagtccaaattatttgggttgataagtagaagtttcactgtagtaaactgtaccaatggctgcctgtggtatgtccagagtgtaagagagttgatgagaaacaacaaaagaaacaaacaaaaacttgaaaatataacaaaacttggcataaaaattaaaatgaccagccccctgatcctaaggaaagtccattttctcataggggcagtcagtatatttttatcttgtggcttaatgtttttgtagacacattaaatcataaaaatccaagaaaccatatctcactcccaaaccacacaatgtattttaaggaatatgtcccttttctaagaaactgcttgattttcaggaagtggtaaagtggcaggtgtgttcccatgatcagccagagaaaccaaataaacgttccactgggcaaacctgtttctcacagataaacagctgcgagctgcacgcgggagggaaaaggatcgtaaagactgcccctatgtctgcctgacactttctggttttctgtttcaattgaaaaggaagatggcagcctacaactgagcagaccctactgtggccaggccaatcccagcccctgcatgggacaggagtttcaaaatcccagcactagacagaaggctgtggtcatctctcctctaggtagacctgggaagggataattaaactaggagttgcaggagaagcagatttcccatgaaaaagacatcatcacacaattaatagctaggcttgataggaaggggaaggaatgtccctttttacttacttccaaggcagcctccaccttgcttctcataccacccatcacattggaaacaatcaccagtctgtatcctcagcagactgtgagctcctggaagtcccctgggcacataacaagcactcaatcaatgagaattattgttattacagtgtgtgttcaagaaatatctgttgagtgagtggaacagaggaaggaatgaaataacttgactttccatttggaaagtgtcttgctaaatccttgctgttagagttcaggagttgggataggatttcctatactgccactttggtttgtcatgttgtaagcagggttaaaggcaaatttttaaaaatatgagacagggctgaactggctttctgtctagaaattctagattaaaataagggtctgtctaggagcggggagccagctggctatttaggaggcttggaggttaaagcgaagtctaaatggagtaagagacactattccaaggggtcccctggtcacacagaaaatacaggggcagcattcagactacccaggagtctgcaggacttggtatgaaagagcaaaaagaaaaaaatatatagacaacctaggaggtctgaggactcacagacactgactggctggggtgggactggcaggagctgctgggaaggctggggcagcttctcagtggtcctggcagtaaatactatccaggaaaagtgtgccttgcagtgagagagctgctgggaaaacggcctggacaatcagactgcagtgctgtgagctagattgcccttcccctagccaagaggtgtctcccaccacccttcccctaagcagcataagagtgaaacggggtggacagctaatgcccactgacctcctgctatggaccacaggcactctcctgcgaaatgcttgtgaggttggtgacatcaacattacactaatgacaaaactgagcctgagaactgcaactcacctgcaatggtacacctgacagcagaaccagaactttcactgaaggcttacctctccagggccaaaagagaacctgtgaccccacaggatcgagcctgccccctcaatgcctgtcagaggcagcctggtgggtgcagaatgtgatagcaagttgctgttggcacggcctgctcttctgacagctctgcaggttatttctcacaactttgctgccagcttctccctgcctgtcgctgacccctgtcccagagccacctccatctggaaacacccaccccccaactctaaagttgtaaccatacatacttaagctagaaaatttaaaaggacaaagcagaaaggaattaagaaaaaaatggagtaacctattattttacagagaaataattttaacattttggattaattccttcacatacttttcttttgagatggagtctcactctgtcacccaggctagagcagtgcagtggcgaaatcttggctcactgcaacctctgtctcctgggttcaggtgattctcgtgcctcagcctccctggtagctgggattacaggagcacaccaccatgcctggctaacttttgtatttttagtagagatggggtttcatcacgttggccaggctggtctcgaacacctggtctcaagtgatccacccaccttgacctcccaaagtcttgagattacaggtgtgagccaccacgtcatgagccccctccagtaattttctatgcatttagatgcagatactgtttgcctgtctttaaaatggtgttgcaccagactaactgtttagaggtccacttccctgctcagctgagcactgacacatgcaacctgccacctgggaggatgggcaggcattcccgaaatgccatcatggctgctgctaaccatcccgggattgcaggcaagtgcggctgatgcagaaggacgttggggaatgcggacatcaggggtttgcaaacttgtgtttctccctccactgcccatcctgccagcctcagaaggttagccatggagggtgggccaatcccaacatactcaaaaatttaaaatcctgaagggttagcattggaagggattttagaggctatccagcccaatcccctcacttgcaaatgaggaaagcagagctgagagagatttagcttgtgctgggttctaacagtggctccttgccaacctcaggctcctcctggtctaccgtctgtgcctggactctgctccagcacccccacccacccacccacctgccccacttggcagagggcagcagccagagaaggcaggcccaggtgggggacaagagtctcaggactcacctttcaaatttaaagaatctctcgttaccatcaccataactcttagcccaaccattcctcttcagatccaaggatatctaagtctgactgtggaattttgttgcggaggattggatacagctgtcaaattccaaaggcatccagtacccatgctctccacagagcagtcccttattatacaagctctgcaccagctgagaaccatgttccagtctcatattgctcagaatctcctctgagcttcacataactcaggcacaatctccctgaatcatatggcataggaaagtcatgagcagtaagacttggttcaagaaaaaataccaagttctgaccactcaaagtacccttaggtgctctcattcatgtgagctttccgtttcctgctctccagccccatttcttatttgggttagggatcccctagggctgctcagtggtagggggccactgaattcaaagcaggccactgtactcgaagtagatggctaggaaaaaaaaaagggccagtcacagtggttcatgcctataatcccagcactttgggaggctgaggcaggcagatcacttgaggtcaggagtttgagaccagcctggccaacatggggaaaccctgtctgtactaaaaatataaaaattaactgggcatggtggtgcatgcctgtagttccagctacgcggaggctgaggcatgagaatcacttgaacccaagaggcagggggtgcagtgagctgagatcacctctgcactccagcctgagtgacagagtgagactccgtcaaaaaataaaataaaatccttccttccttcctccttcccttcctccttcccttcctccttcccttccccctcctcttcccctttcccttcccccttcccttccattcccttcctttcctttcattccctccctccctcccttcttccctccttccttcctatttctgagcacttctttcccaggcacaaggtaaacgagctttcaaatatagcacactgaatacccatgataattctataaaatggatcctattcttcccattttaaagatgaagaccccaaggctcagagcagtgaggtgcagatttactgtgatgctaaggaagaaagtttcagggccctgccagcatggacccctttcaaggccctagcaatatattcttagaatcatgtaatttttaaatgaaatttgcagtagtaagatattttaactgcaattgatgaagagcactgtatctttcaactctgatgtctcctcctgatacatttcccctcatgttcatattgaatggtgttacagtagctataggtgttttgggatccagcataagggaaagttaatttggggataaatttagtttgggtgtagtgggatttatgtctattgttcacagtcacgttaatgcaaagtcaagtgattgttagctgtccccatggcttccagtgctaagctttccacaactcaatggctttgagactcaaaggtgcaatacctggcacctgagacataaaaataggggagaaaaaataggattgaaatatacagagcggtccgggtgcggtggctcacacctgtcatcccagcattttgtgacaccgaggcaggcggatcctctgaggtcgggagttcaagaccagcctgaccaacatggagaaaccctgtctctactaaaaatacaacattagttgggtgtggtggcacatgcctgtaatcctagctactcgagaggctgaagcaggagaattgcttgaacctgggaggcggaggttgtggtgagctgagatcgcgccattgcactccagcctgggcaacaagagtgaaactccatttcaaaaaaaaaaaaaaaaaaaaaaaaaagaaggaaaagaaaagaaaaaagaactatacagagccagaagctagagcatagaactttcttccagtctttggacatgtggaattgaaggaaaatttagttttcactgatgcctattcgaaaaagaaagttttctcctatcagaaatgtatttgataatataatgaatacagttataaatataccagacattttccccctttttggtgggaattacacaaaatatattttatcaaaattcctgtattgtaggacccaaacctatggcagtaaaacaaaaaaaagtggatgtctgtgtctgaagccatgttttatgcaatgtaactatcaataataaaaaataaatattgtcagtcatgctagaagaaaagctaaattttctttgcaacctccctttagaaaaattacaaaatcactatcatatgaagaggtgatcaaagtgtattcagccaaaatatattcagggaaaaaagtattatggaggtttcacaggcaaataataaaaatattttgttatttttctggattttataaagtttgtgatacatgtcaggttttaaaaacgtatattgaatgtgatttattttcttattctaaataaatattcaccatggtacctaattttgtatttgtaattttatattctttttcttaaagaggtcccccagttgcttaaacttcaagccctacaaaatctcaacccatccctggaggtgaaataactttcccagccaggaagtggcagacccaggactagagaacttggtccctgactttgggatcccctgaacttcacacatttgtgcccagtcatccatagggcagcctgggctacaagggtcagggtgctagtggagaaggtcaaaggatgatgaatttgtaaactggataccatcactgcagccagcacatgtggcttctacctcacctgagcagacagcaagaggttttctgaagacctgagtatgcaactgacaaatcccgactctgttaaaaccaagtgcccagattaaagataaatagccccaaatccccaaacaatataattgaatctggtttgattcttctgggtgtcacattccctaaacttgcactgtccaaaatggtggtcctggccacatgcggctatttaaattaataaaaatgaaatgaaataaaaaatccagtccttcagttgcagtaaccacgttttaaatacttaatagccacatgtggccagtggtttctgagtcagacagtggagatatagaatgctcccatcacacccccaccccaggctctactgttaagcccagctgaacttttttttttttttttttttgagactgagtctctgtcgcccaggctggagtgcagtggcgtgatctcagctcactgcaagctccgcctcctgggttcacgccattctcctgcctcagcctctcaagtagctgggactacaggcacccaccaccacgcccggctaatttttttttttttttttttttttgtatttttagtagagatggggtttcaacatgttagccaggatggtctcaatctcctgacttcgtaatctgcccaccttggcctcccaaagtgctcggattacaggcatgagccaccacgcccggcctagcccagctgattttaaacagtctttactaagacatatctaagcccttcttctcaagaagagtgtttgcaggtgagtgtggccgatatgtgaggagagaggagaaggaggagaaaggaaggcctatccagagagaagagagggacagcccagctgagaaggggccaaagagggggaaaaaggaaatagaacctaaagtgactgaggtgttaggccttgtagagaataagggcatcatcagatgtgagccaaggaaatgattcagatcacacctgacagaataaggaggataaattagctccagaatcagttatcacatacctcatgtaccccccaacatacacaccatatacctcacaccccccacacacataccacacacacacatgccccccacaccacatacctcacacatgcgcacccccacatacctcatacacataccaaacacacacacaccacatacctcacacatataccacacacacatgcccccataccacatacctcacacacacaccacatacctcacacacataccccacacacgtacaccatatacctcacacaccacatgccacatacacacacaaagaccacacatgccacacacacacacaaagaccacacatgccacacacacaccacataccacatacacacaccacatacctcacacgctacacacacacacacacaccacacaacacatacaccacacacaccacacatacgccacatacctcacacaccaaacacacacaagcaccacacacacaccccccacatacctcacacatcacacacacctccatatacctcacaaacacacatatctcacacacacacacaccacatacaccacacaccccacacctcacacagtcccaccccacatcccctgctacacacaaactcacacactttaaagtgtgctttgcattccaagtctttgctgggaaaccttagttgcagctttacgtggctggaatatcaaaaggcaggagttgtggagtcactgacaataacatcatccaccttctcaatgtccccgacactgccacctcattacccaaaagccactgccattccagacctacgcagagtctgaagggcagcacccccttctccttgggactggagggacaccttgcctcaactctcctgcagggcctgaggttaaactctcctgtattccaccatcaaaggacagcatgggggactctagcccttttaatgggctgccaagagcaaaaattcacgcattctagagtatgaaagcccggcagggtgggccttcatttcccatatgttagtgtgtatcgatggagagggtagggagccctgtggggaatgagggcacccattgtcccctgcagagcagttgtggatggagctcctgtaggaataacggactctgattaccacggtgacactcccaaggtgatggctctggatagggtttgcagtctcctttatactcatcactcccatctaatcctcacaagaaccctgctccccacttaatgaacaaagaagcaggcctagaaaggcaagtggcttgcccggaattaacaataatagtttaaccataataacattgccccatctgctcaccatccaatgaacaactcaagtgacagcacagtggttaagagaacagattctgaaacagatgtacctggttcaaatcctggctcggccaatgactagctttgtgccactgggcatgtgattcaattaccctgtgcctcagtttccttgtctgtaaaatggggatgatgatagtccctacctcatgggttgctgtgtggtttaaataaattttcacatgtaaattacttagaaccaagcctggaatgctcagtcagcactccttaagtgctggctgctttggtgcaggctctgagcacagagacaaccaaacatagcacctgcctccaaggtacttacagcctaaagggagaaacagaaaagtgaacaagagctagggtagaaaagatgctcggggcacaaatgagggacctggaatccaggaagggcctgattcctgggccaagtgacaactgggttgagttctgaagagccacagtacaggcactgtgacagcccttatttatgttttccagcttttattgtagattcatgtgcaggtttgttacctgggattattgtgtgatgctgaggtttgggagatgaatgatccatggccctttttatatagtttgtcatttaatccttggaccattttacaaatgaggagcctgaggctcagagaagttaagcagcttcccccggaaaaccaacttggtaagtggtggagctgggattcaagcccacatttgtctgattccagaatcttactccaagtctgggcaaggcgtgggctggccaggcagctgcctgaagggcaattgtctataaccctggggtcagggggatgagaaatgtgaggcctgttaacccaggtctctgggcaagcttccttatataacctgcacattgtcaacgctccactcaggcagctctcccattccttactacataattattagataatgcataagggagaggtttgaatgactagcctgcctgggaggctgcctctctacggtcctgcttccaccacacgggagccctgaaacgagcaggccagctggagaggtggccaacacattcctcacccagaggctccgggctccccagatggccactgccacctgaccacacagagtcactttgccagaaggactgccctgctttaggcctgatctgatctttttccaggaaactcgtctggtgtaagatttatgtgtccaaacttgccagccttcccctttcaccctggactaacagggacaagaattctaatcaatgtgcaggaacacagaaaaaaaacagggaaacagcaggcaggcccaaccccaaaagccccaaacttatttcccaattttgggttgcacatgtatttctactcacataagacagtttgcatccaactggggggaattttgagtttcaattaaactttgctaaaatacaaaactcatttccccttaactgtgcttcctgacaatgaagtggtggtgtcacggggcagaagggctgatggtgtgggttaccacagcaaggtccatgctgcaaagacgggctgcccctcctgctctgggagtcaacgcttcctgggtccaccaggcccagcatttccacaggctgtcatcggtgtgtccccagcacagcacctagctagatctcagcaaatgatttgaatgtgtggggctccctccaggtaagaaaggaacccctgctcacggcactccccagaagtccttggtaactcactttctctttctgttctgaacatccattcgggctggtttaaagcacagctcgctcaagaggcagccctccagaggagatcggggttaattacgtttactgacagctgtcttctttctcctacagtcacttcttcccatgtcctgatttcattgcttgtgaaaagagatggccttccaatgggaaaaggcaaggagtaaaactcacgagagaaagcgtcctggagattttaaggagaaaggcacatcggttctgccagcacaagagctgcctgtttccctatcagatatcaacactcatttagtgcaagggtgaatatcacctttctattgaaaagaaatagagtaccctaggaaaatagcttgcatcaaaacaagagaaaagtaggttctgaaccagaactaaaatatttggacaccgaagctgtgactactgatgcaaagccattaacccataaaaacaaacattcaaacaagacactgcatagctctctttaaatgagtccaaacaccagagctttatcttaaaacaaataaacaacaacaacaaaaaattcctttccccatcccatctccacccacccactaggagtaaaacatattgctagctctgagacttttctaagaacttggtcagagacactgagcggctggtcaatatatttcttacaaatggggctttgagagcggaactagcagctgggtgccaagaacacagtggctctgctcacatctcacatatgcccagacgctctgaaccacagcctaccactgctgccacaggttcaagttctgaaacccaaagagagcacagagaaggcaggaagagaagaaaaaaagacccagatgttgcaaatcagaataagtgctgagtgaggcagtatcatgacatggcaacgataaatgttgaacgttggctctcctcttgtcagctgacccctctgctctgggacccttcacactgtgactccagttaaatcaaccagctgtgcctccaagaaaggcagcatgggtcagtgtggctgcctggactctgctgctgacagctgcagagagaaactcaaaccagccacatagcctggcccaccttatagtctgaacgtgcccagccaaaaagaagaaaagaaaacagctcaaaaaacagcaaaggctgggtacggtggctcatgcctgtaatcccagaactttgggaggttgaggcgagcagattgcttgagctcaggagttcaagaccagccagggcaacatggtgaaaccctatctctaaaaaaaaaaatgcaaaaattagctaggggtggtggcacacatctgtagtcccagctactcgggaggctgaggcaggaggacagctagtgcccgcaaggttgaggctgtagcgagccatgttcgtgcaactgcactctagcgtgggtgacaaagcaagatctcgtctcaaaaaaaaaaaaaaaaaaaacagaaaagcaaaaaacccacagctgagaagcctctggctcaaacccacatacagaagcttgtcggctgctgtgtgtacacataccagccaccatgatcctggccttctctgaccattggtctgtaaggaaataaggtgataagtgggaactgggctctgaaccctggaactgagaagtcaggctgctgcaaaactctccaggatattaatccctctctctgcccagtggttttcaactgggggcagtttagcccccctagggaacactcatcaatgtctgaagacatttttggttgtcacatctgggggtcagggggttgctatcgctacctagtgggccctggtagaggccaggtttgctactatacctcctacaatgcccaggacagctctcacaacaaggaatcatctggcccaaaatgtcaatggtgccaaggctgagaaaccctgctctagagcctaagagtgctgggctcaaattctaacatcactgctgactagcccaggggcctttgtataacttacttcacctgtcagagcctcaggtttatatatatgtgtgtgtgtatgtgtttgtgtgtgtgtatatagatatacatatatatttatattcatatatacatatttttatatattatatatttatatattaaatatgcatatttatatataatacattatataacatataatatatattatatatgaatatgaaaaaattatatattatatattatatatgaatatgcatatataatatttattttttatatatatatatataaattgtctttctgagacgaagtctcactctgttgcacaggccagagtgcagtggcatgatctcagctcactgcaacctccacctactgggttcaagtgattctcctgcctcaacctcctgagtagctaggattacagacactcgccaccacaccaagtgcagggattacaggcatgagccaccatgcccagcctattttatatatttaacaaaacttatgtagcagtttctaagtaccaggcactattcaaagcagttcatacatattaactcatttaatcttcctaatcaccctatgctgtagtgttaacctgacctccccactttacagatgagaaaactgaggtgaagggaaattaagtaaattgtccaagatgacccagctagtaagaggaggacacaggattcacattcagcaatctggagccacaacctacactcttccattagctcactcacagggctgccttacagatcaaagtttacatttattatctaccttagtctctcctatcaaggtgtgcagcaaatgtggcttctcaaccttcattccatgttaaccttatactgtttacattacccttgaacactgagaccaaggatctcaccacttgctttttctattttccttccatcacccagaatggcaaacattcaaacatttccactcccgaaacatgcagcaacgccagaatgtttatccagaaattcaaaatgagctctagtgaggctggcatgaatatactctaacacaatgttttcaaatatcgtggctcaacaacaatgaccagtgctaaggttgctgcgaatgacatcttaggcctgaaattgctctctgctgtaacccagcactgaaggtgactctggcctttgcatgctggctttgaaaggtcccaagtctgtctacttggaaataaattaaaatgttgtctatatttaacagataaccaggccttactaagcaatctaaaacacatactctagaagcacgctgcaagagctcccttcctggccactttgcagaagagaaactaaccttgcgcagcaagtcaggaccctcccccacaaccaccccccagaaaacacaacagtctcacaagttttagtatggtcgcgtctgtaagcaaaagtaaggaagtcataagataagccccacgctggaaaacttgatccttttatgaaaggatggacaggctcactgattcaggtgagaaagaagcccaagtcctgagaggtgcagctgctgaagaccagggtggccccaagcaggctatgtgcaggctcccctgtcctctacctctcagtgaaggatgtccaggagatcccactcctttccccatgaacccagttcccttccatctgcccactttggtctccctgcacataaactcatctccccctacacactccacgtggtctggccccagccttcattccacccattttagtagactgcttccacaatgggctgttcagatccagggggtccaatgttcatatcagggcttcaaatgacctaacattaccagaggcaaaggtgcttaggttaaccaaaaagcaggaccagactgttggcaacccagtgtgctaatgcaggccacccaggccaatcagaagtactgaccagagaaaggcacatttcagactaaataaatatttatcttttttgaaattacttaaagattgcaatttgtttagaggtgtaactggaccccccgcaggcccaagggaaggctgttctagctaacggtaaggagaggagtagaaggcaaggtggaggagggccttctgaggcaggaagtgaggcatcaggacagggtgtggctgggaacatcccccaggaacacatcaagtgactgataaacatttatttgctttatattaggagaatgagaacacggcctatagaaaactgggagtgctaagggcaaagaaacggcttaaagacagagagactatgtttgagcaaagtgagaaaggccattcattggtaccctcagttattaaaataatatataattcaccgctaatcacggcactgcccggatgaatattaattgaatattatatacaacatattacacactgagtgactcatagttacttctaatgaatatcaatatattttgacacatttaacaacgtggagtggtggagggggtacttctagagccaggcttcctaggtgcgattcccagctctgccacttactagctctgtgacatgtggcgaatccctggacctttctatgcagcagttttccactctgtaaaatgggaataaaaacaatgtctaccacaaagtaaaactctcaatacatagtagcttttgttttttaaaaagcttcaggattcaagttgatgagtgaaatgtatgggcatcaaccagattatgagcattcctcttcttcagaagttagtgctgaattatctggtccttccttaaccactgtgaacttgcgtggtgtccaaagacagaacctttcctgtcaacacatgtggaggcaactgcattaggtgcccggcccactgcttttctgactgccacttggccagagctgaaattctactcaagtctgtgagtgaggcccagctcctttccaagttccttgtaatcccactcaaaaaggcatgctttttacttttcttttctttttttttttttttgagacggagtgtcactctgtggcccaggctagagtgcaatggtgcgatctcgggtcaccgcaacctctgcctcccgggttcaagcgattctcctgcctcagcctcctgagtagctgagaccacaagtgcgtgccaccacacccggctaattttttgtatttttagtagagatagggtttcaccatggtagccaggatagtctcaatctcctgacctcgtgatctgccttccttggtctcccaaagtgctaggattacagttgtgagccactgcgcctggccaaggcatgctttttaatgaactccagttctcctgtctcaaagaggtctatcacatggtctttggaaagaagtggtccctgctgtgacagaggatcctgacagcagtcatggagcgctcgttaaagaaaaaaatgattcaatggcgcttgctaacgaactatagggcaagctttatttagggaaaccaccaagattggtgtagggaccaccacagtggtgttttgcagtcagggagagagattgggatcaactccaaatacaaggaaaagtgggaatgcatagccaacgagaatggtgaaggtcagtggatggaaaattactgcagaaacatcagaggtaaggggggattctggctaaattggcctaacaggattcttgctgaaggcaggcaggttgaacagacatcacctggggcacggtagaggatgatgctatggtctgaatgttggtgtccccctaaaattcttatgttggaacctaataccagtgtgatagaatgaagaggtggagcctataggaagtgatgaggtcatgagggctgggattagtgtcctcataaaaaaggttgaagaaagcgtccctacccctccaccatctgaggacacgtagaaggcatcttttctgaagaacaggccctcgtcaacactgaatctgctggtgccttgaccttggactgcccagccgccagaatagtgagcagtacataaattacccattctaaggtattttgctatagcagcaggaacagcgtaagacagatgaggaacccaatcagatatcaagggtgatcagatattgaggatggaggattctgtctaaactggattcgtgctacagttggacagagacaaacacagaagctcaaaagttgacccctagttgaaaaaaatctcagaagagcctaacgtgtggtcatggagagaatctttgtcaggccccagatcaaggacagcatgtggtgggtgagatccacactcttagggagaggagatgctttgaatgacctaattctttattgctgggagaaggaggacccagggtagaaggaaagacctgagagagagggagagagagagagagagagagagagagagagagagagagagaggtgctgggagaaggaggacccagggtggagggaaagggcagaccagagcctcagagcctgccatccccactggcatcattttgctctcacagggcccctgcactctgcacaataaaggagttgtttaacctcccagcatcctgggggcaggaaatattggtttcatctatttgttgtttgtttcagtcttggtgcatcttggaaccaaagttctcactgtatggacacaaaactaatttaggttcttttaatccaacataagaaaaacttagtttcctctagccaccatcaatcaacacaaagccaacagggcggaagggagggcccttgcttcctggcagtctccctggagggggagggggcaggaagtgatctagaatccagtctcagaagaactgctgacaacaccctcaccaaaacgcatcatcatcttgcactcatctctaagtagtgcctcccacagcctaagagcaaaggctcataacttctatccacagggtttctgccatttaccattacctccctgtcctggctcaggcaaggaccctcagggctgagatgcatcttcaggtcagcctgcccacatgtaaacagatgatacatgcacacgtgcgtgcacacacacccacctctgcatgctggagatacacaggacgtggaataagtcctctctgagaatttacgaaggcacctggctgccatcagcacagagtcatcctctgtctgagttctgaaggtagcagtgtctctgcaggtaggaagagagacaaatggagcttccttccagctgaagcaagtagaggctttgttttctctctagagggttgtaagaatttattgttttggagaaataacataaaatctaagagcgctggttcccaggctagaagacagaccagatctattcattcagcaagcattaaaaattcactgcttaattaatacaccaattgctccctccttgcaaagaggaagaacagttcagccccatgggctggcatctttgccactgaggtctgcacaagatgcggatggtgaacacatgctacggccattttggatgtttccttgtagcatcaatgaggaaagaaaacaaaactgttaaaaataaaacctctgccactatatcctgaattatatcagcaagctcctttttaacaagatgttatgtccaggaaatgtatccatttactgattgttcctgaagaaataacttgttcactaggaaataacttaaaccagaaatgtgggctctcatctgatgtggtttatgcatctctaggtgttttcagtgtctcttgtctatttaatggactcccagaagagtaggatgtctacctaaaaagaaaaattaacgtttatactctcctgatgatgtttatgtggaagaaaacaaacatttgtcaaatgtctgttttttattttatttatttatttatttagagatggagtttcgttcttgttgcccaggctggagtgcaatggtgcaatctcggctcactgcagcctctgctgcccgggtttaagcaattctcctgcctcagcctcccgagtagctgggattacaagtgcccgccactaggtccagctaattttttgtgtttttagtagagacggggtttcaccacgttggccgggctggtcttgaactcctgatgtcagctgattgtcactcatccattatacatcatttaatctgccatgagcttaataagcattatagagtctaatcacctaatgagcacgctcatgaaagtgtcaccttcattgaatcatttaactctcctagtagctctatgaagtactattattaccccccagcttataagataggaaactgaggctctgagaataatctgcccaagatcctgtaagtagtaggtctagaattcaagcccagcctgatctttctccaaatctacattattgtccctgaaccaaaacattctcaggccatgatcttctcccctgtcagcagaatctggagcatctcagggttcatgttgaattacaaagccctgccctaaagcagatttattggaagtccagtgcttgtgagagttattctgaagggaaaaaaaaataaaatacatatatatatctcagaaagccttctctgcccaggccaatgcagccagctccctgcttaagaatagctgcccatgggcagggtttcctggccagcaattcaagatgtgcctgtgccggctttactctttaatctcagtttcctcacctttaaagtgggtcccacaagccctgtcctacagggctgctataaggatttaatgtgatgagaatcctaacatagctaacaaagtgcctggtactgggtggtcagtaaatgacagttattgctgctattacttggtagactcccaaaagttattctcacatccagtggagggaagaggagggagcaatcctcccttgggggtagagtattttgcatcaacaggttttagaatttttggtgcaaggtgagagtcaaaatctaacagacttcgtttattatattattgcttttacgttctcttcagacaacgtacccccttattgcctctccctgggctgggcctctctatcccttccctctccccactccctgtgctcccacctagatctcttccaaatttcccagtagagagggaatagagaggcagtggtggtatctttcaccccacatcccagtggtgatcacagcacttcagggaaaaagaaagcagccttcacacatatgggcctccctaaaaagcttcccaggaaaaaggaaatgtgtgtggaaaggccataactgggaatgaatcatctgttaggaaggctgaaggagagggagaaaggggagtggccggaggtgaggctggagaagtaggcagggcccatcgcctggggtggtgcataccttgggaagaattttcaattatctttagttcagcaagaaattacagacatgattagggcccatgcaaacattctggaagggtcaaggcaggatgtgggggaccggtgaggaatctcctgcagcagtcaagcaatggtggcctggagagggagtggacgtcaggatggataagtggatggattcatgcactcgtccttaggaggaggaatgcacaggacttggtgacagcttaagtgtaacaggtggtggagaggagagggtgaagtccggcttctggcccaagcagcttgggggacagtggtgccccttcctaagacagggtgcatctgaagaggagagactcacaggctgaggaaggggctggggtgtgggttggtcatgcatgtgggaaggtgctgagccgagttatgcgtgtgttgagtcatctaagtggagatgctaagaagggggctgcatttacaatcagttcttccaaagaggggtccagatgagatgcatggaaactaacaccaggggacgtgacaccttcacctaggggaagactacattgtaagaagagaaatcctcagacagagtctagggagctgcgatcctcaatagccaagcagaggggtggtggaggcagcagagaaggctatgcaggagaagcctgaaaagcagagagaaaaccaggagaggctggtgcctcagaagcccagggaagaaaacaagatgcagagttttaaacttcacaaaatgccactcagagggcaagaaagacaaagttaggacaatgtcactggcatttattaagacgcaggtcagaggtgctcttttcaggagcaggtgtggctgggcatgcaagggctgaagcggaggagggaggtgacaccatgcacacagcccaggaggctgcctcactcacaccccacttgcttagccccactcacttagcctatttccttcacagccattatcttaatgtgtgctgtcttgcttctttgtttacttgtgaattgccttcttcccttaaggtctgttagggcgagctccttgtctgctctattcacagctgtaccccagcacctaggaggatgcttgacacagaacagggattcaatacctgttgggtattgaatgaatgaaacagaagcagagtaaagtctggctaagaagtgaggagggggagagctgcaaagcccagaaactacccacaagaatgagccagtggtgaggaggaggggtgggttactgtccctgggaagtgggacccccagtttaagtggaggcttagggcagaatcctggacactaaaaggaatgcttaaaagggaatttgaggcattttctggtctgaaagacatccggcccacattgctttcacttaggtcatgttcccccaaaggaaatcctgagataaggattcctagatgagtgattcattgaagaaatgtccccagagtggtcggtaggagagtggagaagcaggacagaaaggggagaggccaagccaagcatgacctcaggccacatcccagcctcagcctgaccccagggagggtcctggaatgtaaaccgaacctcctgcaagtttgtacacccccaccccccactgccagggcaaggtggctgacctttcatattcccaccctaattaatattggctacagactgtcatggccaggacagaaactcccagccactccaactctcttggcaagagggtaatcctttgaagaaggcgatggggcaaagctttagaaacagaggctacagaagctgcaggatgggcacacagaagtggccgaagtgatccaacgccatctgagcagagcgccggcaatgtctgctactaaattgggatagagttttttatggattaccctggaagagcacaccaaacaaaccacttcattctgagggcctggacggtgcagggatagctaccatttagaatcgtttcagtttctattccggtaaagaatccttcaaagaaagacatcgaggctcttacagtgcagagaggtgctcttcttggacaactatagggtgtgaacgtagcacagctactaaaagtgaatgtgacacaacaattaagagagtatggtgagtatttagaaatacttagaagtcaaagcataaaaaactggataacttgggttacattcctgagacatgtttattattatcacagtactgtgatattgtagaatctggagaaataaaatcaattgaaataaaataaaatacatctaccaactaccatttactgaacacctgctatggatccaactctgtgctagaaatgaagcagcatctcccttgctcaaagctgattttcaggctgggaactagatggggctcctgaagcaattcaagaacaaggcaaaaacagatctatggaggtcacataggatgatgattaagagttgagccaggctcagcaactgcctaggatcactcccatttctgctgccagactctctgtgcctcagtttccccatctgaaaaattgagatactaagagtctttacttcacaagattcctgtgaaggtaacaggaggtgatgtgtgcaaggtccttagtatggtgctgatgaatgcagtgagcactgaggccttgttattctgcaattattactggaggtgaggctagaaaagaccacacttgcccgacttgtcctacctttctctcctcaggagggaccaagacatttatgcctggttatgaggtgacattagaaaagaaatcaaaaagcatctgtccttgtttcttgaagccagatgcaaccaagctaagcctgaaccaagagttgatgggcagctgggtggtgtgctcctctgttgagctggccaggagctaaggctgatggctttctgtccagggagccgtttagactcagagtacacacatgcttgcctcttaaaagagtattgggtcagcaaggatgcactgggaaagccatcagcatctttgcatccctactgaccatttcctgcccagcacactggagccagtgctgaccattttcctttttttttctttttttttttttttgagacagtctctttctgtcacccaggctagagtgcagtgatacaatcttggctcactgcagccacctcctgggttcaagtgactctcatgcctcagcctcctgagtagctgggattacaggcatgtgccaccatgcccagctaatttttacatttttagtagagatggggtattgctacgttgcccaggctaatctcgaactcatggcctcaagtgatctgcctacctcggcctcccaaagtcttgggattacaggcctgagccaccgtgcctggtcctgaccattttctgattggcagcagcaggagggccccagggtcaaacaatgcagtcacacaggcctgtgctttaactgtgcctccccacacagcttggtgaccccgggccagtgactttgacctctgaagcctcaattcccttgactgtaaaagaggtcctgaccttggctgcacattaaaatcactgggggagtgtttaaaagtccaaatacccagggcttgcccagaccaacaaaatcagaaccccctgatgagacctactgctgtaaggtaaaatggtcatcttctactcccagaagtggaattaagggagactatccatggaaggtgcttaccgccatgctttacacagagtgcgccgtaaaaggaggccgtgatatggtaccatttggagttcccagactctagaaacacctcccacaggcccacagaggattgtacttgaaacttcattcattgtactttatgccccactttggtgagtatcaaagatcaattgtgcattttgatttctctagttcttttgatcaccctggtccacaatcatgttattcttcaagagagaaaatggccagacccaggaagtgcttctctggattaagggctgtgaggttaaatctttgtttccatctctgccctcaaggacctccaatcccccatcctaataagagagctgccatccacaagggtccttggcccttggcttgcagaagcgggatgagcatctacaaccctggctgtgatgaaggctgccctgacagttacattcttgatagagttgcaggacaaatatttctgaacctgtggttcctttgccgtgtctctagtcaacatagggcttttagccctgtggaacatgaagatttttgtgaactagggtataaggatttaagagtgtaggtggggcctctctaggccctgcttcctacatagttgatgtgtctggacccacaactgagagaaggaacaaagcaaacaggtgggatcccttatagtttatagttatgtttttcagagtaacagacattcagggaaacagaaacagaactttagctcaagcagcaggagggggcagccagcatctgagctggaagaagagctagcaggtgacaaaggaaacaagcactctccatgcagtgttaaggcagtgcttatcatccagtgggaactggggtgccagggtgccaggcaacagagcagttgatggagacagttccagtgccattatgagctgttaaaaggggatctgacgtgtgcattccagaccctgatactacttcttgtccagtcattcaacaacatagtattccctataggcccagcatgtctgtctatgtatctgatttcacaatcccatgacataggtactgttatcctcactttgcagctgaggagactgaggcacatagaggttaagtaacttgtccaagatcacacagttagtatatgacagagttgggatttgaaccctgtgctcttaatttctatgccaaattgtctctagcttagtgagggtgtcaaacaggtcaacagacaattagaatatagtacagtctaagtgactgctagggactagcacaggtggtggcatccaaaatcccattcttatctgatgctcactcataggaagaaaaacagaagtacccacctggtgacaggctagcaggcacaaggatagacagaatgtgcacctgaaggagttcacctaggagagctgaggaggcacaaagacctgcatgtgagtgttcgtggcagcttcatttacaatagcccaaatctggaaacaatccaaatttctatcaacaggtggatggataaaaaatctgtggtggccaggcgcggtggctcacgcctgtaatcccagcactttaggaggccaaggcaggtggatcatgaggtcaggagtttgagaccagcctgaccaacatggtgaaaccccgtctctactaaaaataggaaaaatcagccaagcgtggtggcatgcacctgtagtccctgtaactcaggaggctgagacaggagaatcacttgaacctgggaggtggaggttgcagtgagctgagatcgcaccactgcactccagcctgggcaacacagcaagactctgtctgaaaaaaaaaaaatcctgtggcatatccagacaatggaataccattcagccacacaaataatgaattgctgatctacacaacatggatgaatctcaaaagcaccatgctaagagaaagaagccagaagcaaaaagggtgcatattttatgattttagctatatgaaattctaggaaaggcaaaactctggttttagaaaacagagttttgcaaggggatgggggtaggagggacgaactaagtgtgacaggcatgaagaaactttacgggatgacgggaatgttctatattttgatggtggtgatggctacactggtgcagatacttgtcaaactcattaaattgtacacttcaaaaggtgaattttattacatgtaaattatactcaatttagaaaatattttaacaagagacttgatgtcatgcagtcaaaagtgaactgtgctatgctctgaagctaacggtgagagttacatacgttctgcttcctttgttttttgttccttgttctttctttccccctttccttttttttttttttctctctctctctctccctcctttctgtctctcctcaaagtctaccacctccttttccaagccaagcctaggtgacaggcccctgagctgcaagtgtttccagcactgccattacaaattagtggaaatgatcagacccccaggcagactggttctcagcctgcttcagaggggcagatgttctgcaaaaccagccagtgacccacagagaagactggcaagcccgcaaggctctcattggacccctctgtggcttctgcctcccaggtagaaagcatgcatatattagatttaaaaagaggaagtgcctttccaaaaactactcggctttgggagggatagaggtcatttgtctttgtccaagaaaaacatgttccttccttgtaatccttgataacccctgaattgttttctccaagatagttagggacaggggtaggggagaggggctacagtaaaagagaaaaggaggtagagaggacagaggaagccaatgccctactactctgcggtagcagcaaggtgagctcttaccaccttgaactctgggaaagatggtaaaagagggaacccttcaccaaccagtgcccacatgactacctaagacagcacccatatgaggtgcaaccatatgaaggttcacttctcgctggatgagaagtgaacagagaggttaacagggcaaagaagcagcagtaatgggaaaagaacgtgagactggcacggttccctcccctgggcctgcgggaggcccatggcagccagaatgtccatctgctgtgccccaccactagtaggctcacaggaagggaagagaacaatgacaacccaactgtcccttgcgcagaagttacaccaagaagtgagcagcaggacccgctggcctggcagtaaaccacatcagagttatcagtcggaaacctcttggacaaagagagtttataaagtcccttggccaagaggcatggaagttgagttcagccaagcgcaactcagacacatgggcaatggaaggggagctggggatgccagctgccatccaagtcctgtttgttggaaattgagagagatagtattggagaactagatgctttcactttatttctccaaaagagagctggtctccaggtggtgaagcctataattctataaaaactggagattggagagataggagggtacaactctggcccaagacagaaataagcaaaaacaaaacaaaacaaaacaaaaaaataggcatccataagagaaaaaagtgagtggttctgggcatctagtaagtggaagaggaaagagaccatctctaatcctaactcactctgttccaggtttggaataaaagctgtatcgggagaaataacctgttaaagtagaattgtcaatgtgtagaactgaaaatcggccaaaaatccatcagctttctcaatttactaagaaagaataattaactccctagtacctgatatacttttgcatttaaaggctaaactacctatatctactcaatatcattcacttctagtaagactcttattggcaggtttaaagcacccctacccaacccactagcaccaacttgtcttttatcttagcctggaaagaacatgtatgggttacattactaagaacatagtatcattgaatgaatcattaaatagaccagtcactgtaataaatacatgtggatatatacattctgttaatagacttggcatagtctttcatggtttcaagtgttaaggtttattgtggtattaaagaaaaccttatagactttcattttctgaacgatagtggattcaatatatagccaactctactgaaaacactaagcaaactggatactatagaaaaactcttttgaaatgactgatgagctggcaagttagtaagacgtattcagtgagcaaaaactaagcaaaatctgaagcctagtataagagccaatccctgaagctagcttgaagacaatagccaacaaagtgaccttcacttttatcttttgtggcctcacgggaagaggagacaggataagaatttcccataacataaaggatactatcacatggatccaggaactccaatgaataccaagtatgagaaataaaaataaatatatacctagatacgctttgtgaaactatagaacaccaaacaatttaaaggaaccagaaggaaaacacagattattctcaaaggagacactcttgtctgtagacaagacagtagattttagaggcaacaatggaaacagaggacagttgaataatatcttcattgtgttggagagaaaataactggcaacctagaattctaccctaattctacccagtaaaaacctctctcaaaaacaaggggaaaaatagtgtatttgcaagcaaacaaaatcaagaagttgtcaccaacagaccctcaataaagaaaattctaaaagctgtacttcaggctctattggaaaataccaaaatgaagttggtagacctacattaatattaatcagaatagacttaaagactaaaagaattactaaggaaacaagttttgcttaattataaaagattcaattcaccagaaagataaaacaattcaaacctataggtacctaataacaaaggctcaaaatatataaaacacaaactgacagaccataagaagaaacagaaaaatctacgatcatagtgggagattataatacttctctcagtaactgattgaacaagcatacaaacatcagtaatgatataaaagacttggacaacacagtgaagaagcttgatctgatagagttacatagaacactgcatctaacaatggtaggatccacagaacattatgaaaagtgaccacataccaagccttacagtaagcttcaataaatttaaaaggctgggtagcactcaaacaatatttgacaaccatgaggcaattaagttagaaattagtaacaaaaagataataagaaaaataaacaaacattcagaggattaaaaagaaacacagctttaagtcataagtcaaagaataaatcatagtgaaaattataaagtactcagaaccaaattatatacaaatattacatatcaaaatttatgaagttagagtaaatattgtatagcttacaatgctcataatggggaaaaaagcctgaaaattaaaaagccaaacacttaccttaaaaagctaagaaagaaaaatagctcaaatgtaaataagttagatggaagaaaataataaaaattagtatagacattcataaactagaaaacaaaagatggagaggatcacaaagtcaaggattagagatagtctctaataacattgagaaaattcttaaaagaccatttaacaaaattatagaaggtattacaaatgaaaagtggacataaccacagatcccacagaacattaaaaaataacagcatcttataagtagcttcaaggtaaaaattttgaaaactcagataatatggataaatttctagaaaaatctaatttaccaatattgatttaagaaaaaaattaaaacctgaatacccatgatctattgaagaaattgaatcagaggttaaaaatcttcaggaaagaaagaactccagcctcacagaatctttttttgagaacagataaagaggaaatattctataacttactttacaaattcagcaaaaccatgatacaaaaccctgccaaggataagataagaagtgcaaattacagtacaacacactcatgaagatagatataaaacttctaaattttattagcaaaaaaacctagcaatgtataagaaatgaacccattacaaccaagtcaggtttattctaggaaagcaaggttaagttaacattggaaaattagtttaccagatattaacaaattaaagaaaaaaattatataaatctcaataaatgcagaggaagtatttaataaacatccatgtatataatttgaaagaaaaaaagctctttgcaaactacagaacaggagtagttccttatcctaataaggaatatcaaatccataaaaactctcattctcaagggaaaacgttgaacatgaaaggcaaagcttaaacgtttagaagaccatacaagaactgtccttaaggatgtcctttaaaagacacaaaatgttcaatgataaaggaaagattgataaattttattacattgaaattaagaatttctgccactgtaaagatactaaaaaagatggtgagaaaaaataacacaaataaggagaaggtattttggcaacacagagaaatagtctcctgcatatataaagaactcctacaaataaataagagagatgtaaactacccaattttcaaataaatgggcaaaaggcttaaagaggtacttcacaaaaaaagaaaatccaaaaggtcaacagcgtatgaaaagatactgaccctctttagtaatcaaatgtatataaattgaaagcagattagatactgttacacatccacaagatgggcaaaagtttttgacaatatcctacaaaatataaagtttttgcaagattagagagcagtaggagaaattgcagctggatatagaaattggttaaacacattggaaattaatttttgattaaagtgaaactcatatgacaccatagaattctgaactatcctagcagcactgaaaatgcccatagtctgtggccagtaattttattactatgtgtattccctaagtaaacttacacacatacttagcagggaacttgaaaaaaaatgtttacagcagcactatttataatagcaaaatactggaaataagctaagtgttcattaataatagaatagacatataaactgccatatattcattcaatggaatattatggttcagcaaaatgaaaaaatttcagctacacccaacaatgtgaatgaatccaggacgaaacatttaacaaccagttggtacagagtccaatcaaatgaagtcccagccctagtgccagagctggtacccaagaccccctgccatgccaggtgtaatccctttagaaaggagtggacttggagaagtaccataggagcacctgggaaagacccaggtaagcagcaatttaccaactgatatggaaatattcccattgtttgtcaaccagtgagccttactggtgtggtgtgcatggactaaacgtgagcattaagaacaaaagaataaaacagtgtgattccatttatatgaagttcacaaacacgcataactagacaatatattgtttagggatacaaatgcaagaggataagacaataaagaaaagcataggggaataaaaggtacagaaatgtccagaagatggtaatccctgagaagagaaggaatgggatagggtggagggaggtacacaggggatgtcaaaggttcaagtaacattctttttctcaaattgactggtgagtacataagtgttagtcataatgttattctttagacctttctacacagtttgtaagcattcgtttgcatctaggggctatttcattaaagttatttcaaaagatggtcacaacacaaatttaataagaaactctcatatcaaattgctgcagttcctgccatatcttttctagttgctgggcaaagatgctctcctcaattgtaattggtgtgctcttaaacccacttaaaattctaagagcttctccccagaccactccaaaacattcttgtgagaatctttccagtgaggtacagcaaggcccaacctccagggcacattatgctctggctcatttatttgatacaatcataatcatagtgggtttttttctcaaactttgaaatcttcaaaatgagggcatggagcaaatgactacattctgcttctcttgctaagatttcaatggtgatgctctcattttaagttctttaccagacgcttcagctgtgctatgcccaattcccctcatcaagatttgctgacagtcaggggaagtttctaacactgtattaagtgtatactgagggccagggaattggggggagtttgaggggctgcacacatgtgcaattttttagcaaacccagcagatgcttgtagattcaacactttttcagttatttgtgaacaacccctaatagccacaccacatggcaatttgtcttttctctggagcacaaatgtgaactgtatgttgcaaagccacagcaaagaacaagtcacttagctagagagggagtcttctcaaagacccagtaaccccatcccaagatgccaccagggaaacagaaactctctggaggtgaaagaaacttaatttccttgagtgcaaattgaaaaggcaaataattggtagcctgtgaatagtcataggaacctcttcactctggaatggaacctgattcaggaggaagtcaagagcctatgcaaatatttctgcatttgcaaacttggggatttgccaagggcttgagatgtatccactgaaaatgtcaagcgtctactgtgtagaattttgatggaggaggatttcaaaattcttcttctatttaaatccaatcaattcatgtttatcagggcatctctgatctttttgtttttaagagacatatttgctctattgtccaggctggagtacagtgatgtgatcatagcccatggcaggctcaaactcctggactcaagagatcctcccgcctctgtctcctgagtagttagaattacaggtgtgagccaccatgtccataattttatttttattttttttaagacagggtcttgctatgtcgcccaggctgatctcaaactcctgggctcaagtgatcctcctgtgtcagcctcctgagcagctggcattacaggcatgagccactgtatccagctcctctgatcttaagatagtttcaacatctaatgctaagcctggaagtccaatgaaagactcaatagactaaaattggtgactgagattcggaggagcatatcgtgtgtttataacactgcttttattttttccatatctttctactatttgtttattagcttttctttggatctcagttattcatacataacacatgtttaaaaagttgatcctaaaccccaattcaagggtccaccgatgctcagagatctcaagatttctgagactagcttccctatacttctccctggctttgctccccaaatctgaaaggcattttcagatcacccctacttcatatttagatataaagcttccccctttatccacaagaattccagctgcacctggcatttcaaaaacacttagtaatgaggaggggagacccatcagtcatgtactcaccacttccattgttgtcctgcctcccaagcacatatttccaactgtgaaacctcccaacagggcagtcctctggatagtgtggttcagtcacttcccaccaccatgcctcacctcctctgccttccaagccctctgggacttcagggaataccttttctccatcatattacaattagatacagggaacctttggagagttctgagtatttgtgattatattcaataacctgttactgacagtttcttttagttaaagaattttttcaagtaagttaccaaaacaatgaatgtatgtacatctagaaactgagaaatactcttccatgacttttagttaggtcctcacgttttccacatatgtattgaatttttaaaatactattttaaaagggtctacatttattttcctctacttttgtttttcctcttgcctttgttttggagcaaattttaactgaacacattgtcagagggtcaggccaagtttggcactgctcgtgtatctcagccaccttccagttttcagcacgatgtctgaactgaaaaaacaccattgcttaccataagggtgtggccatgacagcttgaacaacatccgggtagtggtaagtctacatttgctacacagatgtaagaaacagatagcagtagggtctacctctcctgctccatcttttccatcaccaggtctcttccaactccagaattaaagtcatcaagttggaacaactctaagtgtgtttcctgatcataacaagacaggttgaggttcatgaatattttctttagtattaaatgttagaacataaccactaataataacagtagcatagtagttccctgataaattttgacaaaagatcataaagttctcaatttcaacagcagggctttatagttgtaatataattttgaccagtaagccaccggctatccagaaacctcacaggtgccattatcatggatagttgcagttttttctctaagaatcatgcaaaaaaaaaaaatcttttggggatacttcagaactctgtctttttaaattggatgaacaaaatataattttaacttctatggatacatgtgggtcattgtgagcatcagttactatgttataaaacagagtaccaaagatccatcaaaatacataaaatttcactgaattgcttacattaaatgctcatatcagctttagaattccatgccttgaattcttgtgccttttaaatttttttttagtttttctgttttttactcttacttcttactgatacttgataaaagagctttaataatccttgcacagtacagtatcagttgcttccaatttgctaggtgcatttgacaaactaataaccaagcctcttaaaacttgaagtaaatgcagaggcctgaaagagggtataaaatttcctccaatgatcaaaattcataaactgtagctcatggacttatgacctttctcttgatttgccatctaggtcccaactggataagtgaaattatgtaaatgtgagttccagattgttgtggtattatcctaatacctatcaactacatagcatgttactaaacgtatctcatttttcttctcaagatagttcagtggtcttggtaaggttatgatggttacacctactttacagataaggaagaaaattggtcacgggctttggccaagtctgacccagaatgctagtgctgcctgttgatacagccagtgttttccagccctgcccgcctagtgcatctgcagatttgtaaatacactttgactccacaggaaacaggatggagaacagcatgtcagggactccttgatgggcaggatggagggcaaaaaagagccttaaagacattagggaattcacagagtagggagtgagagacaagttaaatgctatccagttgtcacacagctttcttaatgttatctttcatcaaatcatgtcctagaacctgccaggacttcagactaaatgcatcttcttcttgcctgtacctttcacacactaaatgtctcaacagctcacttggcaaggacccaaaggcagcacacacttctccactccaaggagggtggctgccactaaacacaatgggcggagacagctcaacaatagtgccagttgagcacatcttgatccactgccacagagttcacagtagtagttggccctcaaagcaaacccactggggtgttgagggcaaaaaaacaatcttagccttaaggggccagactttgccatcaaattaacaaatctgcccaacagccccaggctgaggcgctcaggggtgtgacaggagggcccctgttaacaattctgtatcctgtgggtgccttaactagatggagtggagaggaagcagagagctaagtgtcacaccaccctctcctcctgcctgcaggtgtcttagttggacagctgtccaccttccttgcaaaaaactcccacaatctttaaatgcaactatgtaaagggcctccagcctctgcaagccatcacaactttaaagagcatatgtcaaacagctcagacggcatctgaggtctattcttcagccccacagtatagcccaaccccagagcacaagtgacaccctagtggacaggaactcctccctacactggctgctcagcaggaccatgaagaacagctgggacctggcctattaccttggcttcaggattcattttctgcctggaattgggaaactggaggccctgcaggggtccttctcctgggtccaactgtctccagggtgcaagaggggtgaaattaccaaatgaaagttcagataagcaattactggctgaaagagacacaggagggtcttcagatcaacactgacccagagctaataccacactgtcctcagagggacacacgatcactgacctgtattcttcacatttaagttgctagaattattcctccttgcccccactctctccctgcccccagcatacacataattacataaagacgtcttaaacaactgtagcacccaacttcttcagtctgggggagagccaggagatggtggggagctgtttgggcacacgtctgatcattacataatcacacaaacatgggctggagaacactgccatgcagatcagttcagcaaacacctcattctccctctttcctcttccctccccccgtaacacccaaaatgcacaccagagttaacaaaaccgaagcactccaggtagccagtgggcacctggctgctgtggttacaatgccaagggctaccagaaacgtcagcgtataccagaaagagggccagggtgctgctcacccagcgaccagatctgcagaccctcttcctgcaaccactgcccccgaagttcaaggaagggcctagccacagaaatattcctgacctgcaacagaaaccaaaccagctacgttaaaggaaaccaatgccgagcctccaagttcctctgcaccactgccacactcaggagtcctcagcagcctggacaatatcattagggaccattcggcaccatcagtgtttccatttaaaagatagtaaaatgtggggcataacttggaggggacactctctctgctagcagggaggcaagaatcccctatagaataggagtttggtttgggtttggttgggtcaggttgggggttgggaaatgattttgctttaggaatattttcagggggctaggattaagggggaaaaagaaagctatcccctctgtctcagcagccagcatcatacgaatctcactctcaaccaagcaggctactgcagtccgcctaaacaatccggagcagcagccaaggcagcacaagaaaacgccggtgccacggaacgcgatgcctaagccccccagccgaggctcctatggagccggccgccagtgcgcgggtgcagagcccagcagagcctgctgcaagcagcgctggagcgcacggcgcgcatagggttacagccccgccgccgccgccgccgccgccgcctgtgattgacgcgcgggggtcacttgaggctcgcgccgctccccagcaccaggccgagcagcgcgctcagcccaccgggggcactggccgccacgcgcagcccacccggccggcccctgcgtctcggcagccggacaccttgcctaagaaaggcatacacaaaatggaatcgcagctcgctattctgcttcgcggtgcggcctcaggcaaaaacacaatcacaaggtaaaatacagcgcaaggaatccatccgccgaataaaaacccagagtcccctaccttcggccttgggatggcaaactggtcctgtgttctctgacccacggatccagccccttcttcatgaattattccggccaggcaggattttgtgcatttttttcatgaacacctgtttcaagtaaggggtaaagaccttattgaaagaattgtccttaaaaaataacctgtgcatacgtatgtccatccaggcatgcatgcgtgtttgtatacacacatatgcacacggaatagccatgtacattgaagcaccaaactaggcagctggataatgggagagtcggctggttgtgagcatgctcgcgccgggaacagatccaccctctgttattcctctgaataaatataaatcacgatcagaaacccaaacagaagcatccctcttgaattcgtgctgctgaaaaacacggaataaattcagcctgcagacacagaatctaatcagcagctgttttctgaatccagagccaacccatgcctcgcttgtcttttccactaggagtccagaccttttttgaaagggggtttaaccttttaaagacacagtacaccaattatcacttcggaatagctgtcactcccagcgcaggaagccagtcccatgcctaaaggcacagtaggcttgcacacagtgataaggatttcatttattggtgctttttaaaaaacaacatatatgtataatatatgtgcatatatatgcacatatatatgcacacatattatatatatatacgtggagagaaaaaatgcaaatgcaagtcataaatatttattgcactgatgagcttctcagtactaattggcacgttatgtaaacactatgatccttcacttctgaacacccatgttcacgggtcagacgagacagggcactcttgtcagcaagcgtgtcacacctcaccagcctctggctgcagatcaggggccggggagcctcaacagtgcctgaagggagtggggtctctgcacctgagagctcaacacgggcactccttgccctgccctgccttgctctgcagtctcagggtccatgtccacaaatcaaagaatagttctggcactatttctaaagtcgaacataatccagagccacatcgcattccaagacatactttctttcaaccagaatcaggaatcagaactaccacctgaaccttagttagagtctttacgattcagacttaggcccttcttcaagattttgttattgagttctgttgttttgtttttcacttttcttttaagggtcagcatggaggtatggaggtagaaaaacagggtagggggagagacaacctccagcctaaatttttttgaaaaaaattattcttcgagtacttcagccacccagatggtgtttactgcagttttgttctggcttttaaagaggtagcgctgagaagaaacaagagtcctaaccttgctcacgtgtgttaagaaggcaaatgtctttgacagtttctttttcaccccagccccagagctccagcatggcgctgtctgctcctccgctggttcccgcctaagagcagcggcagtggctcacctcgggagctacaggggcgctcctacagccgctccagcatcacagcccattccctcccttgcctagtcctgccaggcaaaccgtgaaaacaagtgcactgtcaccctcccacctcatcacaggcgctcctgtgtggacccctcccagcgacacacacacactctcttccttcccctcttccagggccctttggcagaaaattatcatatttcatgtgtcatcgcccaagcaagctgggtccatcactgattggctgggccctggcagccggaaatgtcaccagccacacagcgtggagctggctctcccgcggccaccacagacctgagcccaggaggctctgtgacaaggcacagacctaccacagagagcctgtcactctctccctggtccagcccctgccccctgcttctccatctacccagccccccggggaataggggctgcgaggggatggtgaaggagtctcagtgacattcctattttcccagcatgtttgagaagaaactaaagatgtctccaatcaggtttataaatttggagaacttgtttttgacaaaaacattctgtcttcacactaaaaaaaaatcagtaagactgggtgaaaacaagatggtttttttttttttgttttgttttttaccccaggagagtttactagatgctgctgtttatttcccatctaacatctcaggcaccaaggtataatcatgtcacagggctgtccgataattcagaaggtgattcgagtccatcctcttacctttaaagagaacagctccagaaaatgaggctttgtaacttggctttgcaatgtatcatgatgccacacaactttttaagggttaaatgatctttgtagtgaccaacatgaatcacttcagctgtaatttaatcttagtccctcctgctgtatcttcagcaggcttagtgtgactcaccatttaagtctcaccttattctgttctcctgagtaaactaaactctatctctctgtccttttcagtaaaagtttttctcaaccctttaattatgctgctttaaagaaaaagcctcccagagttacatgagtctggaaggtcatttggtccatctatccatatgatgtgtcagaactctccactatttccatacgggggcttttggtttggggaatggtaaattcactggcaatgctgggaaccagggaaagatgccatcaataaagcagacattttgaataatatgggaagatacaaagtagatgggacatgggaggaaaaactaattagtactgataaactcatgattctgcaaagaccctgatatggtttggctgtgtccccacccaaatctcatcttgaattgtagttcccataatccccacatgtcatgggaaggacctggtgggaggtaattgaatcatggaggcaggtttttctcatgctgttcttgtgatagtgaataagtctcatgagatctgatggttttataaagggtagttcccttgcacacgctctcttgcctgccaccatgtaagatgtgcctctgctcctccttcacctctgccatgattgtgtggcttctccagccatgtggaactgtgagtccattaaacctctttttctttataaattgcctggtctcaggtatgtctttattagcagtgtgagaaccgactaatacagacccctaagaagtaactgtacaggtttccagaaaacagtcttggaaaatcccaaactcagagaatcaggattggaggagaatcataggcagcagtttaaaggcaaattaagggacatcaggaacatggtcagtttctccacacagaatggctggacacagaaataggtccacagcttctttggaaagtgagaggtttgttccaaatataatagaagccaaaggttgaataggggcaggatatcagctccttttgaaatgccactgctcttccccaaaaagtgcgcacacacacacaccacacacacacacaccacatgcacacaaaagagatttaaaaaatcagataaaatataagatataacagagagatccagaatatccaatcaatattagcctaataggagttccagatggaggcatcattaatgaagaagaaatcaataatcaaggaaataacagaagaacatttccttaacctgaagaaagtctttaggccttagatcaaatgctgtgctaggcagcaggactactgaaagaatacacacttccagatgtactctgatactccaagagcaaagacaaacaatgacaagcttcctcataaaggagaaaaatcaggttgcttaaaaggaaagaaaatcagactaataccatacttctcatctgtaacactatgctaaaagacactggtataatttctgtagaattctaagggaacattattacaatttaagaattctaccagctgccaaactataatttctcttatgcaatgaaaaagaaaggtatgttcaaagacacagaaattatatcacccaaacaccctttattaaaaaaaatttaaggttacttgaagatctcttccagctgaggaacaaataaggcaggataacaaattcaagaaaggagaagatatgttatataaaaaatgtaatgaataaagccaacaaaatatgtggtcaaatataaaaataattgagaatatagttgtaaaatttaattgttagaagtcttgaaagataagagtataagtacatttattccagatttgaattcacatctatatctatctcttacatatatgtgtctggaattaaacttccatataattataacaaaaaaatagaaaatctcaatggaaacaggtaaaaatcactaaaaaaggaagaaggaaggagggagggaaggaaggaaggaaggaaaggaaggaagggaagagagagataaagaaaaggaaagaaagagaggattgttatggcaggccaataattccatctgtttcctcttcttcccaagaccacattaaaatgaaaataaggattttttttaggttgaaatagatgatgacaaaacaaaaacagtaaaagagtcattgatcaaaaaaattcacaaagaataataaaggaggacaattcatcagttagaaatatatactttaatgctacagtaaacaaaatggtatagtacaaataaagaagcctacaaagtggattgatggaagtcaagaaacaaatttagctataatggttactacatggtagttaagtaataaaaactgaattttaaatcagtggaggaaagaatgtgttattcaataaatagtgttggactgtggctatgtatttgaaaaaatataagttttacctctaactgatatcttgttaaaaatatattctattttcatataggaaattctgccatttgtgaaaacacggataaacctagaggacattatgttaagtgaattaagccaggcacagagaaacaaatactgtgtgagcttacttataagtgggatcttaaaaagtcaaactcataggagtagagagtagaatggtggtaccagaggctggaggaggtggcggggggaagggaaaggagcaacattggccaatgggaacaaagtttcagttatataggaggaataagttctggtgccctactgtacagcatggtgactacagttaataataataatgtcctgtatatttcaaaatagctaaaagagaagattttaaacgttctcaccacaaagaaagggtaaatatgaggtgattaatatgctaattagcctgatttggtcattccataatgtacactatgcatatattgatacatcacattgtacccataaatatatacaagtgttatctgtcaattaaaaataaaataaggctttaaaaatattctattttcacatacacaaaaattccacaagggaaagataggtgttatgattgaccaatactgtaaatcatagaattctatgaagtttttttttctaatagtggaaagaaaagcatgtggtcatccagtctatgcttagataccattgtgataggctaattactggcccccaaagatatctaccccctaatccctagaaactgaatttcaccttatatggcaaaagatgtgactacgttaatgatcttgagatgaggagagatcctggattatccaggagggccctaaatgaaatcacaagtatccttataggactgacgtaggagacgggctagagggcaacgtgactacagcggctgagattggagtgatgcagccacaagccaaggaatgccagaggccaccaggagcagaaagaggtaggaatggattctcccctgagcctccggagggagcatagccctatcaataccttgattttggatttctggcctctaaaactgtaagcagagaaatgggttattttaaataactgagtttgtggtcatttgttatggcagccatagaaaactacaaccaccatgatgagaaacatagtacttcctagggactatcattattattattgccaacaacaatacttactatgtacctggtgctgctaaattatttatatatcttacctcacaagtcacatgcaaggagatggtagagagttggagttgttacggccctaccacttagtagcaaaatgtccttgggcaagttatataacctcctaacactgactttttctcatctattaagtagaggtaagaaaggtacctacccactggggttgttgacgataaagtgagaccatctatgtagagtgcttagaacaatgcctgggaataaaggttccataaatgataagtgatcatgagaatgtccttatgcagctgtagtctctgttccagagctttttctcactgatttttgttcttctctttgggtacatacaaaacaagggtatctccaaaccacctgaatgtccttcaaatatctgaagccattgatcaggtcattaagagtctgagcttctctaggctaaaagtaaccaatgcctccaatcattattgttcttagaaattcacctggagtcccttccctaacttggtcacctcccctgaacacattcttgtgcatcataagatgtgactccagactcaccaccatgcttgttctagaacagaggtctgcaaactacagcccttcgtgcaggctaatttttacagcccataagccaagaatggatctgacatttttaaaggattgtaaaaacaaaacaaaacaaacaaaaaacagaaaagaatgtatgacagagactatacgtggcttgcaaagcctaaaatacaactgaccctgaacaactcaggggttggggctctgacttttcatgcagtcaaaaattcatgtataacttttgactcccccaaaacttaactgctaatagcctattgctactggaagccttagtgataccataaacagtcaacacatattttgtacattatatgtattatatattgtatactgacaagtaagctagagcaaagaaaatattaagaaaaatcataagagaaaacatatttaatgtttattaagtggaagtgaatcatcataaaggtcttcatccttgtggtcttcacattgagtaggctgaggaggaggaagaagaggaagagttggtcttggtatctcaggggtggcagaggcataagaaaatctgcatatagtggacccgtacagttcaagctcatgttgttcaagggtcaagtgtattcactatctggtcctttcagcaaaagcttgccaactcctgttctggcagatactgttcttttatcaatgcaatagaatattgcccaaaactttttggcaatcaaattgcatgactgtacatactgtcttaactgtaaggctgcaaatgtttctgtcagtatctattcccctctccccttcttagtaataaaattcttagctaggaacatggctacccagccaaagactacatttcccagcctgtcttataggaaggtgtggccagaagaacaggttctagccaatgggatgtaaacagatgtgaaatgtataatttcccagccatactcttaaagggaaggatcatgcttcccttcctttttccttttgccattggctgaaatgtggacctgatagccatgtggatgagtggtgcagagcaacgagatagaaggatcctatccctggtgctgccatttcaccctatactgtttattctcaatctgtgagagggaaataattgtttagcttattgaagtcattgttctattaggtctttgtgacagcaactgtatctgtgccctaagccatacaactatcattttcaactccctcgtactttttatatttgcagctaccaagccacacacctcccctgacctgcactcacacagttaatttcctggaccccactacaagaccttacatttagccctattatgtttcatattattcgaatcagcccatcattttgccctgacatctgggatctaattctgtcactcaaactagcttctatcctttgtaatttcacatcattcttcaaaaggcactttatttgtggcactcaagctaaacacagtgctcatcaaaacacctgatcaatattaagtataatgcagtggggaggctatgacctcagtttgtaggggaaggaaatagcagatcaaaataaggtccaaatgaagtagaaggaggaaaggaaggagatgagcagttatggagagcttactatgttccagtcactgtgctgggaacttcccccatcgtgaagttttagtgccttaagtacccctattagtgccttaagtggaatagtcataaatttgtgaacaaagaaaggaatattaagagaaatttttaaagtatgttagctaaagtttcttgcagcctgaaggtcctacttgaggttgtgtatcaaaaaccctatggagttttagggaaaatatggatgcttccaagttgctacaggagggtcttggcatatgtatatctttaaggctccatggctaactctgacaaccctgataagccactgtgagtttcagctttctagcacactagaaagtttgaggcagagactctgctcagctaccagctcctggagtctgactcagctttctgtctcaggcgaggatgtagccttgtcaggctgtttgggttcaagaaccaggagagtctgatgttggtaagaattcccttctaggaagtattaagcaaagtgattggagtatttccctgagtcttgtaagcttctagtacaaaaggagtgtggtgtagcacaaatgagtttctctgatctggtgagatcctcctttgggtacccatttgacatctcccaattgggcacccttgggagccacccaatcctgcactgagacaggccacctggctcctggtcagtttgtgtactctggctaaacaaactctgtatgtgtgttttgggggtggggtggagttctcttgtggcaacccatagactacccaaaaatgctgcaagacaaacataccaaagtcatcaaaaagtcattaaagtcatgactagagaatagtgaataaacaccccaaatcacatgtaatttattacattcacctagggtaaaaaacttatgtgccttcagggccaatcaaataacgtaagtgtgcaaagtagcttggcataagcaaaagagaactggagtgttcatgcctctctacatatctaccttttaaaaatgaaaaagctgaaagctgtgtagctaaaaacaattggaatcagaagatggaccaccagtttgcaacccttctccccgataatcacagtccacaaaagcaaggagaaaaaaaacttcatacctctcttagaaggataaaagaattatcttttaaaaacggcttgtaggcagggcacagtggctcacgcctatagtcccagcactttgggaggcagaggtgggcagatcacgaagtcaggagttcaagactagcctggccaacatggtgaaaccccgtctctactaaagatacaaaaaattagccaggcgtggtgacgtgtgcctataatcccagctactcgggaggctgaggcaggagaatcgcttgaacccaggaggcggaggttgcagtcagccgagattgcagcattacactcctgcctgggtgacagggcgagactccatctcaaaaaaaaaaaaaaaaaaaaggcttgtaaaagcatgtattgctttttaaagcaatttttaagaaacagttaaataatatccctaaaaataggatgtctttaaatgagttgggtcagatgaccctattacagtaattctcaaattatagtccaaagactacagtgggttacaggagtgcccaggtggtatgcaaaatgttcttccacaagtctcactcacagtctaaagtgtcccttatagcacagaggattcttcatttatttctttcagggctacttcatcagatgctctccctactttttttctttttattttgaaataattttagacttatagaggaattgtaaagattgtacaagttcccatacaccctttacccagttttcactaacagaaacatcttacataaccatagtacaattattaaaactaggaaattgagattggtacaatagtattaattgacctacagaattttctctaatgttaccagtttttccactgatgtcctttttcattccaggattcaattcaggatcccacattgcatttagttgacatttctccttggtctcctctgttctgtgactattcctcagtctttccttgtctttcttgcccttgacccttttgaagagtacttggcaggtattttgtagacagtccctcaatttgggtttgtctgatgttttttcgtgattaaactgggattgtggagttttggcaagaatgccacagaaatgatgcacccttctcagtgcatcaaactggggaagggagacatgctgttaatatgtcttactggctgggtgaggtggctcacatctgtaatcccagaactttgggaggctgaggcaggaggattgcttgagcaacttagtgagacctcacattatcccttggttaaggtggtatctgccaggtttctccaatatgaaattactatttttccctttgcaattgataaatattgggagtctcaaatactttgagactatgcacacaccatgtttctcaaacttatacccattagtttaacagctatcaggtgaactgtctgcagcaactatgactgcagtgttctaggggtgattttctatttcctccacttctctctatttattcactggaattcttctggtaaggaaaaactgtcctttttccccatcaaataatcagtgtattcaacttttatttttatcaaaacagactcatggatagttattttattccttcagttataacccaatatatccttacttatttttttgacctaaattgttccagctttggccaataagagctttttcaggttggttcctgtactctgcatattcccattgttgttgttgttgttcagcactttcttactttctagcaccagaagatgctccaggctcatcttgtagtttgcctacccagtcctggagcctatgtttccaagaagtcctggctccttttattaaataatagcatttagagaccaagattggggaacctgatgtgctcactgctactgggatgtcagtgcttttagtgctacagtgctacaggccatctcagtagacagagctaggaaacatatgtatgtatatttatccatgaatacacacctatatttccgtatctatcagtgtatatgtgtgagtgtgtgtatatgtgtttttatatatatatatatatatatatatatgtttaaacatgagttaatactgatacctctgactctaatcaaacaccatggattcattccatcattctgctttgcttattagtaacttctttctcagacagacacctgcgtcttattatcaataatatatttgcttatctgttcattcctagtatatatgtaaaatagttttagaatggttaacacatacccctgtgaaggacaaatttatcatgtagagtacagtgtctgtgtacagttatttttgtctttagccttacagaattccaaagttacttaggtcagctcccttcttcctcatcatcttcaatgaatttatgttatacacgtgcaatgcagttagattcatttgtcatattctgcattacatcttaggttcctcagtatcctgattgattttgttcttaatttgcacacggcaaaatttacactttatggtgtacagatctatgggtttgacaaatacatagagttttgtgccatataaagcagttccatcagccacaaagttacctcatgttgctcccttgcagtcaactccaacccaaaccccaacccctggcaatgcattttccataaatgtagttttgtcttttctaaagtatcctatggaatagtaaaatatgaactttttgggtctggattctttcacttcgcaaaatggatttaagattcatccatgatgttgcatgaattaatacttgtgcctttttacagatgaatagtgttccattttatggatatatcacttctgttcgcctgttgaagaccatctcagttgtgtccagtttgggtgtttatgtgtagagttgttacaaatattcatgtatgggtttctaagtgaacacaaaatttcaataacttgagtaaataccaaggagtgggattgccgggtcatataataagtatatctttaattttataagaaactgccaaactacttcgcaaagtggttgtaccattgtgcattcttaacaagaacatgaaagagttccagaggctctgcatccttgccagcacacacttagtgttgtcaggtttgttttttcttaactgtagctattctaattgatatgcatgatagttcattgtggttttaactttgatttccctaattaaaaataatgttaagtgtctcttcatatgcttatttgccatcatatgctttctttggtaaaacatatgttcaaatattttgcccattttttatagagttgtttactttcttgctgaagcttgaaagttctttatatattctggatacaagtccttcattacatatatgattgcaaatattttctcacaatctgtggcttgtctttttattcccttaacattgtctttcacagagcaaaatttttatttcaagttcaattcattaatgtttcttttattgattgtgcttttaatgttgtatctaaaaactctttgccaaaccaaaggtcatattttctcctgtgattttttttctagatgtattgtagtttcatcttttacatttagatctatgatctttttctcagttgttttttaaggtgtgaggtaagtgttgaggttcattttctttcttgcatatagatatccaactgttccaacaccatttgttgaaaagactatcatttcttcacccttgtcaaaaatgaggtgattatatttgtgtgggtctacctctgggctctcaactctgttccactgattattgtatctatcattttgtcaacactacacttccttgattattataactttgtaacaagtctcaaaattgggtactgtctgagtcctccaactttgtgctttttcagatttgttttcatggggacaaactgacatcttccaatccatgaatacagtatctgtatttattttactgttctttaattgctttcaccaggattttctagattttagcatacctatcctgaatattgtttttgttagatttatatctaagaatttgtgggtttcggtgctactgaaaaggctattgctctctaaatttcaaagtccatatgttcattgctagcatgaagaaatacaattgactttgtatcttgcaaccttactaaactcacttattagtcctagaaactttttaatgatccttcgggtttttctacaaagacaataaagttacacgtgaaaagacattgtttcctttcttccttttaaatctttttgcctttttttttcttgccttattgtactataggactttccatatgaagtcagataggagtcataagagagaacatcttgcattgttttttatcttaaggggaaagtgtttagtttttcaccagtaagtgtgttgctagctatagccttttgtagatgccctttttgaggttaagaaaattgccttctattcatagtttgcagatagttttaatcatgaatagatgattaatttttaaagtgctttttgtaaatctattgaaataatcatcgtttttcttttccttggttctgtaaatatatttaattttaatttcattggttgatttttccagtgttgaactagccttgcatttttttgttttgtttttttgtttgtttgtttgtttttggaaggcttttaactataacttcaatttccctagaagatatgggattattgaagatataatatttcttcttgaatgaattttagtatgtctgtccttcgaggaattgattcatttcacctaagttgtcaaatttatgggcacagagttgtttgttgcactaccttattattcttttaatatctgtagggtcagcagtgatgtcccttctttcatttctgatattgataatttgtatcttcttttttcttggtcagtctgcctagaagttcactaattttgctgatctttcaaagaaccagcttttggtttgattgatatatccaaattgcttttttgtttcaaatgtattgatttttgctcttattatgttcttccttctgcttgcactagttttaatttgttcttctttatctagtttttttctttttagggtggatgcttaccttactgattgaagacctttcctcttttgtagtgtaagcatttaactctataaatttccatctatacactactttagcttcatttcccaaattgtgatatgttgtagttctttttcattcagttcaaaacgcttttttaattgccttaagacttcctctgacatatggtttatttagatatgtgttgtttcatctccatacatttgaagattttccacttatatttctattattgatttctggcttaattccattatagttcatgaccatgctttctatggtttctagtcttttaaggttgttaagtttgctttatggcccagaacatagtatcatttggagaatgtttcatgtgcactttagaaagaagtgttgtcatgtaaagtatactataaatatcaactgggtcaagttggttgataatgttgctccagtcatctatatttttgatgattttctttccatttgttctatcatttactgaaaaaggagcactgaagttttcaactgtaattgtgaaactatctatttcactttttgattctatcagcttttgcatcatgtattttgaaactctgttgttaggtacgtacatgtttagcattgttatgtcttcttggaaaatcaagccctttataattatttgatgttcctttttatcccagataataatcattgttctaaaagtctcacttgtctgatagtaatataaagacttcagctttattttgattagtgtttgcacagcatatctttttctattctattacttttaacctatctgtctttataactaaagtgggtttcttacagaaagtgtatagctggttcttaatttttcatacaatctgacaatctccatcttttaactggtatgtttagaccattcacatttaatgtgattatagatatggtcaaattaaaatctattttgctagctgtttttttgttccttctgtttttttcttcttttcttttatttttctgacttctctcgttagcctggtttgggggtgtgtggaggaaatggtttctattgttctgattaagctgtagtcttaggcaagcactatatcactgagtcctgaagcagcagccttcccagtgatcccatccctcccctgcttcacttctgaatccagaatgtatatccatcctttccctaggtgttaagatttttttccctgttcccttatctcagatgtaatgggatttcaccagtatccaaagagtgataatgtttgctcccttctacatacatgtcacactaattaaggcttttgttcataggggaggtaggcaagaagggtccaggtagaatttctcacccctctcacagcagtttcttttcctctcctccagcaattcactacaagggagattttctgtagactctcccaaccatttttgtgaacctgtgatggggttcatggagaaatgagtctaagaaagaaagtgtgatctccttttatttattatccctagggctttgcccgcttctactagagttcattaagccagattctgcatattcaacaaccaccttagctgaattcatataggtatgtttcttgcttaggtaagtcagagctcatatctcatttctccctgaagatacctatctcttcctcgattttgggcctactgggtacccagcaaccttaggactccagtgagctcaagaaaagttgtgaactttctattcgtaaagattttttttcaccataagtttaggaacaatccttcccagctgtctacatctttgagaagaaactagaagtctaccttcttataggtacttttgcatcttttgcaacagcaaacagaagaaggtacagcagttggtcagggtaatcactattctcttggaaacttgcttaaagagctttaggaatgacagatgttccaaaaacacctctatctgttgtttttgagaaatgtaagatatacggggaaaatcctataggagttaagtaaagtacaaataatgtaccaatttttcaaaaagtggagggcagaatctgtataaactatcagtcagttataattcaggacaactgtcttgttgaaagcatctaccagcctgcaattgcctggcaaagaatatgatgccacatagtaaacaccatggatggtgaagaataaaataactctagaggctttctagtccacttaatttcagaattgttcatacatgtcaccatttagtgagaaatatgacaggcaactaattactcaaaattaggctaatgacaaaaacattatacttatgttttattatttattctagtttccccaaaggtaagtcttgtcattaatcattaactactccatatattattattattaaaaatgataatgaaacaactacaatttagtgaccactcactactagccaaagactatgcttagctaatagcaaacatgttctcatttcaccttcacaacaactcagtgagagaagtgggactcagagggactaagaaactcgtcaaatccacagaattaacatatgttagaactagaattaattcccaggtcagattttaaagtccttacttttaacttctgagtcagactatcccagatgatgttaattatttcctgtggcccattgagtatttcctgctgtcatttacaatgctggaaaaggtccatccttgcataagaacacaaaagcatcagaaatgccttattagctgagtccagttgtccagccacaagggcattcagtttcagaatggcaacaagggactatttgttgagtgaacatgacaactgacctttctgagattggtttgcaaagagggcataactgtcctccatgttttttaaatgtctctctcactctctctctgtatacatatatatgtatgtaaatatgtgtgtttgtgtaaaatattcttttctttcctgtaatcctgtattatctagcaatttagtcttcttgaaattatatatatatttatattatatattatatatattttatatatataatatatataaaataaactacaactaactctaagaataaagagccctctataagatttctaccatctctaatgaggaaacataatgtgatattctaagatcatcttagatacctggagcatagcaacagcacagcaatgagtttcaaagacaacaatgtgaacagctaccactaaatcttcagttaggggagtcgagctatactcaagtatatttcacctaacctaaacaaacctgtgtaaaataagatagcagactacataggaaagacagtaacaagcaatggcaattgcctgcaagtaaaaaggaagagtgctacaaagaacaaggagaagtagtcaattcagggaaattcagttcaagggtaaatgtaaatcaccctctgtaaccccaagatggagggtcacctgccagaatctctgaactataatacaaagcagtaactaatgcttcccaacctattgcaagtcaagatgcacacagaaaatcaatctattcagatgactcatgtgcgagtcaagatgcacacagaaaatgaatctattcagatgactcagcaagaggcaactgatccaggggcttctgtcacccctcaagcccggcctggcttccctgagaggtggagatggagggatcatatttccacacacctgtaatccattcacaacacaccactgagcttttgtccaccaggtggaaagctctgcaataacttgtgtcaacaagaagtagttccattatgtttggtctactccacttaagaaggtgggaaaatataaaatatcacagagtaatatttccatcaaaagtagttaaatgttaaaacattttgatgcttagagggcaagcttcagttagaaaaattaactcttggaatgcctcatttcctgatgatgcacaaatacaaagtgtgactactctgtcttttattggggttcaaggtatatctatcaaatcattctgttatctcaaggtatttgtggagtctgaattaaccatatcagtacccatgatggttttaaagtattattatactggatgaccatatgctcttatgatgggacacactggaggtaaagggatttctattaataattacactataatcactggtataagccagggctgtcctaggaaaaccatttggtcaccccagtattagatcattctccctatttggtcctaacctttttacaacaaagaaagctatgtttatattcttcattaaaatcataaataaaaataaaacagtgcatgctagtagcaataaactaaaaactgaaatttataaaacagaaaataaaagtggtaccatttataatacctggaatcattctttccagagataacctccattaacagtcttctttccagtcctctttatgtggggagaactgatcccccaacattattatccaaagtcagacaaatggatactgggtggccaaaaataataaatatatattctatacacagagttcacatggagcctacccctctcctgcagtcctggggtacagcatgcaatttggttctaaactgctgggcacaacactttcttcctggtcatgatgttggttcaaggtggtcacaggactcttttagagccagtgagacacaaagaaacttttgctcagacttctaggaagacaatctaggtacttatcaaattgaaactgagaggatcgaaggccttgacctgcactatccaaaatggtagccactagccatatgtagctattgaacacttgaaatgtgaccagtacagaaatgtgatgtaagtacaaaaggcacactgcatctcaaagactcagaaggaaaaaggaatgtaaaatatctcaccaataatttttattttgattacatgttgaagtgatgatgcatatggctcatattttctctctagtggacaatgccagtctaaaacattgaaccattggtacagccaggcctgagggtatccctggtcatggacttttcagatatgtcaactaataatatctattttgcttaagaaagttctgattggacattctagcacttgcaactgagaatcctaactggtgcattgtatatgtagagtcatgccatacattcaagactgaacaaccaatcatgagcacttgttcatgccagcaccttaagagtagtgtgcccagatctgcacaaagtattctatatgtggacaaatcaaccattgtttttatctgttaacaccactgtatgtgtctggggtgtgtcaccagctttctttaaggtcttccagtgccaaagtcttcttctcctggcctttgcacatactttactttctgcatggaacacgctttcctctctttcacttgcctggttccctctcattactcaggacgcaatttaaatgccatctcctcagagctgagtttcctgaccactctattttgagtaggtcacccctgatattgtctctcatagcaccacatctcccctatatggcatggaccaaaatatgtattaacctctgtagaaggctgtttaacatctaccttctccttccccaccataccataccgtgcatcaatgcagaagccatgtatatgtggttcacccatttgtccccagcacctggaacagtaactaacacatagtaaatgctcaatcaacatctactgaatgccaggaatgagtgttaatgagtccaggagaaggaggaaggtcaggggaagatgaagtaatgggggaagggaactaagataattcagtgtaaccaaaccactgatgaatgttgattaatgccatctagaacactcaaaaagaaagtaaggatgagaactgacagaggaagagcaagtccagaatggaaggatttgagcagttagtggctgcctggaccttcctccaggcataaaagcaaatggtcagagatacaaatgatgaagcctgcagttcaaatgcatttctgaactccacacaatgaaaattatgctgagattttgctttctgttagtgacaatctggttcttagtctcattctcataacctaaatacaaaactatgggggaatctgagtcctactctaggaattttcatcagactctgctcaaaggcaagatcacattctttgacttctgcattgtggagcttctcatgaggctgattgaaatgctgctgttcatatcaaagccagcctttctggacttcatcgaatatctagatcccttctattttcctcttcacattcttgttctcacacatgatctttgccactaccctgcttgcttacctcagcttaccttatacctcggaggcagcagtaacggtttttactaaaaccctttaggattgatagatgatagcctctaattatttctctggagataaggcctctctttaaatgagaatggctcttctttttgttttattgtgatatatatttttaattcatttattttataatggaaagttgatcaatacaaaataattcataaaccaagcacccaatttaagatctagcattttattttggaagccctctgtgtgtccctctttggtttcatttcattttttaaagaatgaaaaccactttgttagtgaactccagaatttgggaataaaggggttagaaccttagaatttaaagatgtggtgctgtccaccaggcaggtgctgacgagtctccggaaaggtgggagagccaccgcagtctctcagaggaaagaagaaagtgcttagtcctttttctttttatttttccttctcccactttgatctctcttctttcttcctttttaagaattactacacctcttctctttgctggtaagacgagggaagtcaacagagctccacgattctgtctccttctttttctaacagatggtttccattagggcttaccaggtattttctctgaacagaatcaaacatgcattgaaaaagtaaacatcaggatcatagaactagcagccctttatttattacataaatacaaagattttatagctggaaaagaacttagagataactaaatccaatcttcttgtttcagacctaagaaaaccaagactcagtacttgcctgagttattaaggttattaagctaaatatatgtcttccctctccaaatcattgtttttatttcccatttttctttttttctttttctttattttttatttcccatttttcaattctcattattaatatattttcattattgataatttgatcacattattgattattttactttagtctgaggcacctagccttaggctattagtattttcatttagcaatattaattacaaaatgatttttgaatgatacctaaaagatacctcacattaatgtaaaatactttgttttattcttaacagcatttatctcagaagtcactaaatattcaatcatatttttctgataccctgacattctctgcctcatatttctacttctaatgaaatatacaattgagctgaattttaaaaaatataggtacttcagaatattcctaaatgatgagtgagtcattaagttatttgtcatatcagaaatctacagattgctaacattcaattagttaaccaaaaaccccaaatgcccactaggtgcccaacactgtgccaggcatttttcttatgcaccctctttaaagtgaaaatgtttgaatttcagattttcaagaatatttgcatgtatatatgtatttgcttatttattttatgcaataaattttatttctgttattctcaaggcactgtgctaggcactgttggaggtgaaatgaactcttaagagaacatactatcaagaaagagacaaaaatgtttacataaatatctacaatatgtggcttaggagagtgatcccaaacacaaatgaccacagaggccaggtagtcaatgtaaatgcaagaaacacgttgtgtatacggcaacagggaatgggaaagttatggggagctataaaatgaatgttgcctctaaagaaaaaaattgagaatgaaaggagagaagatttgagaaggtgggggaagtgagagggcacaagtataacaggagagcatgaagagagaggataaagagagaagctggtaaagacagaggagagagagggggaggacaggcggaaagggaaggagggagggagcgggggagagagagagacagagagaaagagagaaaacatcaacactaaaaggtcaggtagaagaggaaaaccagcagagtatggtgtcccaaaaaccacaagagggaacttttcaaaatggtcaaatgtgtcaaattttgctgaaagtatctattggatttgacatcactgaggtcactgacaaccttgacaagaacagtttccatggtgtggtgagttagaggccaggctgaaacatgctgaaaagtggatggaaggcagacagcaggaaggcaaccctttcaagaagttttactgtgaagggaagcaaaggaatggggcagtgggtagagtagggcaagcagtcaaggaagaggtggtttttaaaaagacagttgatgtcgtcaggtttgtctactaatgggaatgatccagaaaagcgggagccattgatggcactggaagacgatggccaaggagccgatcctagagaaagggaatagaatccaggcacacataggaagagtggtctatgatctaaggagggacagacacttcttccatcacactacagagaagaaggaaagggggtgtaaatgcctgcatggtgataaatttggtggtggaagtatgagggaattcccatctgatggcttcaattttctacataaaatagggaaggacatggcttgagaataagcagggagggtaagtgaaatttgcagaaggggaaaaagtgtgaagtaataaccttgggattgtgaaagcaggcccactagagaaacacagtagaaaatacagagcacccggttatgatctggaattataaatttaaggcacaaccagacaactttttattttgtccagcaaagtccagctgatcaaaagggcatgaagaagccatgaattgcccacacatcttgagaaaacaccgtttctaagccatagatcagggctggggcctgaacttctgcacttctaacaagctcacaggtatctccctgctactggatcgctggatcacactttcagtggcaagtgtaatccgccaatttcctttgtcattcttttctcaagtatttcagtaggggacacaggagatctgtcacctctaagtctgaaaaaataatattaataataaaaattaaaacctcaaaaataatagaaaaagggaggaaggacatggagaaagaagatgatttggtttatccaactgtggctgtattagaaatatattttcttgcccttcttcttatctacatttccagctttggcagtctcatgcagtctcacaacttcaaccaccatctttatgtggatgtacgatgtctttcttagatccaaaggcacaattaacacatccatatgggtgtcccatgagcaactcaaatgataacttgtcacctatatttgctctccttgatcttttcatccttttactcttctcattctcactggcctccacatttaaagttgttaaggcctactgatttatccctaaaatatcagtagtttctatggatgcaaattagaactacactaacacatcatttccccttgtcagatatgcaagaatccaaaagtttgatgacataccctactggcatgactgtgaagagtcagagacttgcatgcattgttagcaagaatgcagagtggtataacccctatggaacttttttgcaatgtatggccaaattacctaagccttgatcctttaagttaggaatctatcccaaagacacactagcaatatgtaaaatgatacatgcacaaagctatttgtcaaaacacaatttgtaatagtaaataaatgaaaacaacccccaaatgttcatgaattagggactagttgcattcataaaactgagaattatatgaataattctcagacacagaaaggagtgaggaaaatctctatatattgctatgaaggaatgtaagtgaaaatacaaaattcagaagaatgaacataatatgctactttttaatataaacaggaagatatatacatatttgtttatattttcttttttttttctttttttgagacggagtttcgctctgtcgcccaggctggagtgcagtggcatgaacttggctcactgcaagctcggcctcccgggttcacaccattctcctgcctcagcctcccaagtagctgggactacaggcgcccgccatcacgcccagctaattttttattttttttattttttagtagagacgggtttcaccatgttagccaggatggtcttgatctcctgacctcgtgatccacctgcctcggcctcccaaagtgctgggattacaggcatgagccaccacgcccagccacatatttgcttatattctcaaaaagaagaaatggaaagataaaccaaaaattaataaaatgggttacctataggagaaaggaaagaacaatgggaagaggatttaggtggaagctggatctctttgaatgtatcatattttatagttttaagttcaaaatcatgtaaatgttttgcataattttaaaaaattaaatagaaaagaaacaaagtaatctataaaaatcaaaacaatctgaaatactcagtggcttcccactacctaccttgactccaaattcctgagcctgaattcaatgatctctttagtctgcccagccaaatattcccacttcactttctgaggcccccttctccatcttctctacacacagacaaactattaacattatctgtgtgcctaatttattttgccagctagaccatacttctttgagaatggaatctagttctgatttatttttgaaacctaaaattctcagtgtctagagttattaccagaacataaattagtacggttatggcatctgaaagttattggcaggaaattttatgtttattctgaagaattcaaggaagccatagctttttgataatatgtaaaatatctggctaaagagtaactttctagttacaaaacagaaaaaataattgaagcaatctgatatccatcagcagatgaatggataaataaaatgtggtatatccatacaatggaatattattcagccttaaaaaggaaggaaattctgacacatgctactacacagatgaaccttaaagacagtgtgctgagttaaataagtcagtcacaaaataacaaatactgaatgattccacttatatgaggtacttagagtaataaaattcatagagacagaaagtggaatgatggttgccagggactgggcaggaggtgagaggaagtaggagttattgtttgataagtccagttttaattttgtaagatataaaatgttctggagaaggatagtaccaggttgcacaatatgaaggtgttaaatgccgctgaactgtatgcttaacaatggttaaaatggtaaattttgttatgtgtattttgtcacaattaaaaacaattttaacaaggaaaacaagacatttgggaatatcttttaatattggctccttttattaatgtaacaaagttttaaccaaggctatcctctccagagccattaaggatcacctagggaagagacggctttttgcttagaacatggtaccatgttacctacactctctctgaaacgaatttgcataagaactgttgtttatgggaatgcatcttgacggggcagctgggttgctatgaaatactcaggaacccagcccagctctaggactcacccctgagcacaaacgcaatgttggacacactggtaaaggaccactggaatccagcagcccggatccctttctttgtggtcaagaaaggcaggaaaagggatgcaggactgctacatcagtgagcatcactaatccgataagcagaggtccatgggtggtgatgcaccctggaaaggaaaaagcattaggaccatagaggacgctctaggactaatgctcatcggaaaatgactaggggtgctggcatccctgtgttcttttttcagatgggaaacattccccccaaggcaaaaacaccctgaagatatattctggagaactggggccaatttgaccctcagacgctaagaaagaaacgatttatattcctctgcagtactgcctggccacaatatcctcttcaagggggagaaacctgacctcctgagagaagtataaattataaccccatcttacagctagacctcttttgtagaaaagaaggtaaatggagtgaagtgctatatgtacaaactttcttttcattaagagacaactcacaattatgtaaaaagtgtgatttatgccctacaggaagccttcagagtctacctccctacctcagcatccccctgactccttccccaactaataaggaccccgccttcaacccaaacggtacaaaaggagatagacaaaggggtaaacaatgaaccaaagagtgccaatagtctccaattatgccccctccaagctgtgggaggaggagaatttggcccagcagagtgcatgtacctttttctctctcagacttaaagcaaattaaaatagacctaggtaaattctcagataaccctgatggctatattgatgttttacaagggttaggacaatcctttgatctgacatggagagatataatgttactgctaaatcagacactaacctcaaatgagagaagtgccgccataactgcaggccgagagtttggtgatctctggtatctcagtcaggtcaatgataggatgacaacagaggaaagagaacgattcccctcaggccagcgggcagttcccagtgtagaccctcactgggacacagaatcagaacatggagattggtgccgcagacatttgctaacttgcatgctagaaggactaaagaaaactaggaagaagcccatgaattattcaatgatgtccactataatacatggaaaggaagaaaatcctaccgcctttctggagagactaagggaggcattgaggaagcatagctctctgtcacctgactctactgaaggccaactaatcttaaaggataagtttatcactcagtcagctgcagacattagaaaaaaacttcaaaagtctgccttaggcccagagcaaaacttagaaaccctactgaacttggcaacctcagatttttacaatagaggtcaggagaagcaggcggaacgggacaaacgggattaaaaaaaggccaccgctttagtcatggccctcaggcaagtggactttggaggctctggaaacgggaaaagctgggcaaattgaatgcctaatagggcttgcttccagtgcagtctacaaggacgctttagaaaagattgtccaagtagaaataagccgcccctcgtccatgccccttatgtcaagggaatcactggaaggcctactgccccaggggacgaaggtcctctgagtcagaagccactaacctgatgatccagcagcaggactgagggtgcccggggcaagtgccagcccatgccatcaccctcagagccccgggtatgtttgaccattgagagccaggaagttaactgtctcctggacactggcgcagccttctcagtcttactttcctgtcccagacaattgtcctccagatctgtcactatccgagggggtcctaggacagccagtcactacatacttctctcagccactaagttgtgactggggaactttactcttttcacatgcttttctaattatgcctgaaagccccactcgcttgttagggagagacattctagcaaaagcaggggccattatacacctgaacataggaaaaggaacacccatttgctgtcccctgcttgaggaaggaattaatcctgaagtctgggcaatagaaggacaatatggacaagcaaagaatgcccgtcctgttcaagttaaactaaaggattctgcctcctttccctaccaaaggaagtaccctcttagacccgaggccctacaaggactcaaaagattgttaaggacctaaaagcccaaggcctagtaaaaccatgcagtagcccctgcaatactccaattttaggagtacagaaacccaacggacagtggaggctagtacaagatctcaggattatcaatgaggccgttgttcctctatacccagctgtacctaacccttatactgtgctttcccaaataccagaggaaacagagtggtttacagtcctggactttaaagatgcctttttctgcatccctgtacttcttgtttgcctttgaagatccttcaaacccaacatctcaactcacctggattgttttaccccaagggttcagggatagaccccatctatttggccaggaattagcccaagacttgagccagttctcatacctggacactcttgtccttcggtatgtggatgatttacttttagccacccgttcagaaaccttgtgccatcaagccacccaagcgctctttaatttcctcgccacctgtggctacaaggtttccaaaccaaaggctcagctctgctcacaacaggttaaatacttcgggctaaaattatccaaagacaccagggccctcagtgaggactgtatccagcccatactggcttatcctcatcccaaaaccctaaagcaactaagagcattccttggcataacaggcttctgccgaatatggattcccaggtatggcaaaatagccaggccattacatacactaattaaggaaactcagaaagccaatacccatttagtaagatgaacacttgaagcagaagtggctttctaggtcctaaagaaggccctaacccaagccccagtgttaagcttgctaatggggcaagacttttctttatatgtcacaggaaaaacagaaatagctctaggagtccttacacaggtccgagggacgagcttgcaacccatggcatacctgagtaaggaaactgatgtagtggcaaagggttggcctcattgtttatgggtagtgatggcagtagcagtcttagtatctgaagcagttaaaataatacagggaagagatcttactgtgtggacatctcatgatgtgaatggcatactcactgctaaagaagacttgtggctgtcagacaactgtttgcttaaatatcaggctctattacttgaaaggccagtgccgcgactgcgcacttgtgcaactcttaacccagccacatttcttccagacaatgaagaaaggaaagaacataactgtccacaagtaattgctcaaacctatgctgattgaggggactttttagaggtctccttgactgatcccaacctcaacttgtatactgatggaagttccttcgtagaaaaaggacttcgaaaagcagggtatgcagtggtcagtgataatggaatacttgaaagtaatctcctcactccaggaactagtgctcagctggcagaactaatagccctcactcgggcactagaattaggagaaggaaaaagggtaaatatatatacagactgtaagtatgctcacctagtcctccatgcccacgcagcaatatggagagaaagggaattcctaccttccgagggaacacctatcaaacatcaggaagccattaggagattattgtcagctgtacagaaacctaaagaggtggcagtcttacactgccagagtcatcagaaagaaaaggaaagggaaatagaaaggaactgccaagcggatattgaagccaaagagccgcaaggcaggaccctccattagaaatgcttatagaaggacccctagtatggggtaatcccctccaggaaaccaagtcccagtactcagaagaagaaatggaatggagaacctcacgaggacatagtttcctcccctcagaatggctaaccaccaaagaaggaaaaatacttttgccagcagctaaccagtggaaattacttaaaacccttcaccaaacctttcccttaggcattgatagcacccatcagatggccaaatcattatttactggaccaggccttttcaaaactatcaagcagatagtcagggcctgtaaagtgtgccaaaaaaccccctgcacttcaggccatacatttcaatccctgtacctgaacaatggaacaacttcagcccagaaataaacaccacttctgttttagtaggacctcttgtttccaatctggaaataacccatacctcaaacctcacctgtgtaaaatttagcaatactatagacacaaccaactcctaatgcatcaggtgggtaactcctcccacacaaatagtctgtctacccacaggaatattttttgtctgtgacctcagcctatcgttgtttgaatggctcttcagaatctatgtgcttcctctcattcttagtgccccctatgaccatctacactgagcaagatttatacaattatgttgtacctaagccccgaaacaaaagagtacccattcttccttttgttatcggagcaggagtgctaggcggactaggtactcgcattggcggtatcacaacccctactcagttctacaaactatttcaagaactaaatggtgacatggaatgggtcactgacttcctggtcaccttgcaagaccaacttaactccctagcaacagtagtccttcaaaatcgaagagctttagactttaggctaatcgccaaaagagggggaacctgtttatttttaggggaagaatgctgttattatgttaatcaatccagaatcgtcaccgagaaagttaaagaaattcgagattgcatacaacatagagcagaggagcttcaaaacactggaccctggggcctcctcagccaatggatgccctggattctccccttcttaggacctctagcagctataatattgttactcctctttggaccctgtatctttaacctccttgttaagcttgtctcttccagaatcgaagctgtgaagctacaaatcattcttcaaatggagccccagaggcagtccataactaaaatctaccgtggatccctggaccagcctgctagcccatgctctgatgttgatgacattgaaggcacccctcctgaggaaatctcaactgcatgacccctactatgccccagttcagcaggaagcagttagagcggtcatcggccaacctctcaacagggttttcctgttgagagagggtactgagagacaggactacctggatttcctaggctgactaagaatccctaagcctagctaggaaggtgaccgcatccacctttaaacacggggcttgcaacttagctcacacccgaccaatcaggtagtaaagagagctcactaaaatgctaattaggcaaaaacaggaggtaaagaaagctagtcatctatcgtctgagagcataatggaagggacaatgatcaggatataaacccaggcattccagccggcaatggctaccctctttgggtcccctccctttgtatgggagttctgttttcattctattaaatcttgcaactgcaaaacaaaacaaaacaaaacaaacaaaaaaaaacgtggtaccatgctctcctcccccaccagccccaagagtatttccaacagaaactttcttccctgggaacactttgcaccttgggctttgtataaccaggagtaacacattggtgattaacttaagaggtgttttaagattctgatgcttgtttctaatcaaagctttgtattggcatggatccataataattgcatttgtgcttctgagtagaatgctctatcccatccatgccttcccctctattctcacaggaaaaatgactatgctgtgagctactgccacctgggaagcatttacttctgactttgttttaaaactttgtattttgtactccattaatataacatgtaaataataggggacactatgtgaagagggcaaagagatatgtgggaactctctctgtactttcagatcaatattttgtaaacctcatactgccctaaaaacttaaagactattgatttaaaaaataaaactttgcatctgaaattctttgagttgctgttacagaaaatggtcttattggtccatataagtaaaaatgatactttgttaacagggagatatgttcttgtttaaacatgtaatatatctggccagaaactgaaggcatattgagctagtcagtcaccattctaaccacatttgaactttaaggaagaaaactaattagaatgcaatcccctagtttctgctcctgactgtgctggaaatccccacgtttctaacacatagctttgcttctgtattgccacttagagagtatggtgagacacattaaagtctttgaccataaaagcaattaaatactgaaagaagaagggggcatttgaaatgcccttctaagaattatttaaaacatggaaaacaagcttacacttctagctatgatggagttgcatctatccaactcatggtgatagagttcataacataatgtttaggggaaaaggccaaaaagatagcacactgtatgatcccatttatataaagattaaaacgagacaaaattagagtatggcaatataagcctaaatagtgtttatgtttgatgggtggcagacaatgactgagagagggcacaaataagatttctggtgtgctgaaattgggagtgatctcttcttgtctgggtggagatgagagaacagtgttcattttatgtaaattctacaaactgtaaacttactatatgtgcacttggtgtgtgtattagtctgttctcatgctgctatgaagaaatgtctgagactgggtaatttatcaagaaaagagtttcaattgactcgcagttccacgtggctggggaggcctcaggaaacgtacaatcatggtggaaggcacctcttcacagagcagcaggggacagaatgagtgccagtaggggaaataccagatgcttataaaaccatcagatctcatgagaactcactcactaccatgagaaaagcatgggggaaactgcccccatgattcaattacctcccacttggtccctcccacaacatgtggggattgtggggagtacaattcaagatgagatttgggtggggacacagccaaaccatatcagtgtgcatacaatatatttaaatagtaagtaaccaaaacatgtagttagaaataaattacgtgaacaactagacattccctgacaatggaggtggcagaaactggactggaagattctgaaggcagctttcaactgcatttcacttgcccttccataaagcagcagctctccttcagggctatcttccctgaagatacattctctctagctcatctgtcttctatatccaatttggattttgcaacagagagttaaatttattttatcaatttaacccctaagtcaacatattcaaaatcaaaatcttcatcatctcttgcttctcacttcatgaatttcctcccattctctatcacagataagagggtgatcaacttcctcaatgtttaatgtagaaatctcatcctcgctgcaccattatgtgattcctagttgtctctccaaaatcttcctcaaatttatgccctcttctccaaccacattgctttcattttcttttgttcattcattcattcattcattcattcattgtgaagtgtgtagtgcctgcgaggcccttcaagtggggttaaggatcagcagaagcaagttacttctggtccctgataaccaaagcccttgactttcaccaaagccttgacattcccagttgctttctatgtagtctcatgaaagttcccttcccacttctctcctccctctccactgccaccaattcacaactctcttttccagcacatataccctttacatgtgtatatgcacatgcatgtaaaggacatgcacattatttaaataagcaagacaagttcattaaagataatttggaaaatatataaagtaacaaaagggaaaaaatcctattattcatattactgacacccaaagatcgtgtgatataaaatatcatttatttttaaatgatgatcatcttttttagtatacaagtcaaatcattcccctcttttcttagaaggtgtcaagtcattccactgcctataggacaaaagtccttctcatgagcaatcgactcaaagccctttgcagtctaggcacagctgtccagctgtttttctggtgtcttctctagtcccctgcctgtccccaactttgacacatgggtccgtgacactgctcctggttatgggctgtggatactggatcttctgtgttcctgtctctgctcacattgttccctaggcctgcaatgatctttcctgacttcctcagccttgaaaactcctattcacttttcaagactaggttcaaatttcacttctgctggatcccacttgtgtgacacttgtcactgtgtgctgtgattatgagggaggcagcggcagagctgttaataatactgactctggagtcagactgcctgggttcaagtcagatctgtggcctgctagctgtgtgaccttgggccaattacttaatctgtctttgcctcagcctcatgtataagaggataaaatgctaaaactcttctcagagtgtttctatgaggattaaatgagatgatctggttaaagggtaacttagcacaatgccaggtacataatgagtcctcagaacatgttacttcttgtaattgtcagatgtctgcctcttccctcctagactgtgcacatcccataagaaagatttcttacttgaatttgtagccccaccccatgctcagtttggagtaagtgctttataaatgtctgagaaatgaatgaatgagtacatgaatgaatgagtgaatgatctgccaaatcttcccgacatactctcttgctctacatacttttattgttaaaagaaaccaaggaggaaaattgggataatgagaggaagaaggaaggagatgcaagagagggagaaggagaagaagaggacaaagaagaggaataccaatgaattgccactaataataatggtatttgacttttgtttgcacaaaaaaacaggcatcaatcacagtacccaaggctgcagcagcccttttttctgctaactcttcagaacccagaacatattggcccttacacttagtgcaaagctcagtattccattctggcctttggggaaactgagttgtgtaactggttctctacccagagagaagaccctcagatggcagaccacccgaggtgacacatctaaaaggactgcgcagggcccacccgcaaggttccaggacatggaatagaagagtgtgcaccaggcatcctatgcagggcatcagctcatcctcaaattccccaggacagatgcagcgctggatgtgtggaatatttaaaggttcccttgcagctgaagtaccttggcaaaacctgtttttactgactccagatatactggcttctacttctgttccagagtcagtgataaacccccaagaactcattagtactttctagcatgcataaaaggacagtaagcctttgttttgctgattagggaggccacatacatttttaaaaacggattattaagaaataaatgccaacctttgcagaaaaaaacacatttctctctgtctctcattgaaaaccaaggaggccttcagagacttcaccttggcacaggccaggtggtttcaccccaccctgcggggtctggctccaacctggcagctgtttgcaaggacaggccagtcgtcatcaaggccctatgtctctgagcagggggtcatggccattgtgagtcaaaacccacacagagaacactggcctttctgatgctggctgcaccactgccttgcagctttctgcagagccattaaaccatgaacttggaagtcagtcaggccagggtctgaactccagctcctctgcctacaggctgtggcccagggcaggttgcttcatcgctcttagtccgagtctcctcatttgtgaaataggggtaataatagtatctatctatctctcagcgttgtggtcaggattaaagataatgcacagaaatggttccacaagcttgggacgtgagtcacactcggtaaatgatatccattgttattattctttaggaaccattttctcagcttccaggttttttttttttttctctagtgtttccactgagaagatcaaaattgaggctggggaggctgaattgaaaattataacatctaattgttaggagcattttcaatgttccatgcactctgttggtagtatttacatgttttatctcagttaatcttcacaacaacatatcagccaggtactacaatgaaacccattttacaacagggagatccaagggtgaaagaaataaagtaacttatcttgggaaagaggtaaggaaggaaagaaattgcttggtagactgggtaggggtggggtgggagccgttttagaaaaattgtgatggaaaaaagaaagggaatattaagaagtgtctctgtgggttatgaattggttccctcctatgttctttcagaggcacaagtgaagactggaattctttttaattagtagctccatcattgttatgagaccacctaagtttagagggcatagttaaataggaggaaagtactttcaccagaattgcaaactgtgtcctacaacagcacacaaaaaaaaacccctcatattaaaaccaaccacaacaatgacctcaccgtattaagtcctgtgatgcatcctgccatgcagggcacatcctgaaaggggagaagaggcaactaaggcctccagctactcagctacacttaaccacagtaatccacccctaagtttctcctggggcacagttcctttttgttctctcatttttgtcctttctttaataatgaacgtgtgactcagaggtttaatgagttacccggagaagttaaccagaagggaagcccattgagcagaggcataattaaaattgtgaatggacagaggaatacaatcattgtgggagacagggagcacaggaatgactcacgggttaggttgcttagaaaagggcctccgggacttaagttatttctggggaagatctggaaattgaaggaaaaatctggaactcttctacagtcaaaagatagagaggcgagctgggacctctcctttcactcctgaatgatttaggcttgtagccgggactcacttccagcggaaggtgaagaacagtgaaggctgaattccccagggagtcattacctcctctggtgctaacaccacaagtgtctaatgtcaactacttcttggtttggacgtttcttatagcaaattataacagtcaggagaagggaaaaagcaacgacagcatcatactggattttcactctttagcccaaactcagaaatattttgcatctgttgaggcctgacaggcagagaaactaaggaacataagcacacactggagatggggctgttgtagttaacagaaagtctgcatgcaaacttgaggcccattatctgtttcgtgtatgaaacggtccagggtgctgtgagttcttaggagaaatggaggctgatcctaagcaagaaaaacaatactccctaggtcaggatctctgtagagcaccagccacagaaagcactttccacctaggaatctattccaagaatttctgtaactaaagccagttcagatcagccatgctaatggagcagcagtacaacttcatcccaaatatcacatggtctaagtattaggatttattgtcttatttccatgcttgtgttgatgcttgaagagggccaagattaccctctctttcctcctggaatacagaggcaatcacttcagcaatgtggagaagcagcgatgaaaataaaaagagacaggagcccaagttaggtatgaagtttgaaatccatttttaattttgtttgaatataagcttatatggtttttgaacagcgctgggagcaaattattgaagctacaatatgaaccatggaggagaaggagttggaaggtgctctcactttcagatcttgctcatttaaataaatcctccaaactcctttgtctatgctcagagtggacaagaagtgaattgcttgggtggtctaaaagaccttaggatgggtgagaaggagcctaaaattttcttttagtcaaaactatatgtttattttgtaaatatatgtatgcatatatttggaagtgaaattaatatatgaaatgaattatattagcatgaaagggctcagtgatttatttttcatccttactcaatagcaccaaggcagtaatttatatttttactatactttcttaaagtctacctcccactaatctgtaagccactataaacaaaagttaaaagaactgtccagagtcccaaaaaaactaaaagttttgccagaataatctttatacaaataaaacttcattttatcaaataaagtagaataaaatccaaaactgttactatactcatcctgatacaattcccccaaagtcataattctctaagacactgctaaacaagtaggggttagtttctcatcaatagctgtcagtaaatagaaaactattgagcacagccctagtctaacacagtggagctgaaccacttggggttaagtcctggcttccacataaatagcttaggcaagaaaattaacctttctgagccaatcatgccctttatgctctataaaagcatctgggagaacatcatcatgcaaggacaaactgggcagaagaaagaacgaggaaagttcaacgtgcagtgatccctactgtctagattggacatggaaagaaagctcagaactctagtggaggaggatgatttcagaagggcttgttcatggtccagatctattcttagctaaaggataagatgaatacctaaaaggttataatgcaatccaaaaatccttctagatttagccaactctcagtctgaatcactccctgagtcagggtaggacatggcaccagctcccgtccttgaacaatgcagttacctgagtcagaggctattttgaaaagctaaaactgatctacatctggcatttcaagggcaagccaattcacccacatgcaatcaaccacaggtgagttttccttctattcatagatatcctggaaataggcctgaaagtgtagaagaggcaatgtggagaagcagagtttggcatatatggactcccaaaccactatgaactagctctgagactttgaaaagttattcaatctctctaaacacaaaacgtctcatctataaaatgggtagcagaaaagactgcccattttgagtggcacccagggcaagaaagagctgcggcagctcccggctgcaatacaagcagccttgccatttgggccacgtgaccaggcacatctcaaggcactaatggcagctgtggtgaatgaaggtgctgtgtggtgccttgggcatgctccagtagtgcagaccctgagggttcaggagcgagacaatgccattgtaagtaaaggattatacaccattctgaaaacagctcctggtagttattgaaacttggtgaaaactgaacatctgaacatgaaacagcaagtgaccatatgggcagagctgtaaatcttgaactaagtacagtcagatccagcaagtcataaggtcaagaaggcccagcaacaatcctcataaagtagaagaggtacaccccaggtttcacatgagcagggccgggggtcacaagctgcaggggcagatgaccaggcccacccccactatgtcactcaccactgttgcagcaacccttcttccctcctagatcacaactatggcccattcctggatgacagaaaaggaaaaatcccaaggcttggcttggctcacagataggtcagcttgcctcccaatgggcaaagcttcaggaagcaggactgttcacccactttgcatgaagagaaaagtggcccgtggtaaagacagatgtatacagactcatggacagtcgtgcaaggcttggatggtgggtcaggggcttgggtaaaactagattagaagactgaggaaatggaagtctgtccaagggcatgtggctggacctgtgggagtgggcaccaagtgacatgagctctgtgttgtgtgttaaggccaaccagtgagcactgatgatggaagaggtgcttaactaccactggacaggagacttcagccggcctctgtccttggctatccagggcttatgcaatggctcatgaatggagcagccatgatgacagagatagacgctacccacaggcccaacagcaggagctcctgaattctgaagatgatctagctcctgatgctgctaaacattcaaaccgctagccacaaaagccaattctgagaccctgagatggcaccatccttagaggagaccaactggcttgatggtgacaagttgatttactcccaccctgaaaaggacaatattttatcgtgattagaattggcaaatattccaggtatagatttatttttcttgcctgcaggtctcagccaccactactatccaaggactccaactgactgctatagctgagagtctgatcctgcataaattcacttcagacaaagaaatccaccttacagcaaagaaagtgcacaggaacacatgaccatgtgatccactgctcctgctacttaccacaccatccagatgctgctggcctgatcgagcattggaacaacctcttaaaagcatagttaaggggcaagcttggacataacaccctgtacaggtgaggcactgcccttcgggaagtagcatatactttaaaccaaagccataatatggggctggttcccaagaaacagaatgcataggtctgggaactaaggctgggggacaaagcaggagtgaccccactctttattactcccagtgtcccttgtggaatttgcacttcctacatgtagtaccttatgctccacggggctagagatgtgtccaccaaggaacacagtttttgctaaaattaagttatagctgctacctccaggttgctttaggctcttcattctaagagtaggcaaaaaaactgagttgtcttactggcaagggggtatgaccatgatcaatatgaggaagtagagagactgctacctaatgggagcaggaaggaataggtatgatgtgatacatatgacgggtgacccactagggtatctcctggtacttcaataaccagttttaactcataaactggcaagtacaacaacaacagcctgataagggaatggaaaccaggggctcagaccccctcaggatgaaagttgggccagaaagtccaccacactagccacattggttagccagaagtgctagccaagaaagaagaatctagaaagggtagcagacaaggaagatgatgagtattagtatggcctcaggaccaactgcaaccatggagacggtagtttgtcccaataacccaaaaattctgaccaagaagaatcctgcagaagttatcagaagatagagtaagcttacaatgagaaacaagtggttcttaatggtacaagcagtagctggtagcagaggcaacagttgccttaactagagacatctgagaagtatatgctccccactcctcccccaagtgtcacttgtgacagactgatacaggggaataagagttcaactcccttgcctcaagacaggacaacctgtatggcacatctcacactctagagctcctcgaaggattacactgaagccagacttcttctaaaaccacattttttcctagtttcttctctgtcctatactgctttctccctctgttggaggtttttcctaagagcaatcccttaataaacatcttgcacaagcttcccatctaggccctgtttctaggtgcccaagcaggatccacttttgcacgcccacagtgtttacagccccatacgaagtgctaaaggcatatgagagtttgaggtaatgtttagccaatatccactctcctccccctccactgtgggcagaaaatacttccctgccccactgtggcagattgttctttccaaaaatggctgcaacactatctctcatccctcatgtacttttcacaatgtgaccttcatatccatcccatggagagttgggatccatgtctcttccccatgaaagtgagcaggtttttgtgactgtttcaaccaacagagattagtagaaatgatgccatgtgaatttccaaggctggtcataaaagacaaggtaccttccacttggtcctctgcaacaattgtgccaagttctaacattccttgtaagtggcctgatagtcctaaagccaccaagctgtgtggaagctcaaatgagttcatgcggggtccacatgaaaaagctgagagatacctgggcagctccctgcaatgccagctccaaccatcatcagactgtaactgcatgagagactctgagccagaccactcagctaagccccacctgaatccctgacccacatcaatcaagagacacaataaaatgattgctattattttgagccactaaattccagggaatttttgccatagcaatagtaaccaaggcacccaatgacagtgagcttcgccacatcactgttttgggtcaatagcacttgcatcttgtatttctgccatcacaatgagaaaagcatgtcttggcacaagcatgacactggtacaagaaaattgagagatgtgtgtagctgacctggaaaaaacctgcaatctgggccagcccagcccagatcagccagaccttagccaactgccttgcagatgcataaatgacaaataaatgctcataactgtacactactgcaattgtgtgggattgcattgttgttatgcagcattatggtgataactgatacaaggagaaatatgaaagcgagagaaaacattccctgattccaagaataggatacttcttaacttgtaattaggtgggctttatgcttattatcaataacattgtccaatagcatctctatcccggaaaataatatcactctccaattagtaatactggtcccttttctgaggtcctaaatacataagacaaatgacttcacaggttttccttaatcaggtgcctttggcacctcaaaaagaagacaatggatagatagaaaatattcccagcaaacattagctagaattagaggcaccataagccaagaattaagttacaaacccctgaggtaagagatcagggaatcccataaaaaattggaggggtactgatgcatctaagcagtacattagggttataagtaaaaaagcttcaagagattcacttaagccagaaatataggaaaataaactgcaatacaaaagaggaaagggcaataaatatttaccaagaatgctcaggaccaaagtgggaaaccaagaaaacagaagagaggccaggcccagatctccagatcaaaccaaacctcaaaccagagcttactcaggtcagccttggccaaaaggatttgacttttcctggaaccagtggtttgaaaatcattcatagcacataaagaataattatcgcccagtgtcttttaaaaatggaatacaagttgatcaggaaaaataaggaaatgtcataccaaattactcgacaattcatatttggattttcatgttaatttcgtaaaacacatgtcatttgtgaacttactaggtactccctgggacgtcactagacattgagtgtatgaaagttattatgctctttctctggttcaaaaagttggaccagaagggatgctggaactcttactcatctttgaatggctttggggatactgacttgattctacattcaaattcacctcatcacactaaccagagtggcaaaggtgttgagaatatcaaagtctcttggaaagacaataataaaaaaaatttctgaaagaaagatgtactagagccccaccgaactcaagccaagcattttatcactactaccctagaggttgaggtacacaaaacccattgttgcagggtttttgaacaacagtacaagtgacattttgaaccagataatttttcatcatggagacccgtcctgtgcattgcaggttgtttatttagcagcctccctggcgtctactaactagatgccagtaacaccttctcctcacctgcagatatcaaaaccaaaagttgtttttttttgttttttgtttttttgagacggagtctcgctctgtcacccaggctggagtgcagtggcgcgatctcggctcactgcaaactctgcctcccgggttcatgccattctcctgcctcagcctcccatgtagctgggactacaggtacctgccaccacgcccagctatttttttgtatttttagtagagatgcggtttcactgtgttatccaggatggtctcgatctcctgacctcgtgatccgcctgcctcggcctcccaaagtgctgggattacgggcgtgagccaccgcgcccggccaaaagtttttccaaacattgccaatgtcccctggaggcaaaatcactccgagttttttatccttgcgatagtttgctgagaatgatggtttccagcttcatccatgtccttacaaaggacatgaactcatcatttttcataggtgggaattgaacagtgagaacacttggacacaggaaggggaacatcacaccctggggcctgttgtggggtggggggagcggcgaggggggagggaaagcattaggagatatacctaatgtaaatgacgatttaatgggtgcagcacaccaacatggcacatgtatacatatgtaacaaacctgcacgttgtgcacatgtaccctaaaacttaaagtataataaaaaaaaaatcactccaagctgataaccacttcattggtggaacctagccttaaagggccagcttcctaagcatgaagaagcaaaatgtctttgggatgtaagcagataaccaatgggacaagcttatattaaggcagtgatccaaactttttttctgccgaacagattcaagttcacaaacagtcactcccggacatactcagattctgacgtaatatgactagagcttatataagctctactgctttattctgacccaagaaagagtattaaaatgcaagtgagtgaaaatgaaggtgttatggattgaatggtgtccttccaagaagatatgttgacgtccttcctaacgcccagtcgttcagaatttgaccttatttggaagcaaggtttctgcaaatgtagttaagatgaagttattaaaggaaaacttgtggaggaggggccaagatggctgcctagaagcagctgcagtcggcagctcccactgagaagaacgaaaatggcaagtgaatcctgcaccttcagctgaggtatctatgttctctcattgggactgactaggcagttgatgtgacccacgcagagcgaggaaaagcaggctggagcaatggcccacctgggagccacacggggaaaggggagctcccagccccagccaagggaggcagtgagtgattgtgctaccccacctgggaaaccatgctttttccacagatctgtgcaacctgtggatcaggagatcccctcatgagcccacacaaccagggtcttgggtcccacacacagagctatgcagatgctcagtggccactggcagcaggctggagactgcctaagatgaccaagttcctggggggaagggcagctgccatcactgtggctttagactgccatttttccccactggtgccggggagactgggtagtttggaccgggaggaattcccccacaggtgcagcacagcagctgtggcagatcatggccagactgcttctttaggtgggatccagatccattcctcctcaccaggccagaatgtcggcaattccagcaaggggtttaggacaaaactctgatctccctgggacagagcccctggggaaagggatggccacagtatctgtggttcagcagacttactctttccttcctgctggctctgaagagtctgggcagtctgggcaagcgggattcccccaagagcagtgcacccgttctgccaaggggcagccagagtgcttcattatgtgggtccctgatcccatgcctcctgactggtgagacccacccccctcaacaggggtcaccagacatcttatacaggagcattcccactggcatcaggttggtgcctctttgggatggagctcccaggggaaggaacaggcagccatctttgctgttctgcagcctccactggtgacacctctaggggccaaggtgaatagggtctagagtggacccccagaaaactgcagcagccctatggaagaaagtcctgactactaaaaaacaaagagaaagaaacaacaacatcaacaaaaaagatcccacaaaaccccatccaaaggtcagcagcctcaaagactgaaggtggataagcttacaaagatgagaaagaagcaaaacaaaattgctgaaaactcaaaaagccagagtgcctcttctccaaatgactgcaatacctctccagctgagatggatgaactgacagaagtaggcttcagaaggtaggtaataataaactttgctaagttaaaggagtatgttctaacccaaggcaaagaagctaagaagcatgataaaacatttcagaagctgttagccagaataaacagtttagagaggaacataaatgacctgatggagctgaaaaacacatgagaacttcacaatgcaaccacaagtatatcaatagccgaacagaccaagtggaggaaagaatctcagagcttgaaggctatcttgctgaagtaagacaggcagacaagattagaaaaagaagactgaaaaggaatgaacaaaacctccaagaactatgggatcatataaaaggaccaaacctacgactgattggggtacctgaaagggacagaaagaatggaaccaagttggaaaacatacatcaaaatatcatccaggagaacttccccaatctagcaagacaggccaacattcaaattcaggaaatccagagaactccagtaaaatactccatgagaagatcaaccccaagacacattatcgtcagattctccaaggtcgaaataaaggaaaaaatgttaaaggcagccagagagaaaagccaggtcacctacaagggaagcccatcagactaacagtggacctctcagcagaaaccctacatgccagaagagattgggggccaatattcaacattcttaaagaaaagaatttccaacccagaatttcgtatctttccaaactaggcttcctaagtgaaggtgaaataaaatctttttcagacaagcaaatactgagggaatttgtcaccagcaggcctgccttgccaaagctcctgaaggaaccactaaaaatgaaaaggaaaaaccattaccagccactaaaaaaacacactgaagtacacagaccaatgacactacgaagcaactccattaacaagtctgcaaaataaccagatagcatcatgatgacgggatcaaattcacatataacaatattaaccttaaatgtaaatgggctaaatgccctaattaaaagacacagaatggcaagctggataaagattcaagacccatcagtgtgctgtattcttttttttttttttttgagatggagtctcgctctttcacccaggccagactgcggtggcgccatctcggctcactgcaagccccgcctcctgggttcacgccattctcctgcctcagcctcccgagtagctgggactataggtgcccatcaccgtgcccagctaattttttttttttttgtatttttagtagagacggggtttcaccatgttagccaggatggtctcaatctcctgacctcgtgatccaccctcctaagcctccaaaagtgctgggattacaggcgtgagccaccatgcctggcccagtgtgctgtattcaaaagacccatctcacaggcaaagacatacataggctagaaatagatggatggaggagaatttaccaagcaaatggaaagcagaaaaaaagcaggggttgcaattctagttcctgacaaaacagactttaaaccaacaaagatcaaaaaagacaaggaagggcattacataatggaaaagggttcaattctataaaaagagatagctatcctaaatatatatgcacctaatacagaaacacccagattcataaaataagttcttagagacctacaaagagacttagactcccacacaataatagtgggagacattaacaccccactgccaatattagatcattgagacagaaaattaataaagatattcaggacttgaactcagctctggatcaagtggacctgatagatatcttcagtactccccacccaaaacaatagaatatacattattcttatccccacatgtcacttactctaaaatctatcacataaatgaatggaagtaaaacactcctcagcaaatgcaaaagaactgaaatcatagcaaacaatctctcagatcatagcgccatcaaattacaactcaagattaagaaagtcactcaaaaccacacaactacatgaaaattgaacaacctgctcctgaatgattcctgggtaaataatgaaaggcagaaatcaagaagttctttgaaactaatgagaacaaagagacaatgtaccagaatctctggaatgcagctaaagcagtgtttagagagaaatttatagcaccaaatgcccacatcaaaaagctagaaagatctcaaatcaacatcctaacatcacaactaaaaacactagagaaccaagagcaaacaaaccccaaagttagcagaagacaagaaataactgagatcagagcagaactgaaggagatagagacacacaaaaaaaacccttcaaaaaatcaatgaattcaggagctgtttttctgaaaaacttaataaaatagaccactagactaataaagaagaaaagagaagaatcaaatagacacagtaaaaattgataaaggggatatcatcacagaccccacaaaaatacaaacaactatcagagaacattattcatataaacacttctatgcaaataaactagaaaatcttagaagaaatggataaattcctagacacatacaacctcccaagactgaaccaggaagaagctgaatccttgaatagaccaataattaattctgaaattgaggcagtaataaatagcctaccaaccaaaaaaagcccagggccagatagatttatagctgaattctaccagaggtacaaagaggagatggtaccatttcttctgaaactatcccaaataacagaaaaagagggactcctccctaactcattttatgaggccagcataatcctgatagagatacaacctggcagagatacaaaaaaaaaaagaaaaagaaaactttgggccaatatccctgatgaacatcgatgcaaaaatccgcaataaaatactggcaaacaaaatccagcagcacatcaaaaagcctactcaccacaatcaagtcggcttcatccccagcatgcaaggctggttcaacttgtgcaaatcaataaatgtaattcatcacataaacagaactaaagacaaaaatcacatgattatctcaatagaggcagaaaagtcctttgataaaattcaacatcccttcacgttaaaaattctcaataaactaggcattgaaggaacatacctcaaaatagtaagagccatttatgataaacccacagccaatatcatactgaatgggcaaaagctggaagcattccccttgaaatctggcacaagacaaggatgccctctctcaccactcctattcaacatagtattcaaagttctggccagggcaattaggcaagagaaagaaataaaggttattcaaatagaaacagaggaagtcacactggctctgtttgcaaatgacataatcctatatccagaaaacaccatcaacttagcccaaaagctccttaagctgatacacaactgcagcaaagtcttaggatacaaagtcaatgtgcaaaaatcacaagcatttctatacacaaacagcagacaagcagagagccaaatcatgaatgaattcccattcacaattgctacaaagagaataaaatatgtaggattgcagctaaaaagggaagtgaaggacctcttcaaggagaactacaaactactgctcaaggaaatcagagaggacaaaaacagatggaaaaacattccatgttcatggataggaagaatcaatatcgtgaaaatggccatattgcccaaagtaatttacagattccatgctattcccattaaactaccattgacattcttcttagaattagagaaaactatttcaaaatccatatggaaccaaaaaagagcctatatagccaagacaatcctaagcagaaagaacaaaactggagacatcatgctacctgagttcaaactatactacaaggctacagtaaccaaaacatcatgatactggtacaaaatagacacatagaccaatggaacagaacagagaactcagaaataagaccacacacctacaaccatctgatctttgacaaacctgacaaaaacaagcaatggggacagaatttcctattaataaatggtgctaggagaaccggctagtcatatgaagaaaattgaaactggacccactccttataccttatacaaaaattagctcaagacgaattaaacgcttacatgtaaaactcaaaactataaaaattctagaagaaaatctaggaaataccattcaggacacaggcatgagcaaagatttcatgatgaaaacatcaaaagcaattgcaacaaaagcaaaaattgacaaatgcgatctaattaaactaaagagcttctgcacagcaaaagaaattttcatcagagcagacagacaatctaaagaatgggagaaaaatgttgcaatttatccaactgaccaaggtctaatatccagaatctacaaggaagttgaataaatttacaagcaaaaaacaaccccattaaaaagtgggcaaaggacatgaacagacacttctcaaaagaagacatttatgtggccaacaagcatgaaaaaaagctcaacaagagaaatacaaatcaaaaccacaatgagataccatttcacatgagttagaatggtgattattaaaaagttaagaaagcaatgctggtgaggcagtggagaaacaggaatgtttttacattgttggtgggaatgtaaattagttcaaccattgtggaagacagtgtggtgattcctcaaagatctagaaccagaaataacatttgacccagcaatcccattactgggtatatactcaaaggaatataaattattatattataaagatgcatgcatgcatatgttcattgcagcactattacaatagcaaagacatggaatcaaccaaaatgcctatcaatgatggactagataaagaaaatgtggtgcatatacaccatggaataccatgcagccataaaaaggtatgagatcaggtccttcgcatggatgtggatggagctggaagccattatcctcagcaaactaatgcaggaacagaacaccaaacaccacatattatcttataagtgggagctgaacaatgtgaacacatagatacagggagggaacaacatacactggggcctgttgaggggagagaggcaggggaaatgagagcatcaggaaaaatagtgaatgtgtgctgggcttaatacctaggtaatgggttgataggtgcagcaaatcaccatggtacacatttacctatgtaacaaacctgcacatctggcacagtaccccgcaatttaaaatgaaataaaattaaatggaagatgagctcattacggtgagccctaatccagtatgattgatgtctttacaaaaaaaagtgggggagaatttggacacagacttaggcacagagggaggactatatgaacattggagcaaccctgccacaagctaaggaacatctagggctaccagaagttggaagaggcaagacaggatccttgccctacaggtttcagaggaagctgcctggccctgctgacacctttattttggatttctggcctccagaactgtgagacaataagtttctgttgtatatagatttgatgtagaaaaaaaatatagacctgatttaatttttaaattggtataatttcaaaacattagtgttttactagctgcaataaattacttgctgtgcagttacaactgatttaagccaccagtgggtcacaacacaatgggaaaaactgccacaccgcagggtattctgtgttgtgcctcagagaaatttgaaatcgaatttataaaagttattcacttggaccacagtaatctggcatctataaaaatgtatacagtctatcaataatcttaacaggattggggagggggtcagaaaacagatggtcaaactactagtggctccccacttcctacagggcaatatccaaactccttagccaagcatgaaatgccctttgcaatctgatcaccgcctattttccagattcatctttgccaaatcccctcacacctgccttgttccatctggagctgatctggtgccccccacccaagtgttttcatgtcaaggtacacacagaagatgataatatttgagggtgcactgggaaaacagacaaagctgtgtctgatgacagctggcttgggagctccagtcgccccagaccccacctggcagcccaaaaggctaaaaagatcaataaattggtaaacctgtacatattcaaagcatctcaggataccaccacacactactcagttaggaagccctattctaaatccactataatccttctctaacctatgatggtttgaatgttgtgtctcctccaaaattcatgttgcaacttaacccccaatataacagtattaagaggtaggaccttttggtggtgatagaccatgacagctctgctgtcatggatgaattagtgccttgtaaaagggcttgagggggcaagttacccttcctgtcccttctaccatgtgaggacacggtgttcctgccctccagaggacgcagcaacatgttgccatcttggaggcagagagcagccctcaccagacaccaaatctgctggtgccttgatcttggacttcccagcttccagaactgtggaaaataaatattctttataaattacctactctctagtattttattatagcagcacaaacagagtaggacagtgcctttgttttcattcaggaagtcctacctctcaccaagttcaccactcctccaccttgcaaactgctatttatccttcaaaacccagcccaatgaccatttcatctatgacgtctttccacctcccctctgctatactcccactgtacccagtaacaagatccatgtcatggtccttgccatgtggggctgccattgcagctggctcacctagaatgtggtcttccagggtccaggaaccattaggagccaactgggcctatagtgatacagcacatatttattgatctcctgttagaggcaaggcagtgggccaggcatagggactcaagggtagacatggacaaggagggtccctgccctcctagagctcatagcccagtgagggagatggacattaaactgccttccatgcaattgattacttcattacaatggtgggacatgtttcaaaagagaagtacaagcatcaataaatgcacataagttgacctgatctactttaagagtcatggaaagcttccctgaagaggtggcatgtaacagatgagcttcaaaggataaataggaattaagtgaagagaaaatgggtgtgaagtaagcattccgtgttccaaaccaagcattctggttcttgacatcttcacatccacaggcctggccaaggcagatgctaaataaatatttactgatttaaattctttgaaaagtttgagtacctttaagcactttttctctgagtgggttcttccaaaataataattattattttggaaactcttttcaataattcaaatgtacaaatatttattgaaacattattatataatgcaagtctcctagagctcaaggcaaaaagatgagcaagaattttccaggcaaagaagatagaagaaggtattccaagcaaagtagaaaccacatgtgcgtgcacacacacacacacacacacacacacaattatgaaagcaagaaagcacacagtgtggtctggaaatagcatggaatttggttctgatgagtaagggaccttggtaaggaacaaagagatcagggtgtatataagttatctattgctgaataagaaattactcccaacaacacacatttattatttcacagtctgtggggtcatgaagccaggcatggcttagctgggcgttcattaccagcttcagggtctcttgcaaggctgcaaccaaggccttggccctgagactctcacaaggccttacccaagatacctgctagagccgcagtcatctcaagatttgattgaggtaggatctgcttccaagaccattcagtggttgtcagcactcataggctgttggcaggatgcagttccttgtgggctgttgggctgagggattcagttccttgccatgtgagcgtctctgacatggtaactggcttcaccaatggaaagagaaagagagaggcagagacagagacagagaggctgctggcaagacagaaattatagtcttttgtagcccaatcacagaagtgatatcccatctctttttctctcttttattcattgaaagcagttcactaggttcagcccatatgcaaggaatgataggagtcagaggtcactggggacccaatggaagaatcggaagaagaggaaacagcataggagccagtggcaagggcagggcaatcggtaagactatcatgaggccccagtgacaggagaccctgagaaagagcatccaagaaaggatggcgtcaccagcatcaatgctggagggaggcctaggagacaactgcagagaaggtcattgaaaatgtcactgatgtcactggagggaattcagtggagggatgtggaaaccagattatgcgtgcaggacagagggcatgcaaggtgaggggacagagagaaaactagtgtcttcaaagaaatggggcagtcaaggcaagagctggcatagagcagcctcttaagaagagattcttaggctggaagagagctggatgcgttcacagcaaggagggcagggggtggaggtagagactggaaaaagccaaaggcacaagagagaaaaggggcaatgtctatttttgtgtaagattcccaaagagctcaggcagactaataacaggaatttagacctggaggggacagagaagacatctggttttcctcctcttccgactcctcagttactgctaccagctctactctgtgcccatcctaggagcagttggttctcttccctcccgttcctgtccaaacccttcccttctaacacttcctctaagctggcttggccactcccatggtttcagcatgctatcacacctggccccagctcacccctctggcttcacatacatccataaccccactccaccccctacacacacacacacacacacacacacacacacacactgtatcctctagccattctgaaccttaataattcttcaaagctgtgaagctctttgtctctggtccctgggatgtcctgtgtgctgtgctctctgcttggaatactcttttcacacccctcttcacatgaccagatctcagcttagatgcaacctcctccaggaagccttcctgaacccccactgtgtaatcccacaggacagtaaactctgaattgcagttgcctttttacttgttggccttctactggacagaaaactctgtgagagcagaggccgtacctatggtagtcaccatagcttcagcatctagtacagcggttggctccacacaaatttattgagagtagcagatgctctggtgcatggccattatctccacgcaacctgcccttcaggactgaggtgaagggctgaggtatggaattctctccactgctgatggctctcagctgagtccatttctgggcattgctccagactgaaaggagctagcttcccaagggccacatcccttcctgagagcagccatgggtccaatgcctactggcacagggatgcaagaatataaagacctggagacctggcccccttgcctcaatttgggacaattatgaggagccatccaagcttccaagcctcctgtgggatcagcaggggcctcactgtgaataacatcacagttcaactgcccccctctacccaatcctgcttccctcattcccccacagatgttgacccagagagcactcctcaataaacctgcaaatctgcctgcaaatctttatctcagagttggtttcccagggaacctgacctgaggctagtggatacacacaaatgaatttgtccaaatcactcccccacagtaagaatgcagcaggaatgcccaccacaatgtttccaggcaagctcctatggtagcagatagtgggccttcaggagatattgattgaatgaatcaatctggtcattgagcccttgaattcttcctgtgactctcaacacacacttgatgaatctggtttgaattacagtgctgtatttctttggaagtacaaaaaacttgatttatacaatttttatagttcattcagttggttggttaggatgagtctatctgagcacagtatagttgaattctgctgctattgctagaaaagaaagcataatgccaaggccgctctcaaaggacctttctttagacctagtaaaccaagactgaaggcagaggttccagaatgggtgatatggaccagaatcctggtgctacttaccttgccagggagcacataaagagagtctgtggtggccaatgtccatggagaggtgtgcttttggaggacagattcatccaggagtgggtgaaccagcacagcatgttcagagatcaagggccctactgttggctcacgagtagaagaacacccagccagcacttccctaagggcaaaccattctcagccctgaatgtgaacagcacgtaccaaactcagaaattcatctcaaaactagtggtttcatccacttgattgatgttctctttgccctctaggtcaaccacgcttacgtctacatctgtgattagagctatgacccactgaagtcaatggaaaagaaaagagaggataatttttgtgtctattccacgtgtgacttgaaagtttaccaccactcttgccgtacctttcatctgaggatctcctaaatacgtttgtggcgtcattcattaattcctttcacttctctctaaagcactattattcttctcctgagacggagtactttcaggctcagaggggatgagcaattggctcaggtggaagcattcgatgccagaaacacaactcggaactcccaatccttagcctgccttgctgggctagcttgttctggactgcttcccaactacagattcacaaacctcccgtctgttctaattctgcctctaagaattcacacctgagggtgtgacaaccctttctttgcctgataatttatataacatgcaatttccatattttgctatcttaaaagtaagcatgttatacaaatttatggtatttattttcaagcatgttcttagatactgcaattcagactaaatctaaagttatttatcatagtaattcagaactgctgttatagcactaggtttgctgcagatgtaattagttaagatgagattatacagtagagtgggcccctaatccaatatgactgatgtccttataaaaaggggaaatgtgaacatagacacgcactcagggaggacgccatgttatgctgcagtagttatgctgccacaagccgaggaatccgcagaagctgggagggtggaacagaccaccccttgtgccttgagagggagcacggccttgtggacaccttgatttcagacccctggcctccaggactgtgcaaccatacactgctgttgttctaagccacccggtttgtggtactttgttctggcatctgggagactaatacaacagcagtactcaacatatctctaatgtttgcaatgttaaaaccgtaacagtggtcacctgtttataaccaaaagcgaaaggatggacatgagctgagtggtggggagaatgagttggggcctatggagtgtgttataacagcgtgagtggactaaggtggagagagggagagaaacaaggtaaaaataaaaatcagacaaggagttcaggatagggcttgacagggcagtagatgaagggttaggatgagaactattaccttccatggctcctccaactccacaagctagaggctccaggtggttcttcccttgtgtgagctgccacctgctgctaccaccaaataagggaacacagctaccccaggagagaggtgtgccccacgctcccccactccccagctgcttgcttgcctgcctgcctgcctctcagcctcaggaggtcccacctgccagccgccggtggagggagcaggtgcaggcagaggtgagtgtcacatccccccatctctcctgcagctcccagactgattgatgattaaacctgagcatgaaagaggaagaggactaggaagttcagaaaatgtcactcattcatcagaacatctgcgaataaagcagaggtctgaggagtaatatattccttgaaaagctgcaacatacaaggacagtgctgtgagaggaccagatgctgtgagacccacagcataagtgacacattccatgtttccttccaacacccaaaggcacaatagtgagactggcctgctgtgtgtgtcccactgtctgattcctccagcaatcctgcctttccctgaccctgctcatggtaatacacctcacgtggatgcttcagctctagagtcaaactttagaagcatgcaaagatgtgaggtctacgaacatcatgtaactggggaatcacctcaaacaatttcatgtcaagtaaaaaagaatcaatcataccaataggcaatgtctccgtaataaaagaactgaatagttcctcctagaaactgtgtctgccaatactttttattcctacttttttttcccattaagacccaagtctatgtctttactttctggtctaaattatagaatgtattagtttacaaccaaagtgagcacttcccttacttggctggtgcctcagcctctcaggaaggtcctaaggaatccactaggttggaggttctcaacccttgtggatctccaagctgagaaatacaaccccctccagtcagcagctgtgggcaacagctgaactgtgtcccccaccccccaaattcatatgttgaagccctaagccccgatatgactgtctttgtagataggggctttaaagaggtaattaaggttacatgaggacataagggtgggtccagtacactggtgtccttataagaagaggaggagacaccagggtgcaggtgcacagagaaaagaccacaggaggacacaggaggcggctgtctgcaagccaaagagagcagccacaggagaaaccaacttgtaacaccttgatcttggacttccagcttccagaacttcgagaaaatggatttccgttgtttaagccacccagtctgtggtattttattacagcatcgctagcaaatgaataccaatggtaattttcaaccttcattcattcactcagcaaaggagcagccactcagtgccaggcactcttctgggtactaagaatacagcaataaacaaaagagacagagccatggaggaggagaagcatgggagccttcctaaaatgcaatattagaatcttctgctggggacaagtagagtttgaaaaggtatgcatgcaggatctagtttagacttcaggagccaccttcccagtccttgcccctcacccctgccccaacgatcactgcaccagactgacgtgttgaggacaggaactgcattgtcatctttttaaacagagtctgggatgcaggcaatgtcaagaaggcatcctctcttccctgtgccagggacccgattccccagcacccctgctttcacctgaggttctcagcacagggcacctgcaccagcaacatcagcagcccccaggaacttgttagaaacacaaattctcaggccccacctctaccctcttggatcacaaattctagggacccagcccaagcctccaaatgattcttaggcagatgaaagtttgagaaccactgttatccaccctctggcattcaccctgacccacaacttggttctcgctgctctcctcctcctccttctcataacagcagcaatctgtttcttctgccttctgtatgcctggcccggtgtgagacattccacatgctggctcgaagaccatcagtactcacaaggttgagaaaatcatccccatttactgaggaggaaactgaggttcaaagaggcttagtcacttgtccacaagctctcagctaagtaatgggatctggactcaaaaaggccaaagtgcacactttttcttcaggcctttcctatttcactgtcctgttctctctccctattactgtcactcactctattttcttttctttttttgacatatcattgcaccacacaataatcagctcctacctggtctaatgggaatcagctcacctgagccttttgtgatctcatatccagggcttagcaagagccacattctgaaagtaacactggttgatttctgtgtactcagaaggcccatttacactttaacatgagccctccttccttgctgcatggtgcattactaaattccctatagatatttgggaaaatttgatattcttcccttctttataggagaaaaagtatctactataaagaaagaaactaaaaacagtctgctactagttatgggagcaggaatatgaatactataaaatcatattttctattgccattttagacttgcatttggggagcagaaaggtctgagtgaatgaatctgcagtctggtgaaggtgcaatgcctagcaaagaagcaaggcagggctttgtgtctgctctaagccaatctttaagaaacaatggtatgtattggaaggatgtggagaaacaggaagactctgacattgttgacagtaaggtaaaatggtgcaaccacttgggaaaacaatttggcagtttcttaaaacgttaaacataaaacttaccctgggacccaggaattccctagtaagtatctaagagaaacgaaaaaatatgtccacgtaaagacttgtaattgactgtttatggtagtattattcataatagccaaaaggtataaacagcccaaatgtctatctactggtgaatggataaacaaaacaagggatattcatccaatagaatacagtaggtagtataatgaaacatactgatacatgctacaatgcgatgaatgtcaaaggcattctactaagtggaaaaaaagagacacaaagactacctattatatgactctatatgaaatgcccaaataaggcagatctatagcgacagaaagtagactagtgattgcctgggtctggggatggggtgaagattgcctacaattgggcacaacagatcttttggggatgacggaaatattctaaaactgcaatgtgtgttggttgcacgactctgaaatcattatattacacaattaaaattggttaattttatggtgtcaaattatacttcaataaagttgttattaaaatggggaaagggtgtgaatggaaccgtctgagggccatgggctcgagctgtttgattcagtataaccaaggcttattaaccctaaaccacatgtcagcgacaagaagtagcaagctgttttcttctttgataaatcccttgacagacaattcagaggaacagtctccttggagcagaggttctgctgccaagcaaatactccatgaggaatgttaggaggatgggcctgctggtgtctgggccagcaggagagaaagcaaggcaagaccagtgcaaaccgtgcccagcagggctaaagtgggtatcgttgcacagctgggcaagcttgagagaggcctggctcagaagcacacatcaggattcgcttctgcaaggtgtgggtgagctctggcaagctgggcccagaggcaaggagagaagcaaagtcctccccttgtgagaacagtgagggtggaaagcaaacaacaagaggaagaaggtacgtgtctccaaagggagcaagctcttacagggagcttggcaacatttgcatcagcctggtaaaacatcgaaataacaacacctaaaatagccctataggaaccttgtcagaaaataaaggcaagattcctgaaggactctgccttcatccccacggagctgggaagcaaacggggaaatgcaaaccccatttatagggtcacatttggaggagccggctccgtcgggggcaggagggaggaagtggtggggaggctcagggtgtgtcagatccagcctccccacctctgctgagctggcggctggactcaaggcctgccacgtcttcctgctctgcagtgcactagctgtgtgaccttctgcaaactgggtaaccacactgcctccccaccccatctcctccaaggtaaagtggagattttacctgctgcaaaaagttgggtgaggactgatgagagaatgagggttgataagagaaggtaaggcattaaaggtaaaggaaattgcgttttgttatatatataaacagcttctcactgctttcgctggattcatcattctgggactttctgtcttctacatacttttaaaggtgaaggaagagaagggaaaatgtgaaagacaatattccagtctccactgaatgtgtgggcacttcagtctcgtggcaagttcaggccaaggggacagctgctgaaatgtgggggtccaggggctgcagaggggttctgctgcctagcatttaaaagaagagggaagtaaatatttctgaggtgagtcagtaaaagtaaagaaatgcttacttcttgtaaatgagaaggtggcagatgaacacatgagggaatgggcatatattcatcccacttgtaaaacatacttcaaaggaggtagttccaacatcaatttctttatcgtggtactttataagatttccttgtttgcttggttttaattaacagcaaccatacagcattgaaagcgaagccttatccatcatccacgtcaaaggggctggaaaggtccgaatccacctgaatgacaactaaagtttcgagaatgggaatgcaaaaggggattcaaaggtaacaaaatccttgtccttccattttcttcttccgcacaaacaaaagcagtttaatggcattgatggaactgcgtccctctcatcttccccttgcctgctgttgtactcaaaggttccagaatacatgagcgcagccctaccttattttgatgaacagctacagccacagcagaaatcaacagggtttggagaataaatctgataaatcgtgtccttcaaaaagaggaatttatgtaatgctttcagttttatcttgtatgacctacccatcatgaaactgggaaactgtaatttatttatccagtgaagacaaaattgattaacaggtcagtgtaaatgtcagcctgggggaattaacaaatgtagttccaccgggtcagttcttgcccagtactatttaacatttccattaattacttgccgacagaattggtgatagaataggaggtgtattattaaatctgccaatttttaaaaagtttaaatatgaataggtcttggccaattgaaagacagggagggactatttggtatcctcaaggctctgcctggtacagagtaggtgcctaataaatgttagttgaatgaaacaaatgccaacaatacaaagtctagtgtgagggagtccctagagcagcggtccccaatctttttggcaccagggacaacttttccatagaccggtagcaggggaacggtttcaggatgaaactgttccaccacagatgatcaggctttagtttgattctcaaaaggagtgtgcaacctagatcccttgcatgcgcagttcacaatagggttcacacccctacgagaatctaatgccctgctcatctgacaggaggcggagctcaggaggtaatgctcgcccacctcacaggctgtgcagcccagttcctaacaggccacagaccaatagcagacccctgccctagaggaagaaaaggagaatcattaacaacagtttttattaatatctactataaatttaaagccctatcaaaaattacttacagcaatgaaaccatgaccgatccaaatcaagaagatctagacatcagtaatgcacaaaaatcaaatttaacaagcgcaaacataaagtaaggaacatactcatagttcaaaacatgatcacactttttgttatccttttccttatgtgcaggcagacacacacatacacatacacatgcataaatatatattatttctggaatataaatgagaagaaaaggtatggaggaacaaccaccaaagattaactgtctgtcttagcagaaaatagcaacagctaataaaggtgcagctgggtggagaaaaaagaaaaacagtcatacctaagccaaacccctgaagccacaagtcacgcactcctaagtggccgactcaccagcaagcaggatgggatgggatgtcagagctcaaaagccatcaggataccagatccacctctttctcagctgaggggctcctggagttttgtttggtttgtttttaattaaaaagacagaacaaaaagaaaaaaaaatgtcctgatgataagtaacctactggaaggctccgtctgctacccaccgtccataggcaacagcaggatgtaacaaacatacagcctctcatgtacaaaagggagaattcaagtgatgctcagataaagaagtagaacaatgaagaaaaaaaatccatactcatattttttttgagagagagagagacagcatttcgctctgttgcctaggctggagtgcaatggcacaatcttggctcactgtagccttgaactcctggactctaagcgatcctccctcctcagcctcctgagtaactggggcaatgaaattatgcacttagctaattttaaaacaagtttgttttgtagatacagggtcttgctatattgcccaggctggtcttgaattcctggccttaagtgattctcccactcagtctcccaaagtgctgggattatggacatgagccactgcactgggcccatactatgtattttttggccaaataataaacctggatagaacttttcttgagaaaaaaatgagcaagcagacaatacagaagggctattcaataacaacattttgttatctggagaatatgacctgaatgggggaaaaaagagattgaaactgtcatatcaaagttgacatgatagccctaagggagaagtgaggaaaaaagcaaccaactcagaactcaaaggtgcacaacaaatatccagacgtggaatgcacatttcagaaagcaaagtctgaaggagcactgacttgagagaagggaaaagcaatcacccagaagccagagagaagggatcgaacgtttaaaacacaacccccatggaggacacatggcagagaagtttagtttattgtaagaaagcacactgaccactactagaaagatctgattttgctaatggacagataacagggggaagggctactgctggccacaggatggagagtttagaggtaactctgagacatcatttcattatatatcccacagaccactttcacatgccaggcacccagctgggcccacagaacaaaacaaatgaggctcctgccctctaggggcatataatcttataaagtagcagaaaataaacaaataaatacaatgattataaattttcacaggtgctatgtaagaaataaacaaggcactaagtcagaggactaaaaaaaaaaaaggacctgctttagacagaatggcagcgaaggcccttcccaggggatgactgattgattgactggttggttgattgattgatttttccaaggagacaactttcaagttgagatatgaagggtgggaaggagctagccatgggaagaatggaaaactagttccaggttacgggcacgtgaactatgctaagcatggtgagtttgagaagaggatggattgtagtgagcaagatgacagtaccacaaaatgaggcctaagaaggaggcaggagccaggacatgtagaattttccaggccatagtacagaacatgaagagtctactcttagttcaggctgctataacaaattgccagagactgggtggcttataaacaatagaaattatttctcagagttgtggaggctggaagtccaagatcaaggtgctggcagatccagcatctggtgagggcatacctcctggtttgcagatggccaccttcttgctgtgtcttcacatgccagagagagaggaagcaaactctcttcttataggtgtctcttcttataagggcactaaccccatcatgagggcggattaattaattcccaaaggtcttacttcctaataccatcccattgagtttagggtttcaacatacgaatttgcagggacacgaagatgagttctgctaaatatttcttgtaagtccatgaaaagctgagttcctcctgtttgtcagatctgggggcgaggaacagcaatagctagaaggaggaaatgcccagtactatcccagttagctacaaaggagagtggctcaaaggaggcccttgtcagatgcttgtccatgtctagttggctatggagtagatttgactcctaatactgaaatttctaaaagttttgcctggaaaactttcagtgcaaggctaaacattaagtctcttctgtgaatatgaaagtcagttttaaaaaaaaagatccacccatgttaaacctgtcacagatttagtcaatctatttcaaagttaagatctttatagactaggaggcagccatctggaaagtttgtggagccaagatctagatcccttatccaattacatgatgtggctcaagtcatgctatctgtaccttagtttcctcatctttaaaatcaagggaagagaatgtcctgctctctaaggccctttcagaatctaatatgtagaaaatgtctaaaagatgagagcctgcttatataactatctagctgaatgttcagaagtggaaggaaattttggtgccaaactaaaataaactgctcaggtttttcttgcacaagatgtaaaatattattttaccaaaacattatcatattcattttcataattacaaggcttccatgcataacactgaagttctataagtatttgttgaacaagtggtacagctttactgacattacacttttgtgttgaataggacttttttttttttttttttttgagacgcagtcttgctctttcgcccaggccagactgcagtggcgctatgtcggctcactgcaagctccgcttcccgagttcccaccactctcctgcctcagcctcccaagtagctggaaatacaggcgcccgccaccacgcccggctaattttttgtatttttagtagagacagggtttcaccgtgttagccaggatggtctcgatctcctgacctcgtgatccacccaccttggcctcccaaagtgctgggattacaggcgtgagccaccgcgccctgccgaataggacatttttaacacaaatgtatttattaattgctgcccatttcataaactattaagatactgtccttccagcagagtattaaatgaatactatttatcaaatatatttaaacacgatttttaaaaatatgagttagtattggagacagaagtttgtattctttaattaagaggatctctaagggtaatcaattattctagatactgctttgtattgctcatatccctgatcgacaaatatctgtatactgtactatactgaattgtgtctaaaggattctgagtatctgagataatacacattcatttatacattctgctaaatatttatttagtgcctacaatgtgccagacatcattgtaggtaccaggaatgagcaatgaatgaaacaatgtttctgccctcttgaagcttacaagatagtgataaatctataaacatagaagaattaatatcgctaaaatgaccttactacccaaagtaatccacaaattcaattcctaccacaagtcccatgacatttttcatagaaatagaaaaatcccagcaaaccaccatggcatatgtatacctgtgtaacaaacctgcacattctgcacatgtatctaagaacttcaagtaaaattttaaaaaataaaaataaataaataaaaaagaaatagaaaaatcaatcttaaaattcatatggaatcacaaaagactccaaatggacaaaggaatcttgagcaaacagaacaaagctggaagcatcacattatctgatctcaaaatctgctacaaagctagagtaatcaaaacagcctggtactagcacaaaaacagacatagagaccaatggaacagaatggagagcctagaaataaatgcatgcatttacagtcagctgatctttgacaaaaacgccaagaacccacattggggaagtggtgttgggaaaattagatagacaattgaaattagaccctgtattagtccattttcacactgctataaagatataaagattgggtaatttataaaagaaagaggcttaattgactcagttctgcatggctggggaagtctcaggaaacttacaattatggcggaaggggaagcaggcaccttcttcactaagcagcaggagaagtgcacaaggggaaagagcctcacacttatcaaacaaccagatctcatgagaattcactcactatcatgagaacagtatgggggaaccacccccatgatccaatcacctccctcactcaacacataggaattataggtcgagatgagatttgggtggggacacggagccaaaccatatcagacccttatctcatcccatatataaaaatcaagtcaaaatggattaaagacttaaacataataaactataaaactaccagaaaaagacaaaggagaaaagcttcttgacactggatttggtaaagatttcttggatatgaccccaaaagcacaggcaacaaaagcaaaaatagacatgtgagattgcatcacactataaagcttatgcacagcaaaggaaataatcagcagaatgaaaaaataacctgaacaggagaaaatatttgcaaaccaatcatctgatatgggttaatacccaaaatatataagaaactcaaaccactcaatattaagaaaataaataacatgggcaaaggatctgaaaaggcatttctcaaaagaagacatacatatggccacaggtttgtgaaaaatactcatcactaatcatcatggaaatgtaaattaaaatcgcaattagatattacttcacaacagttaggatagctgttatcaaaaagatgagaaataacaagtgttagtgaggatgtggtgaaaagggagtctttctacactactgatgggaatgtaagatagtacagccattatgaaaaccagtagggaagttcctcaaaaaattacaactagaactaccatatggtccaacaactccacttgcaggtatatattcaagggaaataaaatcagtatgttgaagagatatatgcaactcccatgttcactgcagcattatttataatagccaagatatggaatcaaccaaagtgtccatcaacaaatgaatggattaaaagatgtaatatatattggatgaatggaatattatttggcttttaaaaataaggaaatcctatcatttgtgaaaacacagatgaacctaaagaatattatgttaagctaaataagccaggcacagaagggcaaatactgcatgatctcacttgtatgtggaatctaaaagtcaaactcatagaagcagagaataaaaatggtggtccctagaggatagtgggggatgggttggagagatgctggtgaaaagacataaaatttcagttagatgggaagaatgagttcaagatatctactgtacaatatggtggttatagttaataacaacgtattatacacttaagcattgctaagagagtagatgttaaatgctctcaccacaaaacaaatgataattatatgtgttaatgggtatgttaattagcttgatttagttattgcacagtatgtgtacatatatatatacatcacaaaatatcatactgtacatcataaatatgtacaatttgtatttgtcaatttaaaaaattaaaatctacaaaaaataaacaaggaatcatagagcaatctatatggtaaaaaatgttatgaacaaaataatgtgggataggaagactgcactacacaagaataatattttatagcaagtggtcatggaaggcttcattgataaggagatatttgaacagagttctgaagagagttaagaagttaatcaggaggataactaaggaaagggaaaaaggcagccctagctgccatttctgtccaaatttaccttatctgtgtaggcaaaacaacaacaaaaaaagccatagtttattttaaaattgtattagaccagaagtgacctgaagtactcagcaaaagaaaaaaaaatcagagactaggattgcaacccctgcctttttttgttttccatttgcttggtagatcttcctccatccttttattttgagcctatgtgtgtctctgcacgtgagatgggtttcctgaatacagcacactgatgggtcttgactctttatccaatttgccagtctgtgtcttttaattggagcatttagtccatttacatttaaagttaatattgttatgtgtgaatttgatcctgtcatgatgatgttagctggtgattttgctccttagttgatgcagtttctcctagtctcgatggtctttacattttggcatgattttgcagcggctggtaccggttgttcctttccatgtttagcacttccttcaggagctcttttagggcaggcctggtggtgacaaaatctctcagcatttgcttgtctgtaaagtattttatttctccttcacttatgaagcttagtttggctggatatgaaattctgggttgaaaattcttttctttaagaatgttgaatattggcccccactctcttctggcttgtagggtttctgctgagagatctgctgttagtctgatgggcttccctttgagggtaaccctacctttctctctggctgcccttaacattttttccttcacagactttaaaccaacaaagatcaaaagagacaaagaaggccattacataatggtaaagggatcaattcaacaagaagagctaactatcctaaatatatatgcacccaatacaggagcacccagattcataaagcaagtcctgagtgacctacaaagagacttagactcccacacattaataatgggagactttaacaccccactgtcaacattagacagatcaacgagacagaaagtcaacaaggatacccaggaattgaactcagctctgcaccaagcggacctaatagacatctacagaactctccaccacaaatcaacagaatatatatttttttcagcaccacaccacacctattccaaaattgaccacatacttggaagtaaagctctcctcagcaaatgtaaaagaacagaaattataacaaactatctctcagaccacagtgcaatcaaactagaactcaggattaagaatctcactcaaaaccgctcaactacatggaaactgaacaacctgctcctgaatgactactgggtacataacgaaatgaaggcagaaataaagatgttctttgaaaccaacgagaacaaagacacaacataccagaatctctgggatgcattcaaagcagtgtgtagagggaaatttatagcactaaatgcccacaagagaaagcaggaaagatccaaaattgacaccctaacatcacaattaaaagaactagaaaagcaagaacaaacacattcaaaagctagcagaaggcaagaaataactaaaatcagagcagaactgaaggaaacagagacacaaaaaacccttcaaaaaattaatgaatccaggagctggttttttgaaaggatcaacaaaatagaccgctagcaagactaataaagaaaaaaagagagaagaatcaaatagatgcaataaaaaatgataaaggggatatcaccactgatcccacagaaatacaaactaccatcagagaatactacaaacacctctacgcaaataaactagaaaatctagaagaaatggataaattcctcgacacatacactctcccaagactaaaccagcaagaagttgaatctctgaatagaccaataacaggatctgaaattgtggcaataatcaatagcttaccaaccaaaaagagtccaggaccagatggattcacagccgaattctaccagaggtacaaggaggaactggtaccattccttctgaaactattccaatcaatagaaaaagagggaatcctccctaactcattttatgaggtcagcatcattctgataccaaagcctggcggagacacaaccaaaaaagagaattttagaccaatatccttgatgaacattgatgcaaaaatcctcaataaaatactggcaaaacgaatccagcagcacatcaaaaagcttatccaccatgatcaagtgggcttcatccctgggatgcaaggctggttcaatatacgcaaatcaataaatgtaatccagcatataaacagagccaaagacaaaaaccacatgattatctcaatagatgcagaaaaagcctttgacaaaattcaacaacccttcatgctaaaaactctcaataaattacgtattgatgggacatatttcaaaataataagagctatctatgacaaacccacagccaatatcatactgaatgggcaaaacctggaagcattccctttgaaaactggcacaagacagggatgccctctctcaccactcctattcaacatagtgttggaagttctggccagggcaattaggcaggagaaggaaataaagggtattcaattaggaaaagaggaagtcaaattgtccctctttgcagatgacatgattgtatatctagaaaaccccattgactcagcccaaaatctccttaagcgataagcaacttcagcaaagtctcaggatacaaaataaatgtacaaaaatcacaagcattcttatacaccaacaacagacaaacagagagccaaatcatgagtgaactcccattcacaattgcttcaaagagaataaaatacctaggaatccaacttacaagggatgtgaaggacctcttcaaggagaactacaaaccactgctcaaggaaataaaagaggatacaaacaaatggaagaacattccatgctcatgggtaggaagaatcaatatcatgaaaatgaccatactgcccaaggtaatttacagattcaatgccatccccatcaagctaccaatgcctttcttcacagaattggaaaaaactactttaaagttcatatggaaccaaaaaagagcccgcatcgccaagtcaatcctaagccaaaagaacaaagctggaggcatcacactacctgacttcaaactatactacaaggctacagtaaccaaaacagtatggtactggtaccaaaacagagatatagatcaatggaacagaacagagccctcagaaataacgccgcatatctacaactatctgatctttgacaaacctgagaaaaacaagcaatggggaaaggattccctatttaataaatggtgctgggaaaactggctagccatatgtagaaagctgaaactggatcccttccttacaccttatacaaaaattaattcaagatggattaaagacttaaacgttagacctaaaaccataaaaaccctagaagaaaacctaggcaataccattcaggacataggcatgggcaaggacttcatgtctaaaacaccaaaagcaatggtaacaaaagacaaaattgacaaatgggatctaattaaactaaagagcttctgtacagcaaaagaaactaccatcagagtgaacaggcaacctacaaaatgggagaaaattttcgcaaccgactcatctgacaaagggctaatatccagaatctacaatgaactcaaacaaatttacaagaaaaaaacaaacaaccccatcaaaaagtgggcaaaggacatgaacagacacttctcaaaagaagacatttatgcagccaaaaaacacatgaaaaaatgctcatcatcactggccatcagagaaatgcaaatcaaaaccacaatgagataccatctcacaccagttagaatggcaatcattaaaaagtcaggaaacaacaggtgctggagaggaagtggagaaataggaacacttatacactgttggtgggactgtaaactagttcaaccattgtggaattcagtgcggcgattcctcaggaatctagaaccagaaataccatttgacccagccatcccattactgggtatatacccaaaggactataaatcatgctgctataaagacacatgcacacatatgtttattgcggcactattcacaatagcaaagacttggaaccaacccaaatgtccaacaatgatagactggattaagaaaatgtggcacatatacaccatggaatactatgcagccataaaaaatgatgagttcatttcctttgtagggacatggatgaaattggaaatcatcattctcaataaactattgcaagaacaaaaaaccaaacaccgcatattctcactcataggtgggaactgaacaatgagatcacatggacacaggaaggggaacatcacactctggggactgttgtggggtggggggaggggggagggatagcattgggagatatacataatgctagatgacgagttagtgggtgcagtgcaccagcatggcacatgtatacatatgtaactaacctgcacaatgtgcacatgtaccctaaaacttaaagtataataataaaagaaaaaaataaaaataaagaaaaaaaatcctctctggagagaagcatgttatcttaggcctcaaataattcccacaaattattttttaaggacagtgatagacttagcaaaaaaaaaaaaaaatacccgagcagcctaggaaacaatgtattataagcagaagcaacatcagcagaaacagataagccaatgctagcaatattggaattatgaaattgatgcgatttggcgctatgtccccacccaaatctcatgttgaattgtaattcccaatgttgggaaagggacctgatggtaggtaattggatcatgggaacaggtttcccccatgctgttctcatgatagtgaatgagttcttgcgagatgtgatggtttaaaattgtgtggcatttcccccatcactctctctatctctcttgctgccatgtgaagaaggtgcttgcttctctttcaccttccaccatgactgtaagtttcctgaggcctcccagccatgcttcctgttaagcctgctgaactgtgagtcacttaaacctcttttcttcataaattacccagtctcaagtagttatttatagcagtgtgaaaacagactaacacagaaatgcaaactataaaacaactatgcttatcatgttactatgttcaaatatataaagtataagcctatctgcacagaacaaggatctgaaaatgacatcaaagatttgaaaaataacccgagaggctccagaaactaaaagaaaaaaaaggatcaatgactgggtttaacaagagattacacattattagagagagaattagaaattacctaaaatatttcaaagacagacagtaacaaaaaatataaaagaaagtctaagatacagagaggaaaaagtccaacatacgttttattcagagtataagaagggtgagagaatgggcagaagaaatattttaaaagataatcaccgagaattttccagaacaaatgaaagatgttgatcacgagtacccagtgaaaggcccagtgaaacccaatcgcactaagtggaagaaacccactcctagacacatcacagtgaaacttcacagaattatgacaaaagtaacagaagtgagggggaaaagaaaaccagagaaaattaagattaccttcaaagagtgtagttgtcttcccagcagaaacagtggaggctatagacaataaaatgatatcttcaatgaattcaaagaaaacaattgccaatctagaattgtattatcagtgaaagcatctttcaaaaatgagagcaaataaagccattttcagacaaaaactgaatttgctaccagcagacactctctaaaagaaattctgaagaattttcttcatgaagaagaagaaaggtgatcccagatgaaagatctgagatacaataagaaaagcagaaaaagtaacaaagatgtggataaatctaaattaacactatttgcataaaacatcaaaaatgccttgtcagttaaaaaaatgataggaataaaatgcatgacaacaataatttatgatcaggagggaggtaagtggagttaatgtgtcctgggatcattgtatcattcaggaggaaaataaaggtattttgaagtaattttagactttgatgagtgagatatgcctattgtctctttttgggttcatctctttttccttcagctccatcacagcatcagtccaaatcagcttgtaacattaacctccagcagaggccaaaccacacttgcctctaggcagtgagatgttttgccttggttcacgtatcctcacctcctcctctgcctcaacaaatcaccccaaatttactggtttaaaatagccattttattaagctcctggaatctgagggtcagaaattttggcagagaacagcagaaatagtttctctctgtgccactatgtctgtggtctcagcttggaagattcaaagagctggggtccagaggcagtggctcacacctgtaatcccagcaatcaggaggctgaggtgagaggatcaattgaggccaggagttcaagaccagcctggccaacatatcaagacgttatttctattaaaaaaaaaatagctgagcgtggtggtgtatgctgtagtcctagctactggaaaggctataaggttagaggactgcttgagcacaagagtttgagcttgcagtgagctatgatcatgtcactgcactccagcctgggtgacagagcaagaacctatctcaaaaaaaaaaaaagagagagagagacagagctggcagtaactctaatggctaagggctggactcatagagtcccatagagataactgatatatctgacacctgggctggggtggctcaaaggtggggctcctttgagcagctgaccagagcacccatgcacagtttgggtatctcatagtatggtagctggattccaagaggtagcatcctgagaggaaggatgggaggatccagggaatgaacattccaggagaaccaggcttttcctgacttagccctgtgtattaatttcccattcttgctataatgaattatcacaaacttagtgccttaaaacaatacaaatttactatcgtacagtttgggaggtcagaagtctcacatggatttcactggaataaaatcaaagtgtgagcagagctgcattccttctgaagactcaggggaaaatttgttcccttgtcttttccagccacctgcattcctcggcccatggccccttctaccatctttgaaggcagcagcatagcacatcttcgaatctctctctggccctgaaactcttgtctgtgtcttatgaggacccttgtgactacattgagcccacccagataatccaggataatcttccagcctcaagatccttaactcaatcacatctgccaagtcccttttgccatataaggtaacacacattcacaggttctgcagattaggatgtgaacatctatggcagggggagggaacattattctatcaactacaccttgggaatcacatagcatagcatcatgtccacagtaaagactggtcaaaattgtcacagccagctcagattctagagtaggggtcatagacccaacctctcaatggaaggagtgccaataaatgtgtggccatgtggccttggtttgaaactaccacgcctttcctgttgtggctgctccacattggctaacgggggaggagcttcacccccatttttgactcagcaacacgaacatgaaaagagatggacagtccagcagacattgaaagggggcaaaagatacgccatgcagttgcacttcgtgtaaattttaaatagtatcacatacaaaattaataaaccttctctttatgcacagttgaagccaagaaaatcttactttatatttattcctaactgaaaactagactcgaattgtgcaagttttaaattatgtgagttttttaggaatgcatcctctgcataaaatgtgaatatgctgtacttgttctaattctctaaggaccaaaacaccatataacatgaagaaagaaaacagagaagatgtgaaaattacatccaactttgagcataaggattaaagaatcaccaaatgattaacttccctcaaaatacaagtttcccatgctgtttgaattgaaggaatttttttctgttgaaatcaagcattattagtaaacagcagttgtgagaactcgaaggggctaaattgtaggctttgttggaaacaggcctgaatagaacatattagcataaattgtatttttatggttaagctgcagtgttaaatatcaaactgtgctaaacgattgattccatacagctgctaaattgaactacctgttatatcagtttagtaaattgtcaaacttagagaactcagcaatttaatggatgtgtttgtaaaatatccttaggtaccctggcttaacatcaagaaacaaaccaccctcttagagtgttaaaagtctgtctgttaaaaaaaaagattaacaaggggataaatataagattaatttttaaaaggaaagccaatatactataaaatgaacataatatgttcagttcatagttcatgtcaaaaaagttcacattctatcttaattttctctacattaagtattaaataatttttgccttatcactatattatcattcaggacactggatactgaattttgcccagttaaactcacaatcactatgtctccttccacttttgactctggatatttggcatatttaatcaaatgaggggtgaaaattaagcaaaatgatgtcatgtcatgatgtcatactttttgctaaattttatatattctttaggaatactgagcatttcagataggtctctgccttctatcttataatggatgtttgtaaaccacacagcagatatttaatatcctgagaataaataccttgtgtatggcttagttctgtcaaatgtaaaattaagcataaatattagtattgaatgccaaagccaattgttgaaaatcagatcataaaaacccttatttgaggtctattaacaactgaccatttgaaataatcagggattaattaataaatggtttgcttatgtcttttatataacaagaagattgttagaaaataaaataagctatcattatcacttccttcatgtgattttgccactcttattttgatagcatctacataatagagaatcatttttgctggtttttaatacttttctctctctctttttttttttttttttttttttttgagacggagtcttgctctgtcatcagactggagcgcaatggtgcgatctcagctcactgcaacctccacctcccaggttcaagtgattctcctgcctcagcctcccaagaagctgggactacaggtgcatgccactacactgaactaatttttgtatttttagtagagaaggggtttcaccatgttggccaggatggtcttgatctcttgacctcatgatccacctgcctcagcctcccaaagtgctgagattacaggtgtgagccaccacgcccagccataatacttttttctaagtataaaagcaacgcatgccccgtacagaaagtgtagaaaatataaaccaactaaacaaaaaagttaaaatcctccataataatttattttaaacaccctgaatcagattctcattcttgatcattaaaggcaattagaattggagaaaagaagtgagtataaaaattaactcataaaagtgctagagggagatacaggtgattttaatgggcacctctctacagtcccacccccaaaaccctaattaggagaagaccaagttcgcagctcacatcaatgggcattcaagtcagtgccattagaatctcaaagccaggatgattccagaggacacatgggtcacttggacaattgagtataacacactacaaattgagataaatagagaaaaattaaagtgctatgggaacccagaaaggaagggaaaggatctgagcagcaagatcaaagatgattgcagaagaaaaacatttgaatggaactttgaatggtgaacaagccagcaagaacctaagaagtcaaagggaacagcatttcaaagagagggaacataaaggaaggcacagagtggtgaagtccaatatgaatggttccatcatcaggtcacagaagtaccttgctggcccattcttaaagcagcaaaagagtcaagccacgcagcaaattgatccattcttttttttttttcaaacttttattatgaggccatattagggaattctagaaaatctagtgttattaaatatgtccagactctactagtgaggaatcttttaatcacagttgacagaaacccaatttaaactagcaaaacaagtgggaattcattaattcataattgaaaacttagtgtgtagactggttcagctaaagctggacctaggtactcaaatgatctggttgtgtttctgtttccacttctctttctctgctctgcttgtatccacttctctttgcatgttagtgttactctttcctaccatagatactctttccatatcccaggaaaggtagcttctggtgggcctaggccaacatccttacaacttgctaacataaatgaagagaatagtcttccctcagtagatccaggagaagaacccccagggggcacctttgtagcccagattggacaaattgcccttccctaaaccagccactgtaaatggaggaatgtaatactacagctggcccactgcaggtcactgcccatgtgcaagggcaggaggaggcacaagtcaccttcatggacagccccaccaagatcacatgaagtagaggagcaggttcccaaaggagaaagaggaggatgggagagtatgctcagtacatgacagctataactagcacagttgatctgccaggtatctgaggactcccttccatctcagcagtggggatacatcaccataagccccagacagttacttgggaagcactgcagatggatgacagttctcctgcaatatacaatgatgagaaatatactaaagacactttcaaatcagcacccaaaaaccctcctgacaaagatttttctcccaatactcaaaatggaagactctattgaattttaaaatagagaagcagagcaaccaatcgctccccagctcctcccctagtaataagagtcacctgttttagctcttgtgtcttacattagcatatttgaaatctggtcatttaaaattagatcataaatggaacaagcatccatatggcactgaggatgtgccaggcactattctaagtgcgttacatatagtaatacttgcaacaaccccatgaagcatgacctactattatttccatttatggctgaagacgccagagcacagagaggtcacaccacatttaagatttgaatccaggtggtctgatccagagtctgtgctctttaccccaaggttagacacagaacctctactccagataggtcataatgtaaaaatggtgagcaagggaacaggaaaaaagggacacactgaaaaagaagagtctgcaacagaataaataagcagatataatattagtaacataacctagacactgaactgtcagctcagaagcataagtctgtccgcgtagccccaacattgtctatggagggtgtgagcagtctggtttaacaaatccaggttaaagactcatcacactctactggcatgaaaatatcctctccttttccacagatgctgtgcccataaaggcagcctggtgtctggagataacctcactacacagtgcctgatacagtgtctgctacattgtcatgctcaatagtgttcctttaattttccttaggagagccataagagctgaaagactagattcaaggatcaagtatttattgattacctactatgtaccagaccctgggctgggccccgaagacacagcaatgatgagacaggcacagctatgcacccacagtatcttccaccaagcctggctcatcacacacttaagctgaggttaatcagaatttttggcatcttttacaagcagccctggtatctagatggtatacacctgtacagacatactgcttggtaaaatattgaaatattttgtactacttgataaacagtcactgcctaagtctccggggtatctcaccactacccccaccctgccctgaccccactctcaggaaccccaaacattccccatgatccatcaactggggggtagcccgggcctggcaggggacacccaagcccccattccagcatatgtcctgcacttgttctgattggtgggcaccaatgcccctgcctgtaatcactaaaagtagccccaaatccccctttccacaagcttttaactcacacttttctgattgactgccagttctctttagaaacggtaggtctttatttttaaaaaataaaataataaaataaaataaaggagaatcatcagacacacaatgtgacaattagcaactgtctgacaatgactcgctgacgcagaggacatcataccaagatgggaccaaattacctcctcctcctctgccacccactgcagcttctatcagcagataccttcagaacagaggccccagtgacagggacccagatggcccagcaaccaagggaacgggcaggaccttctcaccttccctggcctctcacagacacagactcctgctggctgtgtcagtcgcgaaagagtgcaaacaacaccactcagggagtttcacccatctgcccacatgacacctcggttgctgggaaatccctgtacctgtccaggtgccaggaaagatcaggactggctctgacagagatcttcaaaaaccagactcaaaggtagtagggttccccatgaacactttgttctcaaccttggctgccccttagaatcactcaggggtgcttttaagatatagatgccaggccccagccaattccatcagcagatccagtggggcctgccatggcttaggggactccagatatgggaactgcctccaagggccagtcagatggacccctggggttccactctcctgtacaagtcagtagcccaaaagggaaacatccagacatcattctggctccaggttccccctcccaccctgcccacatgctcatacagcagatggagctttgagaggtgtcccctttccactgggggaaaggtcctgagaataaagggttctggcattttacccgcacatggtagctggacagtaaggacaagaaatacatttattcaaatcctaatatgagactgtgagtttattagcatcattcagtattatcttttagagatttctgggttttttttgttctaactgctaactaatatttttaaatatctagaaattaatatttaaagctgacttctcttttttctttttttttaatttttgagatgaagtcttgctctgttgcccaggctggagtacagtggcacaatctcggctcactgtaacctccacctcccaggttcaagcgattcttcttgtctcagcctcctgagtagctgggaatgcaggtgtgcaccaccacgctcagctaatttttgtatttttagtagagatgaggtttcatcatgttggccaggctggtctcgaactcctgacctcaggtgatccaccctcctctgcctcccaaagtgctgggattacaggcgtgagccaacgtgccccacctaaaaagctgacttctcaaaaacaatatcatacaaaagaataaaacataatataaatgagcccctgttgtttctgagctgttttccaaagcaccctgtcctttactcagcaaagaggtccttgtccgtgcacatcgaagtcgactgacagagccagaagggagaacagtggcgacagaagacaaaccaccttgggagcaagtcccccaggcactccttcctggcacagatcctgaaatcatgcccctcccatgaggctgcccagattggcagcaaaccaggccattgagttcaagaacctccagaggtctcctttctaaagaaggatcacatttcctgtgctgctgacaaggattataaggtgcagggaggtaaaggggccaagtcaataggcaaatgtctttttagggcaaaaaaaaaaaaaaggcactctcgtcacctcaagagtacagtaaagagaaaaaacctcggacatgcctctgggggagacataagcttgagatttttagttaaattaagctgctgttaaatgtgtcgtttttctgtctcacaaattttgccaccaaaaaaaggaacaaatcaatgcaaatgtctcaggttaggtactaaatccgggcagagtgacaaggcatctcatgttgtaggtcacccctccacactgcaactgccaagtaaggaaaggaggacacaacctcactgccacctctcccagcaagtccgcctttgcaaagtggacaccaaccaggtggtggagcaggccccaggcatgacccaggaggaaagaggagaggaaaacaaatcaaggaagcaaatcagagagctcaggaagaaatcagaagcacacatgttcaaaacaggtagagcccacatccatccactgtaggcattctaagccttaatatgtggcaaagacagcaggggctcatgacttctgattttctcagtcaagggcaaaatgtatcctccctattttaataaaaaagcaagatttaattatgtttgcacatccagtggttctagaaataaggaagaaaggggagctttttttcattacttttgtatatcaccgtctttccaaaaacctaacaactaggtgacgtgggcagctgcaacctctctgagttactattgcatcatggggccagaatggttgcttggaaggcaaagggtcagaactgccgaccgcttgagctccatactgtatgatcacatgaactcttcaggaatgtaagttacttatataaagatatgttcccaagcaagttgtcaatacattatacctaaaaatacaccatggaactattaggaaaatcctatcacctattgagcagtggttctcaaagtatggtaaccaaagcagcagcagcagcatcacctgtgaacccattagagctgcaaatcctcaagctccaccctggacctactgacttagaaactctgggggtgaagcctggcagtctgtgtttcaagtcaccattgtgatcttgatgactgctacagcaactcatttagtaagcaaaatagctcctaacagatgtgtttcaaatattagagtttgctgtaaatatgtctgtcgcctagttctaaatcctttgcttcgaacggtcaatatctgtttcagaggggacaggaaatccccacgctggcctccttgctgtcctggacactccaccttagggactttgccctggccattcccgctgatgggagcactgccccctccaccctaccccatacagggcttggcttaaatgtcatcatctcagcaaggctaccctgtatccctgattccccttaccttgctcactgttcccaaagtattttgcccttctaaagatctatataattcacttactaatgtacagggctttctgtatgtctctcaagtggaaagcaagttgctgtcatggcagtctgtaatgcccagcacatagtaggtgtacacacacagacacacgcacgcacacatacatatatatgtatacatgcacatatacatatatatgacacacacatgtgtatatatatacacacatatgtgtatatatatatgtctatgtgtatatatatctacacagatatatataatgaataaatgagtcaggcaaattccaggataaacctttgggtgcacagccttcatttattttgtaaaggctcaaacgatggggggctacctttataaactggagagaagtttccatcgcccatggaggaccccagtgttggttcccatgctgcatctttctgaagatatctgaatggttgataaccttgttttgcaaccaacattcaggaaagagtaagttgctggaattgcactatgaatcactagtgaagatgctgcttgtagaaatctttgctatcagttgaatgcactactcatctgacaatactttctttcaaataaagccttcaaccatgtttaaaaattgcacaactattagaggtaactaaaatttaatacttttgcttctagcttaaagtgagaaatgtagaattgtgccaaaagctgataatctcttcttggctggttcagtgagagtggtttagaagtaaggtctccagtctttcataactagtttcttttttatgattttcctgggaatttccagttccagatatttttctataaaacagttctacacagatagctttaaggtcacgacaagttaaaaatgaatgctgaccattagaaaagatcgttggatcattgctagatgttttcatgcaatcttccccatttcctccagatgataaaaccatatgaagcaaaacttggaaaccaagatatgacagaagaccaagctaaaaactacaggtgtgtctttcagtgtgcatgtgttgcatgtgttggtgtgaggggtggagggtggggggaggctgaaagagacaaggaaagagacagggacgagaggaaccaatgaaataaggtgtgggaaagtaccctgctaactgcaaagcaccagagcagcggttctgaaactctctggtctcaggacctccttacattcttaaaaattactgcagaccccaaagagcctttgtttatggggtaatatctatattatttgccatatcagaaagtaaaacaaaaattactaaaatatttattagttcattgtcaataacctcattacatgttaacataagtaacatattttatgaaaaataactatactttccaaagccaaaaaaaaaaaaaaaaaactgtgaaaagagtggtgctgtttcacactttagtgagtctctttaatgtctggcttaatagaagacaactggatcctaaaatctgcccctgcattaagtttgttgcaatgtcataggtcctgtgacctctgtaaagcttcactgtacacccgtgagaatgaaaatggaaaaggcaaattgcatcttagtattattataaaagtatttttgacctcatggatccctgaatgggtttctcagagacccccagggacccctagatcacaatttgagaatgaccgtactagccaaatgttatcgacttatttcctatttagagaaagataaactgagactgagagagaggaagttctatgatttaccaaaggtcacagcagggagtgggaaggaaggcagcataacttaggctaacttctgatgagtactctcagcattggactatatgtgtttccacgtgtacagaagcttctgcctaatctgagtttttctgagtaataagcacaattatgaaatacaatagagctgagtcagtcaagtattcaacttacatggacttgggtctatgccctctgcttacccccatctccaccacagcagagagagagcctgatcaattgcatgtaccatttcattgcaaaagcacatgccctcgagtgaccgtgaggtagggatgtgaataccccagtccttcatgaggctcactgcagttctcttcaagtgtgagcattttgacatcttgagtgggattctagagattaagacatttttgttcggttggttcagtttggtttggtagcatgtggcttgtgaatgcaagaaacaacaattgaatgggggaacaccagctttaccaagcttattgaaggcagcacagtctctagtgctgcaggtagagtatttgatgggcaatttaaggattttcaagggtaactggctttttgccatctctgaaacttcaccctcacttaggggcaagtcttctgacaaagctgagttccagtgtgatagcaacatgtgagtgatggggaggcttgtgatgacagcagaggcgtctgggtgatgggagaagacactgacacaggtgcaagtgcacactgttcaccagaaatacatggcacttccactggggcttctcagctttgtcggtgccaatgcttactactcagtattctactccataatatgccaatatttgtactaaaatggttatcgcaaaagtaatacattcatttgcttaaaaaaatgagtacggaagagtagagatgtcttactctgactccacccccatgacagtccatgctctagaggtaacatatctgtttctccctttagttcttctgatggattccttcataactcgaatgcacttacatctttatttcttgctgtatcccttttaaaacctcccacgaagactcacctatattccttccacttcatctcctagactccaaatgtgattgataaatttacatcatattctgttattgtattttccatgctttgtttttaaattgactctaaaacataaaaactagtaaacagcactgaaaatatgatggaatgtacagaaccaagaagtctgactgaacccaaaagaacaaaatgtgatcctgtcacatgaaatctgtgccacttgaagaataatgtttcaagtgtgaagatcaagtggactctctgttccttctctccaccaactgctgagaaccaagacacatttttgtttcctttgtatgtggattatgactttgtatttttcccagagttcccaagaagaaaaaaagaaaaggaaaggcatatgcagcatcatacgataaagccattattagttctcagctacacagtttctgtaatggaatcactttctctttgaagacactgtggcttcttctgattgttggcagctgctttctaaatcggctccacaattgttatactgggatttcttttcattgccctactgggttatcatagtttgttggatccaacattttaaccatttcttgatcatttgttgtttggctggagatatcctttaatagttgttctttttttggaaaggctatatgggaagtaaacttcctgaattcttacatgtctgaaaatgttgattttactcacacacttaattgttcacatggctggtacagcagacactactggctgtcacaacattcatctactcccaccccaatacttttcataataacatcttcctttgtacaggtattctccttgtccgtgtgtccacaggcagtggtctacctattacccttacagtgattggtttaggaatagacacgttaaaatttggtaaataagtcttccaggagttctgaataaaaggcattcccattttcctctgcagactgttatttctgactgtggttcctagaactaccgtggatatcttgtcaccatagaggagctagcctgagcacaaagccaacaagctaaggagacgctgcaaaataacagaagaatcaggaatcctgttattatttgtcattattaagctgataaatttaccaacgctggtgatgcccgacctctgaatttcagaaaacgtgagtatagaattattagtttactttcccttaaaactttgaaagcattatgccattgtctactggtatctattgtatcgattactgaagtaatatgtgaatctacttcctatttctttgtgaataatgtcgtttcccctgttgctgagagcttttattcttctctttggtacacacaggtagggagcaggcaggtacatctggaactccaccaccttcaaaggaaactaaggcatttaaatgtatttccttcctagtgggagatgactttcctttttaccctctggctctacccacaggatttcctttttgtctgctgggtctacatcagatattattctgcattgcttccttgccccaatttcatacttttggatgtcccttagcaaatcattcataagtttggaaaaccattcttagaattcaaattgctctatacacatcttagaaaggaaagagctacttagccagtgtgtaacttcattcccagagtattgaaattcatcataatgtgtcttgatctggatctgttctcatttatcctgcttggcactcagtgggttccttttgattgaagaatttgattcttcctttagctcagagaaaaattattccattatttcttcatttcttttgtatatactatgcagatattggaccttctcaaactattatattgtctttttacatatttcttaaatttgccaccttttctagtttctgaaagattttctcaattttgtctcatttacttatttggaatatatcatgtccttttaaaaacaaacaaacaaacaaaacagggtcttacctgttgcccaggctggagtgccatggtgccatcatagctcactgcctcagcctcctgagtagctgggattacaggcacataccaccatgcctggctaattttttttcttttggtacagacaggatctcactatgttgcccaggctggtctcaaactcctggcctcaagcagtcctcctacattggtctcccaaagtgctgagattacaggtgtgagccactgtgcccagccataataacatgtttttcatagcagtgagtcattgttttatttatgtaaaaatctctgaattgcttttaatatctccatatcctctcaagtgacttcttgtttgtttatcttggtctttgtctcttatgttgttgatctccctcagatgtctggtggtccttaggagatcctttatatttgttgctgaaggactgtagattagtataggtagttcatgtgtgtttcctttgtagttaggcaggtctatttgctctgaatgtgagggctgactctagcctttgtgtgcagagattcttctctttggtacatgcaggtagggagcaagcaagtacatctggaactccaccaccttcaaaggaaagtagggcacttaaaagtatttccctcctagctggagatgactttcctttctaccctctggctctaccctcaggatttcctttttatctgctgggtctacatcagatattactttgcagtgctttcttgccccaacttcatacctttggctgtcccttagaaaatcattcataagttcagaaaaccattcttagaattcaaattgctctatacacatcttagaaaggaaagagctacttaaccaaaatgtcccaaggacatctttccagttaaccaccaagaggagggatgtccctgctctttaattcatcccaccccacctccaaggctcagcccagaccactgtttcaaagctcactcttgtcctccatatgtgctaattcctagcttggatcctgtctgaacaaggtctccctcctctgacacaattcttcatttagttctaggacacggtttcccactgaaataacaaactgcaagcccatctagcttgtcttgatgaaatatcttttctacccacagcactgcctgctgttttcagagttgtcacaaattttttttttctagatgcctttagccaccatttcagaagattccaagaaggcaggggaggcaaacgaatgtacttagtctgtcatcttgaaaaagaatcctgtgtacatttctattaacacaagtcaactttctttcaattcttttgacaatgtagagtttcagagtatctggaaaaccaatataatgtggagggcaagggattagaagtgaaaattgatacactgagtgaaatattttaaaatctagactcacgtgtataaagtcaaatatattttctctttataaaaagaattagtttctgtattgacctcctattcccttcaaagttagaagttaaatctaggttatttccaggtaaactcagttacttctgggtaaaattaatcatttcaagcttaacttgatcaattcaagatatcacaccaccatcacccttcttgttagggttctagctaaggtttctcaggcatttggggacatggtgcctgccctggcctccatcaactgccttctttccacctggtcattgcccattggcctctatccctatcaaatcctccaccgattctgtggtcctcatgttggcctcaaagcctcaaggcagaggggtcgcccacatccttctaatctcaactacgagctcctttcggttcactgactcccttattcacaatttcttcctccatctgcctctttgctatttccaaataaattatctatagaccaggagttttggacactgtcctgtgctactctctagtctctaatgaagacatgctaccctgcccttttgcactttcgctggtgctgtaccatgtggacacaaggaacttctctacagggcctcatcctgggaaacaacaagaatgggaagtgacatagggatgtccctgctcctctcaccccacctccaaggctcagtccactgcaaaaaaagacaggaaactaggtatctttccatgaacccactggaatataaaccctggaacatttcctctggttcctccctgtccctgacttaggccatgtttagctagtttacagaacagggtacttttattcttcatctacactgccatgttttattgattctaagatgtagtacatttctttagacatagatgtctcttaaaattgggaggtaccttataattggtgacctctcacatgttatgaatggagtgtttgcgtaccccccaaattcatatgttgaagccctaacctccaatgtgatgttattaggaggagtggcctttaagaagtaagtaggtttagatgcgtcatgatggtgtggtccccatgatggggctggagcccttataagaggaagagcattttgtgggggcctaggtgggcggatcatttgaggtcaagagttcaagaccagcctcaccaacgtggtgaaacctcatttctactgaaatacaaaaattagccaggtgtggtggcaggcacctgtaatctcagctacttggaaggctgagacaagagaattgcttgaacccaggaggtggaggttgcagtgagccaagattgtgccgctgcactccagcctgggagacagggcgagactccctctcaataaaaataaaaataaaaataaagagaagaggaagagactagagttctccctctctttgccatactgtaaaaggcagctgtctacaagccaggaagagggccctcaccagaacccaaccatgctggcatctgatcttggacttccagcttccaaactatgagaaagaaatatctgttgtttaacccacccagtctatgctactttgttatagcagcctgaacagaccaagacattagatgtgatgaaacacatttccaatctgttgttcatggcaaaactttatgccttgtgtattagtttgatagggctgccataaactgagtggcttaaacaacaaaaatttattgtctacagttctggaggctaaagtccaagatcaaggtgttgaccacatttgctcctcccgagggctgaaggaaggatgtgttctaggcctctctccttggcttgtaggtggctgtcttctccctatgtctcttcatactatcttctctgtatgcatggctctgtgtccaaatttctactttttataagcatatcagtcatattggattagagcccacactaatgacctcattttagtttgattaccactgtaatagaccttctctccttaatacagtcacattctgagatactagaagttaagatttcaacatctgatttttggggagacacaattcaacccataacacctcagtttcttcaaagatttgcttttgatgttcaagcccaaactcttccatatgaaaagtcttgctttgtctctgctatgaatttgaaaatacagatatttaaaatctcaacaggagccctacctgtttatttatctttacattcctattataacagtccaaatgcttccagcaatgaattaataacagaataaggggagggccatggggaaattttaagggctggggaaggaagacatctctattaatatttcaaaattttgtacaacttcattaaatcagcccaagctgccaaatgtgctgggtcaaacccatagcagtcttccacttacaaggaatactttaggtgctgctcagaagtctccattttagtccttcccaacagcagagaagcagaaagacaccccaggaattttgaagacataacccaaagcagcttaccagaaacaagaaatttttacatctcctgtttaatccttaaatgccacatgaattttacattgccctccataatattcctctacccatgtatggcaacagcttttacgaggaagaaaaagtcaaaactatttccccccaaagtttcaagcagcatccgggaagatgcacccagtctgtcctatgatttcatgtgcccctggcataatgccccatgttggagaagcacggctttcagtggaggaaacaggaagtttcacagataaaggggttttgttttgttttcagcagagaaagatcttcattttggcactgccaggaagccagtccttttccacccaaaggacagcatttcctgaagagcagatacatgtcccttcccagctggtggagagtctgccaggtggaaaggaaatggcatgccacaaaatgaacaatacagctgcatttaagcaaggatgttcacatcacagagaaagaagggaccaaaggcaagcagggtgagagttcggggaaaggagaaagtcacgcggctccagcacacagcaaggaaggagggggtgcaaagcacaagcaggaggtggggaaaaggcagagaaaggtgagaaaatggatgagctgattcggacttgtggcaaagatcagcaaatctgaaatgatggcgggacaacagagcacaaataaagctgcgccaacaatatccacatcctgagcttcacagagtacctagaatggccacaaagaaataacctcctctattgtaggtccagtgatgccgatctgtcctctcatttccatcagcttattgtgttgtgacatctgctcaggtgaactttctaggcaccaatgaagctgaagttactgagtgatatccaaaattcactctaaatgctatgatcaataacaaatttaggtctgaaaattacttaaccaacccttgaatgaatgcaagtcaatgacaagaattttccctcaaatttaatacgttaaagaagggttccttgttggtttttatttgcatctcttagtttattcagcatcaactctgagtgcattccaggctgggctcctgtacagtcatgtccagaaaggtctcattctgtggctttcatctttccttactccactcacataaagatgagatggcaaacacatctgtgactgtcaggcctgttttggcctccagaggtccgtgctgctggtggtcagcagccctgtggagaggcaaagccagggagaaagtgagacagcttccgaggatcatgcttaaggaaatccccggggctcatggccaacatcaaaatccaaccagcaccaccaccaaagcaaagaaataaaatcagaattcttctatttgttatgaggacaattctcagttttcaagctcaggtatgtaaagaatgcaacttacctgttctctaatcatcttaatttataatgcaaccctctgttagagactaattccatgcaattcaaggtctctcctccaaccccatctccccagaattaagtctacattccagggccttactcagtgagtgccaaagcctctgagccttgcctaaatacaggggcatgggtttcctctgctctctggcatgccagacctgtgaggggtttgcatggtcactgcccttcagaattcagcgtagacacagagcaagacctgcctcctaaggaaccacggacatctgcctttcctccttccctccagctctcctcctctcttctcaccaaggacaatatcaccccattaggaaggggctttaaaggtactaaagaagccttttcttactcatgggcatctttctaaatgttttgtctatgcattgagtcctttggtgccacacaagaaccagactgtagcaaatcaaaagctaagcatcgatttctgaaatccactatgtcacttgtcccctgaggcaatgagtagggaacaccctagctgcctaggcaggggatgtgccatcactaagagaaaccagagggataaaaatctcagtgaataactggaaacagtatcctgccaattctccatcatccttcagctgcctacatggcaatggctacgtctgctttcctttcatgctttgtgccttttgaacctcttgcatcaaaagtctttaggaaaaacatcaaataattagacactgtaattgctggttgcacagggacaggaagaaagggtaaaaggggcctttggctagttacgtggggctgaaacagcatgaatggttcaaggaacagcaagtaatggaatgtggttaagatggaggaggcaagcatcccatttatgcttttaaaaagactatatttgtatatacacatacatatgtgagcaaacgtacagaaaaaggtcgagtttccacgttttattctctatgtgctcctcattgtttaaattatttccaataagaaagtatctgtgttctgtatacaaacgaaatgcagggtgcatatggaaggtcagtgccagataaaggtggacagacaggcagtaaggacaggaaagaaatgctttcattaggagtttgatctttatcatgaaactggtaatatacagacaaaatttaataatcctatttagcatcttctggttattaaatcaacatacactcattgtagggaatttggaatacaaaggtatacaaaaataaatttaaatgcctcagtaatcccccgagagagccagtgttgacattttggtatagttcctactgattttaatacatgcacataaatatttttgactatatgtgatcattttatgtaaatagtttggtgtatattttcccagaattttccaatgaaatatatatttctttaaatgagatcacactacagaaatgttcatcaacttactcttttcatttagcaatcagtatctcctggccatatgacttcatccactgatacagatcaacctcattctttctaccagacatagtatactttattaaacagggtgtaccttatataaccagtactctattcatagacatttaaagtatttccagtttcgatattataaaaatgctttaattactatcctgatatatttatgtaggcaaatatttcctaagataaaattcctagaaatgtactgttaggtcaaatagtatgcacattttaaagtcctccaaaaatgctgtagaaacaaattattctaataatcaaacatgagagtaccctttcaccaaaccttagcaacactgagtattttgtatcttttaatgtctgatggtctgactggcaacacataatacattattattttataaatattttcctcatgttgatatttatttattaccattttaattttcttttcaaagaaattttttccaattcatgtttctgagattataaaaaaaaagttcatccatgtttaattgtggacctttcattttatatttaaatatgtaatctagctgtaacttactttggtttaagaattgaagtaaggatccaggtttttttaaataaaaaatttaatgaagtataagatacatacagaaaagagcacaaggcatcattgtacagcttgatgaattttcacaaaataaccccatcccataccatacacccagaccaagaaaccaaatatgactcacaccctaaaagtccccttaattcccgcttctagtcattaccacccccaggtaaccactatcctgatttctattaccagagattagtgctgcctgtttgagtgtttggcttctttttctcagcattatgtttgtgacatacgcccatgtttttgcatgtgattatagattacatattctcatttctgtatatattccatatattgatttatttatctattctactgtctttggatatctgggttgcttccagtttgaggctattatgaatattatgaatgctatgtaccttcttatatatgtcttctggcaaatatatatactacatttgtttgtcatatacctaggagtggggaattgcgggtacagagtgtatgttcagctttagtagatactgcccagtagatactgcccaacggtcttccataatagctgtatcagtttacattcccaccaataatatatgagagtctagttgttccatgttcttgtcaacatttggtattgtccgactttttaaatttagccattctgaagcatatgtagacatacctttttgtagatttaatttgcatttctctgacaatgaatgcaattgatataacttttaacatatttgtaagccatttgaacattctctgtgtaaagtgttttttcaagctttttgtccacttttcttttgggttacttgcctttctcatattgatttgtagttatttatagtatcttctcctactctgggcttgctctttcattcccttaatagtatcttttgatgatcagaatttcttgagtttagtttaatctagtttatcaatattttcctttatagttagtccttctgtgtaatgtttaagaaatgtttggctattctaaggatatacagatattctcttatgttttcttttaagagctttattgtcttacctaatatatatagacctacaatgcagctagaattgatatttgtgaatggcttgaggaagattctttttttcccgtatggatactaaattgagtcagcactatttattgaaaagacatcctttctctactgtattttagtgtcaactttgtcataaatcaagtgatcatataaagatctctttctaaattctctaatctgttccattgggcttaaggaaacaggaatatgtcaccccaaaatatgcctctgacataaaaattactttttagcaaaaggcaattaagaagcagtaaacagagaaaaagctcaccctatcctaccttctgcctacaggcaggatataagttctccttgactagagaaaactctagactctttatcagcccatagacagcatcagaggaacctgaaaataaacctcactccattagtttcctcccatatatttaccttcccatcatttcccacccttggaaacctaaaatcttttcatttgtcctttcatttgtctacaaatgtattgctgtttgttgaagatgctatataagcctgagttctaagccattgctttgagatacttttcattaaagtttgtccctcatgatgtgtgctacacatgttaattagcttgtctgtttttatcttgttaatcttgtcttttgttacaggaatctgtctcaactaagaactcatagaggttgaggaaaaattatatttcctccccaatagggccatttgtctattttagcacagatgccacattgacttaattacaatagctttataataattctaaatatttggtgccataagttatctcagcctccttcatattcttaattattgtgatggcttaactcggcccttttcttttccatgcagattttatattcagtttgttgatatccatttaaaaagcctgctagaattttgaatggcttgtataatatacaaattaatttaaggaaagttgacatcttcacaatattgagtcatccattctatgaacatggtatatctttccatctacttaagttttcttcaatttctctcagtatgtcttcttgttttcaatgtagaaatcttacatctctgtcacatttattcctatgaattcggtgttttctgaggctattgtaaatggtattgttttttaaatttcattttctatttttattgctagtatatgtaagtataattggtttttatatattgacctggtatccagtacccctgcttaaatttacttattaattctaatagtttatctatagattcttttgggttttctatatatacagtcatgttgcctattgataatgacagttttatttcttactttccaaaccatatactttctatttctttctcttgccttgctacaatggctaggatctctaatgcaatgctaaattaaagtgatgctagcagatatctcaaggagaagactttcaacatttcaccatcaagaatgatgtttaagatatttttaggcactcattatcagattaacaaatttcctttgcttaggctttttaaaaatcataaatcaacactgaattttatcaaatccttttctacatctatgtagattgtatgtatatttttactcctttattctgttactacaaggtattatcttgatttattttcaaatgttaaactactcttgaattcctaaagtttatcccacttggttataatgtattatcttttttatgtatcactaaattcattttgattatattttgcttagtatttctgtatctatgtccaggagagtttggtctttaattttcttttcttgtaatgtctgtgtcagcttttgatataatgttttttcttgagaatgagctgggaaatgttacttttttttctattctctgaaagagtatgtaagattgatgttattatttattttaagtgtttggaagactttaccggaaaagccatctgccccagaaaatttatttgtttgtctgctgtttgatgcgaaggtctttaataatgaattaaactctttactagatatagctctattcaggttttctatttttacttgtgttagctttggtatatcaggttttttggaatttgtttatttcatctaaattgtcaagtatgttggcaaaaactgttcattatatcctcttattaagcatacatcttctcctaaaatgtctaactagttttctcaaaaccagtcattggataataaatctcttacaaaatgatatgctgtgctacctctatcatataaaaatttcatttaataagtcattcaaaaatatgtattggctcaaactatacaccaggcattattccaatgttaggaatatactattaaagaggacaacattcctgcttcatggagttttcatttaatgagaagaacagacaataaacaaaatagtaataagtgttctaaagaaccaagaaaggttagggtctggggaggtggaaaggaaaggccactttgaggagaacctgaataaggtgagggaatgagacatcaaaagatccaaagcaagaagtgtaaaggccctaaggtagacatgtatttggcatgttgtaggaagaatgaagaagccagtgtgactgtagcagagtgagtgagagagaagcagagatgattgagaaatctaggcagaagtcagattttgcagggtcctggagaccatggtaatgatttgggatattaaaaatgtcatgggaaaacactggctttgaacaagcaagtaacatgatctgacttgtgtttgaaaagactgttctaacgaatgtgtgtagaatagaccataagggggaaaaaaggaagttgagaagccacttagaagctattacaataatccaagcaagagatggtgctggcttggactatgttgggaacctacatatctacttacctcctataaggagataagaagtgctcagatccaggctgtgttttgaaggtagaatcaacaagacttgctgatggcctaaatgtgagagttataggaaagaaaagactcaagggtaacttctaggtttttggcctgggaaactgagtggacaatgctgccattttatgagcctgagattcttaggaaaggagcagatttagggtaagggggggttgggagtcaggagtttggtataggacatgttacacttcagatccgtttatacactcaagtggagaatcttggtggacaagtgaatatatgggtctgaatctcagaagaataacaaaaactggaaatataaacttaggagtcatgtgcaaacagatacatcataccacaagactgaattcattcatctaagaatagataagaagtctagggcctgagacctgggatactacagaagtggggaagagattcagagcaaagactgaggaatgtccagtgaggggaaattctcacgtgtatatcagtctgtttctgaattctttactctgctctcctgatctttctgtctgtctattcttctgtcagttttcattcttcatttcaaatgacaaaaccaattcaaactggcatatgtactaaagaaaaaccaggtaaccaggtttagtacaaatggggtcacctggatgcagtttctctccatctgtccgctatgctctcttccatggtggcttcatctttgaaccatcatcttaacctttagttccaggtaatagcaacagggctggggccccacaaccaggagaagagcgaatgctgctgggtagcaaaatccacagatgtctggcacaattcctctgccaaccccaaactggcttaattactttacttacggatacatttatcataactagttaggcttttatgttcacatcactactattctttctcagaaaatttccagctactcattcatatttattcttaaagaatctatgcttctaatctgtctccttccactctgatgagattgccctttccccaaagcaccttaaatttttatttcctacaaagcatccctcccgtgggatgcttgcttccatgctctcttcctgcccataaacttaccctccttcaatacatagatcaaatctttcctcctgcatgatatatttcccaattaccacatctggaagtgttatctctgtcctatgtatggctatagcataaatagcattatttaaatggtccagatttgtcaagtattttttcatatttgtcacaatctcccaagtaggctgtaaactcctttgggaagagactcttgttttatatttctatatattcttctcagcaacctgcacaatcctgaacacatagtttctacactaaatgcatatttttaaacaattgtctggttaagtcaccacttttatatatctcttcttttttctctaaggaatgaacagcaacagaagaaagcaatagaataatgtttgtggtttatgatgtggagtcttctctgtaggtaagtatccatcatttgggaatggttgtaagtacttaaagtatcttgggtgctgcagctttgattttaggcactacagaacatggtgagatataatgatgaataaaatggacacagtccctgtcctcacaaagctcacaaatttcttttccagtgttgtaacttcttattccattattttcatagtagtttttcttttaaaatttttctattttagtgtaataaattttctcagctttgatttatttttatttatttattttgacatagagtctcactctgtcgtccaggctggagtgcaacctccacctcccgggttcaagtgattctcatgcctcagcctcccaagtagctggaattacaggcatgtggcaccacacctggctaatttttttatttttagtagagacagggtttcaccatgctgaccaggctggtctcaaactgctgacttcaagtgatctgcctgcctcttcttcccaaagtgctgggattacaggcataagccaccacacccggccatcaacctttttttaagttaatgtttttggaattttatttaagcccttccctacgcagagatcatgaagatattctcttatattaccattcaaaatcttccatttttttgctttcatatttaacttttaaaagcccattgatatggtttggatctgtgtccctgcccaaatctcacatctaatcataatccccagtgttggaggtggagcctggtgggaggtgattggatcatggaggtggatccttcatgaatgaattatcaccatccacttggtgctgttctcctgatagtgagtgagttctcatgagatctggttgtttaaaagtgtgtagcacctcccgccattctctctctcttgctcctacttgggctctgtgacatgcctgctcctccttcaccttccgccatgattgtaagtttcctgagaccactgcagaaactgagccgatgccagcatcatgtttccagaaccatgaaccaatgaaacctctttcctttgtaaattacccagtctaaggacatccattgcaattgatttttatgcattgtgtaaagtgatagtcgaattacatatttttcatgtcatatccatgaatcccagtaccatttattggaaagtttaccctttatctgtagtgtctccttcgtaataaatccagagtctgtaaatgtaaagtagtgtttttgggctttctacttcgttctgttggactctttgtttatccttgaatcaataccatgccattgttattacaatagctttataataagacatgatatccatacagcaagtcctctgacttagttctcctttaaaatgtcttaggtattctaatttgaaataactatgatcatggatatttctcttcctctttgtggttctgtcattttcttctctatatattatttagttgttaggtacatatacatttcaaacatattttccttgtgaacataattttttatccctaataatgtttttaatcacaatctctactttatttgatacattgcttattatttgacagtatatagttttccattcctttattttcactctttctgtggtcttatgtttccaatgagtcttcctcaactagctgggatattaaataccctgcttctattccttttgtgcttattttagaaatggcagcatacattgttaatttatcagcctgaagatagtcattatctttactctccttccaggtaatataaggaccttagaatgctcttgattctttttaccccctttcttaacttatatgctattgttgtctttcatttctaaatattttagcctgtaagatattaaaattttgtttatgcttcattgttcatctatatttacattcacccacatggtgatctctttataaaatccttaattccttatagcatctcagctttttccatctgcaattgctttccttctgcataaagtacatcaattaagattgccttcagtgaggcaaagtcactaaagtggtggcaaactccacattgttctttatatgaaaatgttttcattttgccattattcttgaaaggtactttgtgcatataatcctaagttttcagctatttcagttacagatttattctactgtcttctagattccattgatgttgagaagtatgtaaaatgctctttccaaagtcatatgtctttttgttgttgttgttcctgctagaattttctctttgccttcagtgctctgcttatgaatttttggcttaataaatttgatcaattctggaaaaagctcaagcatcgtctccttgaatagttgtttctgccccattctctttcctctcctttccaattaaatgcgtgttagatcttctcactccagcttccatgtcttttagcctctctgtcacattttttgtctttttgtctccctgtgcagcatctgaataatttcttatgcctcatcattcagttattcactaatttctttttgattttgtcatatgtgctgtctaatgggaaaccactacattttaaaatttcagttttatatttttatttctagttctgtttaaccttcttaaaatctgccaagccacttttaattgttacccattccatgaaggtatttataagggtacttttatttctatgaacacaataagcataggtttttatttgtctctgtactcataatacataaagaatttgtgagtctggttttcttttattctattcattgcttctgttgtttctcgcatcacattttgtttccctgtacgctttgttatttctgactgtactgctcattgacccttgaaaattaggaagaaggtgccctcctccggagattcatctttgattctgccaggtatctgggagtggggttaggaacctggaactggttctaccttaaacttggaactaccttaaacgaagttcatagcttgaggttctcagaaattgaggtgacataaaaccatcctcaaatctgtaaaaaggggccaggcatggtagctcacacctgtaatcacaggactttgggaggctgagcagaacagatcgcttgaacccagcagttcaagaccagcctgggcaacatggcaaaaccctgtctctacaaaaaatataaaaaattagccgggcgtggtggtgtgtgcctatagtcccagctacccagaggatgaggtgagaggatcacttgaacccaggaggttgaagctgcagtgagccgtgatcgtggcattgtctgcagcctgggcgacagagcaagaccctgtctcaaaagagaaaaaaaaaaaaatctgcgaaaaggcttgtcggtcacgataacttacttttcctttttttctcttaccctgctcagtaccagggcaacctccctgctgtcccagaagggtagagagaactagttttatttctggttcacctttcccctgaataaatccagctttatatggagatggtctcctatgagactctccaccttgagcaaggcacgtactttgacaaaaacctccttgtcctgcaaggccgccaaaactaaagtctatatttattaggatcgacaaatgttctcagggcaaaaagaacttaggtgttctagtgttttagtctctcctcatctctttagtgcttttaagaaaatctaaaattttttcaatttaaaaaatatatccaacattttaatattttcagtggaattttggtccaaataacctatcctaccattatcagaaaccaaagcctacaatttcctctctccattatcactgagctgagttttcctggacaagctacagtatttgcatgagattcctcttggcaggggaggaaggcatgcctaggatactctttcagatgagctgtttttacaacccaaagactctcttcttccctgctaccacagagacagagtacttcctacaaatatggcagcctgcctatatgattctttacataaccactcttcttttgctctctgaagcgaactacatctaggagggtttcttccaccagctgtacactcagttcccaaaactattgcaagcaacagatacagctttttcatgtcagggtggacttttcatcttaaagagcatgacttttccagtactttccaagatctactatctctgggctctctcaccatttctatgctgcttcccttcatttcctcaatggcttctgcctgatctcatctacttgggacagtctttacatgtattttgaagtttatggactaaatttctctcctacttttgctgtgaatagagttttcaaggttctgttgttgttgttgttgaccttgcttttgaatgtttctaggaagacaagttgaaatgccaccaaatgaagctatgtttttacacaaagtttcaaataatcttgactcctctctctctcacacacataaccaacatctaatacattggcaaattctgtcaatgctaccttcaaaatatattcaaaacttgtccacttcttaccatctccaattctcttttagtccaagccacaactgtattttatcaggactattgcatagcctcataattagttttcctgcttcaccttagctgccctacaatctgttctccatatagaatttatttctaagacagaagctagatcatgtcacctgtgctcaaaatcttctaatagcttctcacgtcactcagaataaaatccaaagtctttaatataactgtgaggccctgcattccctccacctctcctctcccattatttgttgcattccagccacaatgtcctccttgctgttcttcacacaggtcaagcatacaattacctcagggcttttgcacttgctgaaccctctgtaggtgtattagttcattttcatgctgccgataaagacatacccgaaactgggaacaaaaagaggtttaactggacttacagttccgcatggctggggaggcctcaaaatcatggcgggaggtaaaaggcacttcttacatggcggtggcaagagaaaaatgaggaagaagcaaaagcagaaacccctgataaacccatcagatctcatgagactcactatcacgagaatagcacaggaaagactggcccccatgattcgattacctccccctgggcccctcccacaacatgtgggaattctgggagatacaattcaagttgagatttgggtggggacacagccaaaccatatcagtagggaatgctccacctctagatttcttcatggcttactttttcacttaatttacatctctgctcagatatcactttattaagaggccttccttgaacaatctctctaacataatgttctctcctatatccactcctgtctcctgaccaagttttatttttcttcttggtatttattattatctaatatattttattttttgttgttgttgttgtttagcgttatcttttcttccatcaaaatctaagctttagaagaataggaactttgtcttgttttgttcactgatatatcacaaacatctagaatagtgcctggcattatagtaagtgctcagtaaatatcacagaatgtgtgctgtggacacagaggaacccaattgcaggacatacagtagaaggagagaccaggaagcacttttctttctgctgcccatgatcttccacctccttgacacacagcttctttactcactactccattccacctttccaaggtcaccacttccagcttgagtctataaatcctccctgcctgaggctcctcagcttactgactcggtgtccaaatcccaaatctgattggtctttcttagtccaaaaacctatctagagtccaattagccattgctgggggtcaaagggaggggaatgtgagtgtgtctgtttatatgccaagtatagttaccctccccaggcttctacaaagaggaaataaatgctggggatctttaattaaaaacaaaacaagccttctctaatacatccctgacactgaagagagaatatatataacttctactaggtgcctctaactcaaatgccttcagaatcctgacaggtaagataaatgggtgaagaggccagggtggggaatatggcaaactcaggagcctatgctgcatccaaagagggcagccactgtaactaactactgccaaggggaacatggggccaatgtcaccagatattctgatggttcaagagaaggcagaaatctatattttagtgtgaaatctcccacttgttaaatgacaactaatctaattttttacaagaaaaaacactatgcagactgaagaatatacatccattgagcaaatctggctaaggaataccagggtacaacttctgttttgtaaagtcagctcaaaaacaggacatcagtaatttatcacactcaaaagcaatgtttctcaggggggttcagtgtgaagatttcattagttggagtaaccggtactctcagtcccctttcacagcacctgcccccatcttctctaccaatcctggtacaaacttccaccaacttttaaccatgagagacagaaggcttattgaaaagcatttgggctttgaaatcaagtgggtctggacaaaaaaacaaaacctcagtattacctcctaccattattcttaacctctccaaacctcagtctactcatctgcaaaatggggatgctaattcctacctagaagggttcttgggaataatgattattattaacagactaggagaggccccttcctagagaaaggcatgatacttgaaaatccgcaactgtgatacagaatgttcataataagctaatgccatctacacctctttgtggaataagtagagggtaaaaatgcatttaataaataacacaaggatggaaaatacagctctctgaagacccaggtcttcacaccaatgttgttgcttgtgaacctagtccagaatgtctaactttgtagaaactagcactaattagaattcatagacatcaattatgtgattattcaagaactctctcaactcttaaatccatttttgtatgcatattacaacacaacactgagtcaagtaaaggcatgccaattctccaatgaccaaaaaaaaattaatcctgtagttccgggagacacaattgggaaaagaaagccctgtttccaaagtgtcagctacaacgctgtttccaccagtggctggaatgcaagagtcttccatacactgatgaatgcagaaagcaattgctgcaaaaggtcatttcataaccactggaaatactgcctttctcccacccgaccctgccctgtgctttctggggaaaagtcaccctgtgaagaagccatcaggtcagaggcagaggctacaaggaacccttggctttataccacacagcacaccctagagcaagtttgtccaacctagagcccaggagagccttgaatgcagcccaacagaattcgtaaactttcttaaaacattatgagattattttgcgatttttctttttagctcatcagctatcattaatgttagcatattttatgtgtggcccaagacaattcttcttctaatgtggcccagagaagccaaaagattggataaccctgccctagagggtcatgcaacaggaaagggggcatcccaaaaggaaacatgaaaactatgctccctccaggaactgaaagaactctccacaactgataccaaaaatacatttctcctagcaaagaactctaagtagacttcttctctaccaaggaggtttaaaaagaaagaagtgtgtctctaatcactgtactttcccaccaagaagagctgagctcccccattccagatttgcctgggcctattcttatttctcaggccctcgtggctcttataatcacacatgtcgattatcggttttcctccggggaggcccaagcatcagaaaatcacttacatccttcactgccaagcctctcctattaggcaggcaatctgtaattatttatgctattttctagattttaaaaaaggaggggtgtctaagatataggtaaatatcagccagcagttgacaatcattgaagacaggcattgcgtaaacaggggttcagtattctattttctccatttttgtacatgtttaaaattttacataatgaaaaagttttaaaagggagggtcgaaggaggacacagatataacctgaaaacaaaaccaagtgttcttcaccatttactcatgtctagatgcagaaaaacctgggaagtgctcagactctctcatcaacagcctagagggttcatgcgccctcaaagtggagactgtatcttctaagcactactcaatatccttaacaaaatagcctttgaaaaattccctagaacttttcaaaagtattctggaagaacccagtttcccttcttgaccttcccttctagacctgcctctaccaattacccctacagcctcttcctcctacaacgtcctctacttcctgttccagactgctctgctgaacaacccagttattgaaatacctcctgggtggcaggcaaacacctgtgttccagcaggttgtctagctgtttcttccttctggatgtcagatgggatcagtttgtaggaatattttgtattttcttcttcttccctttaaactcaatttgctcctagtaaggttttttttttaattgcctacagtggagttttccaacttcaacactgttaagatttggggctgaataattctttgttgtgggggctgtcccatgcattacaggatgttcagccacacccatggtttctacccatttgatgccagtggcacaaacaccaccgcaacttttgacaaccaaactatctctaggtattgtcaagtgtttcctgagggacagaatcacctctggtaaagaactactagtctaaaaaatattgaaaatacaagaacaatattgtcctggccccaccccccaaaaaatgagattatacagtttttttcccacatacacaatatcttccaacttataaatttgtaaatataaatactttgtaaatgttgtatcctaagccagaagtatataaagtaacaagagtaaaattaatttaaaaccctcacaactatattttctctgtcttcatggtttcctgtgtgaatcttatttgtttcttccaaattatcctgttttccagtcaatgtggtaatcaaaatattgtgctccaagccctctttgaacgccacataatctgtgtttgaattggaaagaaaaacttccagtgactttctcagtactccccatgacatgcactggctctccagcacctatttaacaggtgtcactggacaacagaatcccctaaaaggacatctccctacaaaatcagaaaaaagcgcagccaatgcgcccccggcccaactccaaacagtcacaccccaaccccatctctgtgtaaccacaggaaggcagcatcctctcacacacaaaatgctccagccctacagctcccagttccaattctgtatttaagactcggagtcagaaagactcactggtgcaggcgccatctcactgccacctccttcacctctgagtgaaggaagaatacccgattcccaacctgaccaagaagtgcaacgggacgttaaatgagccagtgtcacaagctgcaacacccgttgggaaatactgcaatttttcttcattaggcagagggtttcccaccatatttaaatggtacactctcttcttaagaaatctgtttttggtctgcacaggtcttgcattagccacggtctacgatacagctttgggggctatgcgttcaaaactgtctctcctctccaccccactggatttcccagctccaatcaggggctctcccaagcctccatcctcttattgcccccctcccccaccattcccctgggaatgtcatcttgttcctcctctctcttgcttacggacaggcagttgctgggtgcagggattttgccttccagggtccattccttcctggacccatttcatgccactgctggtctcagcctggatcccctcatcccagattctggccacggcctcctaactggtctcccggatttggcctttctcctctaatatagctttcactctgacaattgatagtctttcaagagcacaagctagaacagccagaagccttccgtggtttcccattccctagcaccagatacaatcctgtcttctttggtgcacagtttgtgaagcacaccaaatgtttgaccctggaggtgtccaagcaggagcagaacgagcactgagtgggacaggtgcccgcatgcagagggatttatccactggatacatggtggagggagatgggaggagggagttaaactaaatgacttttaaagtttcctttcaagcctgacttcccatgattctgggaactctttggtctgccatgcaggtcctaccaccatctgacccctgaaaagtgatgcctcctgcaaagtgatgccagacagtcccctataatgctcctcacatggtcctgcacatggttaccccacctctataggatgacttcttttaattgtctttttttttaattacaaaagtaacactccttggtgcaacaaaataaaacaacactgaagtattaacatgaagtcctcaaccactgcactcccatgggtagccactggtttcagcagaatgtatgccctcctagtcctttcctatgacacacactccattcacttgacacctggtcttatgctgtgccttaggaagaaggatatttaattcttatctgcattgacttatctctccagttccctaaggtagtaaggctaattagttcatctgcttcaaatgctgttattccaccaatgaggaattgaaagggaaggagataaggtttcttgctcaaaatcacagattagctggtggcagagttaagaccagaccaagaactcctaactcaatgttggttattacactgtaaagtgctcttctcctccccaccgtgcagaatatcatattgtacagacagcaggtagaaataattgcctcttgaaagcataggggcaggatagtccagtggttaagaacttggactttgaactcaggctgcctaggttagaatctggctgtcatttacttaactatgtgacctgagtcaagcaactgggcctcaatttcatcatcccttccttataggactgttgtaaaattagtagcttaatatctgtaaacccctcaaaacagtatatatgttaataaaacatgctatcctacctctaatgtaacacccaaaatacaataaatatcttccttattaaaacataggctggcaaatcaaaaccaaatcttgttagctctgaattttgtctaaaaataaattagcatgggtgaaaactcacacaatattagtccaaaacagatttaagtgacacaagaactgtaatcattactacaggaaggaatgacctcataaagacctcatacatcagaagcattgtaacatttactgcaccaaataataaatttttaaaaaaatcttaacagcctctatcagtaattatctaagtaaagtgggctgcaaatctgttagagaactgtttttgccatgataatatttctagtaaattgctgcttctataccaaaactactggtgttgcagaaccggcaggctaatagaaagattattatagaaacactattaaaatgaatcaggtattattaaagattcaacactacaacggcgcctgattacaagagatttcaagctgtattgcttaacgagcagataaaagtgctaattaagtccactcttagaggttatccctaggcaggactgtacacttatgtagcaagaggtcttcagactaaatgaggaaccagtaatgccaacccggctggatacagccctactgggaagatagggagagaatgagaagagccaagattttctgcgcacgaaggtaacctggtaaagcagacaagtatccaaacttatttaaacctcagtgtttttcttaactgaggaacactcagttaatcagcaacacttctgattcctcctttcttgaatgaagaaaaccaaataacccaccataaactgaagaccctcaataaacggcacaatcagcgggaggcagagaaagccgtgccattattaccaaagcctcctcgagcaaccagaagacatggaatcgctctctcaccttggccaaaagcatctctccatgcaaccagagcctagagctctcagaggtttttaaagagttgccagactgaaggcatttcgttccaggatctatttagctttcccaccttgttaattaactaattagggatgggaaagcaactcaccaatacaaagtgtcaggaaaatgctaagtaaatttgtccaactggtctaaatgtcaatgctaacttaagaaagggggcaagcgcgagagactgagccgtccccagactgctgcaatccagagctcgctaacgtagagacggagagacccgggcgccctgcagcagcagcctcccggcccagagccgggatgccggcaggacttctggaagggaaacctggaccagggccaccccgggcacagggaacgcggctggcaaggcgcatcctcgccgctcagtctccgtctccccgcatctctcagacgtcaacaaacccctgaccacaaagtgaaactttcccggcccccgctgtcgcgccaggtctctgccctctgcctgggagcgcgttgcggggacaggtgtggggcccgggctgaggaggggcccccgccccaggaccggaggttgtgtaatcggcccgggaaggggggctcgggacagctccctgcgccggagctgcggaggccagacgggggaccccagctgagggggccggcgcccggaggcgttggggggatggggagggctctcgtcccgccccccgggaccgcccccgggcgcagtcgggagctgcggcgctgacacggcccggagagggcgcccgcgcgtcagaccgagcccgaggaggggggcgcgatggctcggcagccgcggccagccttacctgcgcgccgggccggggcggcgggaggcggcttgggatgccggggtggcgggcggcgggcggcagcgctggcagccacccgggccacggcatgcgaggagccgtggcgcggcggcgggcgcgggactgacagccccaggccccgcctccagaccccgggccccgcccccttcctggccgcgcggcttgccccgcctcctccgcccaccgccggggtcaaactgggtccatcggcccggagggcggggatgctcgctttcgattggcctcaaaggtgcccgccccgcctactccccgccccttccttggcagggaagaggcgcgtgcgccgtggctggggagggtagcggttacgctgagcgccggcgttgctggtccccgacccctggtacccgggcatcgttttttcatcccgggcagctgggaccccgggatgacctaaggaacaaggattcagacgcagactccacggtgaattggccttattcacgtgtgaacgaacgtccaggagaaaaccaaacccgaatgggccaggctctaaccagaggagaccccaaaactgtgatctgcatcagaaaacgaaccagccagccggttcccggctctgccaggtctaggggtgctttattcaagccctgggttcgctccctggtcagcaagtatgaggtatttgcagagggtctagaagatgtgaagggagattagcccgcatttaggactgtgccaaacagagagtgagtgatgctgaagaaagtggcctcctctgctccagccctccctcctcctccccaacccctggctctaccacctctccctcagcaccggcgccctaccctcagcctgtaaacagtatcaggtctcgcccaacaaaaatcaatggagacccagcaattccactcaagagaactagaaacatgtctgtactaaaacttgtacacaaatgttcatagcggtgtattcagaaggccaaaaaaggaaacaactgaatgtccactgattgacaaatggatgagcaaattatggtctatccatacaatggaatagtattctgccataaaaaataataaggccgggcatggtggctcacgcctgtaatcccagcactttgggaggccgaggcgggcggatcacgaagtcaggagatcgagaccatactggctaacacagtgaaaccccgtctctactaaaaaaaaatacaaaaaattagccgggcgtgttggcgagtgcctgtagtcccagctaagtgggaggctgaggcaggagaatggcgtgaacccgggagtcagagcttgcagtgagccgagatcgcaccactacactccagcctgggcaacagagcaagactccgtctcaaaaaaaaaaaaaaaagaaagaaagaaattctgttacatgctacaacatggatgaaccttgaaaacactatagtgctcaatgaaagaaaccagtcacaaaaacccacatagtgtatgattctatttatatgaaatgtccaaaacaggcaaatccatagagacagtagactaatggttgccagggactgggaggaggggggactgaggagtgactgcttaatgagtacaaagcctctttggggggtgattaaaatgttaaggaattag

SEQ ID NO: 253 - DNA, 134881 bp, Homo sapiens
  source 1..134881: mol_type = genomic DNA
aaagaaagaaagagaaagaaagaaaaggaaggaaggaaggaaagagacaactattgtcatgggaaacaaactgaaaagaataatccacagtgattttatttgtatttatgtgcttaattacatacttaagtatgacaactccacagagtgctcttgctgtctcttcaaaagattatggctttggtcaggcgtggtggctcatgcctgtaatcctagcactttgggtggctgaagcaggcagatcacttgagttcaggagtttgagaccagcctggccagcatggtgaaaccccgtctctactaaacatacaaaaaaaaaaaaaaatagccgggcgtggtggtgtatccttgtgatcccagctacttgggaggctgagtcaggagaatcacttgaacctggggggtggaggttgcagtgagccgagattgagcaactgcactccagtctgggtgacagagcgagactctgtctcaaaaaaaaaaaaagtttttggattccagctctaagcgtcaccatttgctgaagcgggatgtccagatggagtgaagggggctgagtctaaagacggagagagagagaggccagctagggctggggataatgagggagctgagggttccccaggacatattttttacactttcttttttgttgttttttgagacaaggtctcattctgtcactcaggttggagcatggtggcgcaatcacgaatcactgcaaccttgacctcccgggctcaaggcattctcccatctcagcctcccgagcagctgggactgcaggcgcatgccaccatgccagctgatttttaaattttttgtagagacaggggtctcactatgttgccctgacttgtctcaaactcctggcctcaagtgatcctcccgccttggccttccaaagtgctgagatttatagtcgtgagccactgtgcctggtccatactttcaatacaaatgtatggtgatactactgtgaacaggtcctagatttaccaaaattatctttttgtgtgtttgtgtattttaaggttatatctctttagagaaatgtcgtatgaatttattaaatgtatctttttatattttgaagttatgcctctttggagaaaggtttcaccttatcaggtttcatcttaatcagttgaaaaccttgctgtccttattctctttccccaggtctcccatttcatggtaagtcatcctcagctcccagtccctctttcccctggttctgctaggggtctttctctttgctgtctttcctggacaaatgatctgacccatagattcaggttgttgtgccactaagttctcccatgacctggtctctcagcacatgtttggcaggttagggaggtcacccagtcccttctcacccagccgtggtctcttacaagaaaaaggagacacaaggtatctaggcaagcttgcacattctgactaattgattgcatcatagaatccttgaacaagaaccagaactccagagagggaaaacatctatcttgctgtgtttggacaggccagcccctgaaacatcttgggcaatggagggttaacttctcaaagtttaataggcaagaccagcaaccatgcaacaaggtaaattgtcctcacgagaactccaaagactatttttctctctctttttttgaggcagggtctcgctatgttacccaggctgctctcgaactcttgggctcaagcaatccccccatcttaacctccccagcagctgggactacagccacgcgccactgcacccagctgacttttccttctaagcatctttggctgggcgtggtggctcatgcctgtaatccctgcactttgggaggccaaggtgggtagatcactggaggtcaggagttctagaccagcctggccaacatggtgaaacctcatctctactaaaaatacaaaaaaattagctgggcatggtggcaggtgcctgtaatcctagctactcgggaggctgaagcaggagaattgcttgaacccaggaggtagaggttgcagtgacccaagattgtgccactgcactccagcctgggtacacagcgagtctgtctaaaaaagaaaaaaaaaaaaggaagagagagcatctttatcttcattttctaacctttaagtgttactttctcccagtaacattttgcccagaaagaggtgatgaatatagatttaagaataagattttccccatgttgctgcctttccagaacaagtgagttcattctcatttgtctttcttcagaaatcttttatctgtctttctcccattagctggaatgggtgctccatgagaataaagacttgggttccattcttcctattgtccccagagcctacatactggctggcattgagtagcaattgaacagttttctgaatgaatgaatgaatgaatgctcaaataagcacatgaattaattatcactttcctttgaatctctccattcttcttcctcacccaatggggctcgatccttatacacagaagatactctataaatgatgattcaatgaatgccaagccctgttctatgcactgaagaccaaaagaaataaaagacatcattcctgctctgtaagaattcataggctagtaaggaaagaaagatatataaatatctgtaatacaacatggtaaacaggaacaaggtgacgactgttcctgaccatttcctgtatcctttagatcaggaactctcaacctttgtgcacgtgtatgtgtgtgtgcatgtaccatgtaccccttggacaatcaagaatacaagaaaccttgtattctttctcagaataatgtttttaaatgcataaaatacacaggattataagggaaattaatggcatgaattacatttattaaaatgttaaagtggcaccatggtaatacatgcatgtatttattaatgcattattcagcaagatccagcaggaacctaataacaatgacaattttgaagtctttttttttttttttttgagatggagtctcgctctgttgcccaggctgaagtgcagtggcgcaatctcggctcaccacaagctctgcctcctgggttcatgccattctcctgcctcaagcctcctgagtagctgggactacaggtgcctcccaccacgcccggctaattttttgcatttttattagagatggggtttcaccatgttagccaggatagtctcaatctcctgatctcgtgatccaccctccttggcctcccaaaatgctgggattacaggcatgagccactgcacccggcctgacaattttgaagtcctgatgagtgtaaacactactttgagacatttgcaacaacagcatagatatgaatatatctgtgatttctctttttttttcttttttttgagatggagttttgctctgttgcccaggctggagtgtagtggcacaatctcagctcactgaaacctccaccccctgggttcagtcaattctcctgcctcagcctcccgagtagctgggattacaggcacctgccaccatggccagctaatttttgtatttttggtagagacggggttttgccatgttggccaagctggtctcaaactcctggcctcaggtgatccgcctgccttggcctccaaaagtgctgggattataggcgtgaaccactgcgcctgacccaatatatttgtgatttccactggagacaaagtcacagatgctgctagcactagtgggtttgttgcccacattcagaattaaaggaaatgctaaatttcagttacagactatcagaaattaatttgtatttttttcccacagaagcttacggatatcaccttctacctgaagggtctctgatgcccaggttattaatctctgatcagaatgttctaatggagctggcacttatttagagacagatcttagatggcagatctaagcaattttagcattccttgtagtacagcactgatggtagtaaattcacgcaacttttgtttgtctgaaaatgtctttttacccttccttttttaagaatacacaatacacagttctagtttggtacttttttcctccagtattttaagaatgtcatttcattttcttctggcttccataatttattttgggaagtcagttataattcttattactgtttttctgcaagtttttttttttttcccctttctagctgtttgtaagggtttctctttctctttagtttccaacagtcatttaactataatgtgcttggatgtgtttttgttttagtgcatgtgttctttttttttctttttttaaatttatcttgcttgggctttgctaagatcttcttgaatctgtgggttaatatctttcattgtttttttgaaaattcttgttttatgactcattatttctcctctttccttctgaaattccaatatgcaaacattagagcatttcatcctgtcttacatctctttcaagttctgttccagtttttttgccattttttttttctctgtgcttccgtttgcataattccttttctttcttttttaccttttttttttttttttgagatggagtctcactctgtcagccaggctggagtgcagtagtgcaatctcagctcactgaaatttccgcctcttgggttcaagcaattctcctgcctcagcctcccaagcacctgggttacaggtgcccgccaccatgcccagctaacttttgtatttttatttatttattcatttatttatttgagatggagtctcactctgtaacacaggctggagtgcagtggcgtgatcttggctaactgcaggctccacctccggaattcatgccattctcctgcctcagactcccaagtagctgggactacaggcgcccgtcaccacacccagataatttttttgtatttttagtagagatggagtttcaccgtgtcagccaggatggtctccatctcctgacatcatgatccgcccacctcggcctcccaaagtgctaggattacaggcatgagccaccgctcccagcctaacttttgtatttttagtagagatggggtttcaccatgttggccaggctggtgtcgaactcctgacctcaggtgatccccctgtcttggcctcccaaagcgctgggattacaggcatgagccactgcgcccagccagtttgcataatctccaataactagtcttcaagttcagtgacagattttttttctgctgtggccaacctgctcttaagcctagccaatgaattcttaatttaaaacattatatttttcaattgtagaatatccatgtccttttttagagatttaatttctctattgacattatttatcttttcgtccattttttctaacttttcttttatttttctttaacataattacaaaaatcatcttaaagtccttgtctgctaattccaacatctgggttacctgtaggactgtttgtgttgtctattttttctcttgcttacaggccacatttttctacttctttgcatttttttttaatattaagcataaatagccatagagtctgatgtagatattatttttcaccagaaagagaacactctttcttctctcaggcagctaaggtgatggactgatcactttgatccagtctgatattgagctggatcagttcacttttcgtttcaaatatcagctgagcatagtggctcatacctgtcatcctagcactttggtaggctgaggcaggatgaccacttgagctcaggagttcaagaccagcctgggcaacatagatctcatctgtatttttttaatttttcaaattttaatttaaaaaatacttttgcccaggcgcagtggctcacgtttctaatcccagcactttgggaggccaaagcaggtagatcacctgaggtcaggagtttgagaccagcctggccaacatggtgaaaccttgtctctaccaaaaatacaaaaagtagctgggcatggtgtcacacacatgtaatcccagctaattgggaggctgaggcaggagaattgcttgaactcaggaggcagaggttgctgcgagccgagatggcactccagcctgggtgacagagcaaaactctgtctcaaaaaaaaaaaaaacagtttcaaatatcttagagtcatgcctgtcttgtgtttattacaggcccttttttcaagcagccttctctttctcaaatacaacaatattatagggtatctttctctgaatttcaatctagccttctttactgcccagaacttagcaaaaatcctatggggagaactggcaggtggggaaaaccagctatgcatttgaagcttctccagattctactctgtctagccagctcacatgaccataaaagctggctgctttctcattctctctgagtagtcttgcctctattctggcaagtctaatctcccccaacccatgccgagactcaacaaatgccctcatagaggaaagcagtcatgaatctccactcactttgggagggtcccttctgctctggaatttaattccattagatttccagccttccagtatctctaaaaagaaatatatatgatttttagtttatccatatatattttttctaattgctatagtggacacaatggtctactgctcccctcttacatcctatatcctaaccaccaattctaaatattttaaattcccattacaatgtcttattttattcatgagttattaaaaaaaaaaaaccaaaaaacaaaaaaccttttaaggccgggcacggtggctcacgcctgtaatctcagtactttgggaggccaaggtgggaggatagcttgaggccaggaatttgagaccagcctgagcaacatggcgagaccccatctctactagattaaaaaatacataaaaaataaaatttaaaaaaaaaacaacttaaatttgtacatttgtaatttccaagtatattgttttaaatttgatcattttgttaattttaacttaattatatgttgatttatggcctatatcagggattgactaattacttctgtaaagggccaggcagtcacaattgtaggctctgtgggccatatgatctgtgctgttgtaacaaaaaaggagccatagacaacatgtaaatgaacgggtatggcttggttctaataaaactttatttacaaaaataagtgacaggttggatttgtcctgcaattcagtttgtcaatccctggtctaaattatcttaattatttacaaatttattaagacttgctttataaatatgtttgctttgaaatttgagtgcttttcatgtgcacttaaaatatattctgtattagctgggcacagtggctcatgcctgtaatcccagcactttgggaggccgaggcaggtggatcgcctgaggtcaggagttgagaccagcctggccaacatagtgaaatcctgtctctactaaaaatacaaaaaattagctgggcgtggtgccaggtgcctgcaatcccagctactcaggaggttgaggaaggagaatcgcttgaatccaggaggcagaggttgcagtgagccaagattgtgtcattgcactccagcctgggcagcaagagcaaaactccttttcaaaaaaaaaaaaaaaaaaaaaaaaaaaaatacatatatatatatatatacacatatatatattctatattaaataagtaattctatatatttattagattaaacttgttttgttgttcaaatcttttataactttgttgattttgtttgtttgcttgcttgatctaatggcagagaaaaatacatttaaatttattcttgtaatgtggatttgtcagagtatttctgtaggtctaacaattcttgctttaatatttagaggttaatttattagaatattaacatctggccaggcacagtggttcatgcctgtaatcccagcactttgggaggccgaggcgggtggatcacctgaggttgtgagtttgagaccagcctggttaacgtggtgaaatcctgtctctactaaaaatacaaaaattagccgggtgtggtagtgcactcctgtaatcccagctactcgggaggctgagccatgagaattgctccaacccgggaggcggaggttgcagtgagctgagatcgtgccactgccctccagcctgggtgacatagtaagactctgtcttaaaaaaaaattaatatcttaattttaagatattaattttaaatgattaaaattatttaattattaattaacataataattaaacatcaaatcattcaatcatttaattaataataattataactataactattatctttatatataattacatataataggatattttatatatctatatatatcctacatatatgtaggatggaagcgaaggattgataaatgtatcttctcccaaagaagacaagtatttcagcatgcttttatgtattttagtctctcttacccctatagcccatcatactgaaatggtctagaattttagttatgtgctattattcataaactttcacttatttggcttcctctaagtgttttgacggagagatattatgtggcaagctgagggtttaaatcactgagaatatttttattatgccatcatatttgaatgctaatttcgctggatataaaattctagattcaaagatccctttcttctgttctttaaatctattaccttattcttttcttgcatcattggttgcaagtctaatgccaatctggttcttgtttctttttgagtaatctgttttgtgtctctgaaagcatttaaaattttctttttggctgggtgaagtggctcatgcctataatcctggcactttgggaggctgaggcacgaggattgcttaaggccaggagctcgagaccagcctgggcaaaatgttgaaaccccgcctctattaaaaatacaaaaattagccaggcatggtggtgcccacctgttgtcccagctactcagaggctgaggcaggaggatcacctgagccttgggaggtcgaggctgcagtgagccatgatcatgccactgcactccagcccgggcgacagagtaagaccctgtgtctaaataaataaagaaataaataggattctactttagaaattttatctagcttttttcatttattattatatattacaaaaaggctttcccactctccatcttttgtatttttgtagctccttataagcctaaataaaatactatttaccacacaactgagtgctgataaaagtggtttgttttaggccaggcacagggctcacgcctgtaatcccagcactttgggaggccgacacaggcagatcacctgaggtcaggagttcgagaccagcctggccaacatgacgaaaccctgtctctactaaaaatacaaaacttagctgggcgtggtggcaggcgcctgtaatcccagctactcaggaggctgaggaaggagaattgcttgaacctgggaggcgaaggttgcagtgagccgagattgtgccattgcactccagcttgggcaacaacagcgagactccgtctcaaaaaaaaaaaaggtttgttttatagtgaactgtggagggataagggacaaagctgggcacaaaaatagatctgatggtagggttaggactgagggggcagaggaaatgagactgacatttcctagggaaactgacaggttagccaatgttcctattccaatccatcttcttggaaactgcctgccatttcctctgacatctgaagcacttgctgtaaagcactcactgcttacactatggctgcctggctggctttccttgagaatatgtatatttaatctgtattttgtctatgaagctttttgagggctctgtagttctactccacacattgcccactcacccatcccattttcctccggtagctgctacatggaaagtactatggatcaaattggaaatccatctctcctctcaaaggcagctaaagctatgtggtcaggctctgggccccagattccagtcctgatttctgagtctgctttccaggtcagggaatgcactggggctgacgacaaggctggaacgtcccgggattgaagcttggatccgaactgttggacggcgtctggagttttgcacaaaagagaattgaattgtagatcagctgggaagttactgtggtagtcctggtgccctgcggcctccagcgactggaaccctgtgggagcacatagctggcattttttgctagagattaggaagtcttttgcttcctctgtgaaaaggcttgaattcaatggactgtgtggtaagatgaagttgttttttttttcccttattgataaaaataaaacagagatttggcttgggttattacgcagtggtgggcacatgagcttgctctccagtgtttggcgggaagccagttgaagagcatgtggttacatttttgtccggcatcatcaagagtgtagagaagctgtgattctagcctcagaggagcgagtttttattgtggggtgactcttcaaagaccatctttatgcaagaaatgtcagaggcccatttcatagtaagtttctttggaagttttgttttcgtcgatgctatattatcactcatgggctgatgtcgtctccttatgatggtgtccctaagagccttcacaggcctagggagcactggttggtggtgggaggcccaggctgagaggcaggtctctgtgttgtatttcttcctgggctttagtctgtctctttctaaaatgggctaatcctctctctgccctcttcctcatgtggtgaagggcgttgggacaacatgcaaatatggttcaaaggagaagtgaagctgctcttttgtactctgtcacatttgcttgctctgaattgggtcttttgttagcacattctttgaagtagaacttgtccatggttgactttggtgtcttgatttggagaagaaattgagtagtgcccaactgcaggtagactgagaggctgaactgggtttgcatggggtttgcaggatgtgcagaatggttaaatgaatgtatgaatgaacatatgtagatcgaatgtttgatggggaacctcagaatgacccaagaaacatgtttctccagaaactaagtagatcttgggctgtgaagtatttagtacccataacaagcaatgatagtttaaatatgtagtccaaaaatttcttcctcatcagtcaagtcataaatgcaggacttaaaggaaaccacatgtgagaggtgtctgtgacctaggatattggaggcctgggtcacagttaggaatcaggacctcgcaaaatttacttaacattctccagaatgtggcccaatctacaaagccaccctcatgtcagctgctcagctggagagcacatgtgcttgaagtttctttcaccttcactcttgctttaataaaagcatgtataagtccaggagcttattttatactttggttgatcagcgattgtgtcttcactaagaaccacccatattgtcatccttgggcagacacgaggaaggatgaaaggattgacctgcgagaatctagagaactaaggccaagggaagcaggtcagatggaggtagattgcatctcagatttaactggccaatgatgaaaaaaggttttgttttttttttttagacagagtctcgcactgtcacccaggctggagagatctcggctcactgtaagctccgcctcctgggctcacgccattctcctgcctcagcctcccaagtagctgggactacaggtgcctgctaccatgcccagctaatttttttgttttgtatttttagtagagacagggtttcactgtgttagccaggatggtctcgacctcctgactttgtgatttgcccacctcggcctcccaaagtgctgggattacaggcgtgagccaccacgcccagcccggaaaaggttttttaaagagtgaggtagcacctacctggatcttgtcttgggtgggtgctatggtctgcatgtttatggccccccaaattcataattgaaacctaatctccgatatgataatattagaaggtggggtctttggaggttattaagtcatgagggtggagccctcacgaatgtgattcatccccttataaaggagactctagagagcttgtctgccccttctaccagtgaggacggagtaagaaggctgtctttgagaaatgagccctcaccaggcaggcaccaaatctgctggtgacttaatcttggatttgccagcctccagaactgtgaaacatacatttccatcatttgtaagttacctagccaatggtaatttgttgtagcagcctgaacggaccaagacagtgagggtgggagtggaatatgatgtgctaggttctttccagttttcaaataatatgcttttaccttctggagtttcatcccctgtgccactaatctctgaattgctaaaatctttgcatttttgtctcctactctccactttatcaaacaacctgtcctatgtctctgtatagctgcagactcttatcagacctctcaaaatatcgtttatgacttcctcttccatgtggaggacatgagagagtgagagagaactgggatcttctgtacttttaatgagtgaatccacatgattgtaggcatctaaaatagggctctcaaactttagcaggtcacagaatcaccaggagggcttgttaaaacacagattcatggttccaccccaatgttttccattcagtaggtctgtggaagggcccaagaatgtgcatttctaacaagttcccacctaatgctgttgttactggtgcagggaccacactttgagaaccaccaccctagaggacggggaccaagccagcccactctcagtaaaatcccaaatgcagagggggcagattaataagtaccagggtgtgctgtcctcttcctcctctttctcttcctcatcctcctcctttatcgaggcttacctgatccctgcctcaggggcctccaaagaaaactctgacttagaccaatgtgtcccagattcaatgtcactttctataggaagccgttcatgaaccccaggattagatgttgtggcttcctatactttttcttgatagctatcatgattcacaatttgcaactgtgatttgtgtgatttcttaatctctgtttcctccagagaatgtaagctccatgaagacaggatatacgaatagtaggaaaaaaggaagggtttgggtggggaatggtggtgagtcacccttaggattgtgcacaataaaagagagtgaaacaacagattttgtccccaaagaataaaggaaggggagggaggaggaaggaaaaaggtggcctggaatatccattagaacgttggctgccaagtctagcccagctctctctggtgccaaccagaggtttgcctgctctattttggccacagagtgggcatttcatctctccacgcattttaaaatcctagttgtttctttttttagctctgagctacttacccgctctaagcctcagctacagcacccataaaacaaagaattaaggctccagggctgaagagacctaagtacaacacccagctctgctactgttgcatttccatgagtgcctgaattaactcctgtaagcgtcggcttccctcctgaaaagggtttctactcctaatcttgttgggacacttccaggaatcagggcacatgaagtccttagcacaatccctggctcaatgcacatgagtggccattgtcatcaccatcttcaatatcaccgtcctcctcaccattgtcaccatttctgtccccacacccaaggtttctgaggtctcaatgggataaaataacttcataaccatgaagcactgtctgaatgtcaagggcatccaagtgccccatcccctgcccacaagtcctggagtaacatccaaggatgccttccttccccaggacgctggcgcaggctcaaccccttgcaagcctttggtgactcttgattttacgacaaatacatcttttgtctcttctgttttcaggacttcaactaaccaactaaagaactgttccccagagcattgttcctgagaaggaaaagagtccaaacacctacccacacctgctttgtgccaagaatccacagttggattgcaaggacagtgtatgttgtccttttggaaaaatgagagtgagcccaaatgaagaacaagcaaaggtgtctcaagtcatcccaaggcaactagggggttgcctgggctgtgacggcctcacttctgcatgagactctctctctggcttttcgcattaagtagcttcctgtccttctctgtaaaacaaaatgaatgagctgggtgcggtggctcatgcctataatcccagaactttgggaggccgaggtgggtggatcacctgaggtcaggagtttgagaccagcctggccaacatggtgaaaccccttctctactaaaaatacaaaaaaaaaaaaaattagctgggtatggtggcaggcgcctgtaatcccagctacttcggaggctgaggcaggagaatcgcttgaacccaggaggcagtttgtggtgagccaagattgcgccactgcactccagcctgggtgacaagagcgaaactcagtttcaaaaaaaaaaaaaaaaaaaaaatgaatgaaggtataatctggcagggtgcggtggctcacacatgtaatcccagcactttgagaggccaaggcgggaggatcacttgagaccaggagttcgagaccagcctgggcaaaatagagagatcccatctctaccaaaattaaaaaaaaaaaaaattagcctgacgtggtggtgcatgcctgtggtcccagctactctggaggctgaggtggaaggatcacttgggcgcaggaggtcaaggctgtagtgagcccatgatcgcaccactgcactccagcctgggtgactgagtgagaccctgtctcaataataataataataatataaataaaaataaaaataaagagctggctgggcgtggtggttcatgcctgtaatcctagcactttggaaggccaaggtgggcagattacttgaggtcaggagttcgagaccagcctggccaacatggtgaaaccccatctctactaaaaatacaaaaattagccaggcatggtggcaggcaactgtagtcccagctactcaggagactgagggacgagaatcgcttgaacacaggaggcggaggctgcaacaagaggttgcaatgagccaagttcgcaccaccgcactgcattccagcctgggtgacagagtgagactctgtctcaaaaaaaaaaaaaaaaaaagaaaagaaaaaaagaaaaagaaaataaagagctatccaagtctcaggatcttaaaaggtagatcctggggtttaagcccacttattttacagatgaggcccagagagaggcaaacactttcccaaggatacacagtaatttgtaactgggccaaagctcactatagttaagtctttttgtttgaggtgactgagataatgccatctatgattttttcttttaaggcaaatgctgtgctgatattcctcacagtttgagacttgtaaaatgcctctcttccctgagtacccatctgtcctctactaccctcagggtttgggactgatgctctgcagttgagggacagtgtgcaagattggttaagaatggaggagcctgatttcaaatctcagcttggttagcttacagccatatgaccttgggaagctacttgactgctgtgagcctcagtttcctcatgtgtaaaactgggaaaatagaacttatgaggagttcttgtgaactaatgcctgtgaggtattatatttatagcagtgcctcgcagacaggaagtattcaataaatgctaatttattgaatttaatgacctccaagagagttgcttaagggcaaagtggaagtcaattgaatagtgggtacatcctctctgaaagcaaggctaaaactatgtaaaaaaaagcatcactggaaaggaagaaggaatccagctgcttaagccaagtggagtggctcactcgtgtaatcccagcacttcgggaagctgagagaggaggatcactggagcccagcagtttgagaccagcctgggcagcatagtgagatcctatttccctttttctgagacagaatcttgccctgtcgcccaggctggagtgcagtggcacaacctcggcttactgcaacctccgcctccagggttcaagtgattctcctgcctcagcctccagagtagctgggattacaggcactcaccaccacgctcagtaatttttttagtttttcttttttcttttttttaagacggagtctctctttgtcacccaggctggagtgcagtgacatgatcttggctcactgcaagctctgcctcctgggttcacgccattctcctgcctcagcctcctgaatagctgggactacaggtgccagccaccacgcccggctaatttttttgtatttttagtagagacagggtttcaccatgttggccatgatggtctcgaactcctgacctcaggtgttctgcccaccttggcctccccaaatgctgggattacaggcatgtgccaccgcacccagccgtgagatcctattccttaaaaaaacaaacaaacaggccgggcgcggtggctcacgcctgtaatcccaacactttgggaggccgaggtgggtggatcgcaaggtcaggagatcgagaccatcctggctaacatggtctctactgaaaatacaaaaaattagccgggcgaggtggcgggcgcctgtagtcccagctactcaggaggctgaggcaggagaatggcgtgcactcgggaggcggagcttgcagtaagccgagattgcgccactgcactccagcctgggcgacagagagagattccatctcaaaacaacaacaaaaaacaaacaaacaaacaaaaaacagaaaggaatccagctattagcaaaattcaaatgaattgtggatttttctgttattaaaatgtagagatatcaggatccctaaactcaagtaaatgacacaataaacaaagcatcaaatttgaagctgtgttatgatggtgcctgtgccagatttgggggaagggcaatacttggcttacacagatgctctagatcttgaagagggagagaggggcacagttctgcggcgacatgtgcgagtaccagagagagggccagttacttcggggtggagagtatatggagaatggaatgactagctataaaccagcttgcatggtgggctggtggaaacaccagtttctacatgacctctagaccaaacactctctagacaaaaagcaactctgctttgaatgaccttcaaagcgaatgccctgggccagtcccaagggttccttcccctcctcctactccgtctcctgggtaacaacattgtaagactgggaagaaaggaggtgatagcataatcttctctgtcatgttacagacccagggagcttttaagaaataaataccaatgggaaagaggtaacatgcattctctgcaagtactttggtaactcatagcagtgttttaactagactcgggaagttgcctggggatcagaaaggaaggcaaaaatgtgtgtggaatttgtcaaaatttgttaagcccatatagcataataaggagaacatctatctacaaaaacaaagttaaatcataaattatagctgagtacagtggctgacacctgtaatcccagcactttgggaggctgagggaggagaatcgcttgagcccaggggtttaagaccagcctgggcaacatagtgagatcccgtctctacaaaaaattaaaaaattagccagctgtggtagtttgagcctgtagtcccagctgcagaggctgaggtgggaggatcacttgagctctgaaggtggaggctgcagttagtgtgattgcactactgcactccagcccaggtgacagagcaggacgctgtctcaaaaacaagcaaacaaataattgcaaggcatatattttatttttagatcacgctttacttttttttttttttgagatggagtttcgctctcgttgtcctggctggagtgcaatggtgcaatctcggctcactgcaacctccgcctcccaggttcaagggattctcctggctcagcctcccaagtagctgggattacaggcatgtgctaccatgcccggctaattttttgtatttagtagagagggggtttcacctcgttggtcaggctggtctcgaactcctgacctcaggtgatccacccacctcggcctcccaacgtgctgggattacaggcatgggccacctcatgaggcgcctggcctcatgctttgctttgaactaggggaaccatcagtgcctctgtcgaggaagctcatagagaaaccagggacaaatcctagaaggctttacgctttcagccagggctctccatatcattttggttatgcactccatcagtaaaatatttttgtagacacattgtattagtctgttttcgcactgctataaagaaatggccctcaattatgtcataataacatcacacaagtatttcagttgaaaaaaaagaaaagaaagaaaaagaaatgcccgagactgggtaatttaaaaaggaaagaggtttaattgacttacagttcagcatggctagagaggcctcaggaaacttgtaatcatggcgggaaggcaaaggggaagcaaggcaccttcttcatacggctgcaggaaggagaggtgcagggtgaagggggaagagcctcttataaaaccatcagatctcatgagaacccactcactatcacaagaacagcagggggggaaccgcccccatgatccaactccttccacctggtctctcccttgacatgtggggattatggggactatggggattataattcaaaatgagatgtgggttgggacacaaagcctaaccatatcacacattcctcagtacatatattttaattattttgagattatatatctttataagtccacttatgcgaaatggccagaaggcaaattcacagacacagaaagtagattagtggttgccaggggctgggggaaggatcgaatgagaatggctggtaatgggtatgggtttccttatagagtgatgaaaattttctggaattagtgatgatggttgcacaaccttatgaatatacagaaaaccactgaattatacactttaaagggtgagtcttttggtatgtgagttatagctcattttttaaaaaatcacatataaataatgtgtacattataaagaatagccttaaaaagttatagggtgagattttaaaagtcgtaagtagactgaatgcagtggcttacacctgtaatcccagcactttgggaggctgaggcagggtaatcacttgagaccaggggttcaagaccagcttgggcaacatagcaagacactgtgtctacaaaaaaaaaaaaaaaattaaaaattaggctggcatggtggcccatgcctgtggttgcagctactcagcaggctgaggcaggaggattgcttgtgtccaagagttcaagtttgaggctgcagtgtgctacgatggcaccactgcactccaacctggtcaacggactgagactctgacttggccttttggagatgtctttgctaatttccacttctattggatttcctctccaaagcatgactctttctttggacatagtcataagcagagaaggttgtagttggtgacgaggtaccacttccagaccaggctccagggaatttcttctagaatgacaggctgccagaaaccttgactgggtgcagtagctcaggcctgtaacccagcactttaggaggctgaagtgggaggtttgcttgagcccaggagttcgaaaccagcctgagcaacagaagctgcagtgagctatgatggcgccactgcattctagtctgggcaacagagcaatactctgcctcaaacaaacaaaaggagaaactttatgacattttacctgggtttacgaatactctagaaatgtgtctgcactatgtcttggttctcagtattagggtgtttagcttcctaattggtgaggacaaaaatgagaccgacaatcctctgaccctgccttctttgaacttggcctttctctaggcgttcaagacccagctgttgagagtagaaaagcagaagaaaggacccgaggtcagcaagtgccctccccacaatggggcagatctgccagcgagaatcggtaagctctggtgtttctttctttctttctttttttgagacgtttttgttccatcgcccaggctggagtgtagtggcgcgatctcggctcactataacctctgcctcccgggttcaagcgattctcctgcctcagcctcccagtagctgggattacaggcatgggccaccacacctggctaattttgtatttttttgtagagatggggtttctccatgttggtcaggctggtctcaaactcctgacctcaggtgatccgcccacctcggcctcccaaagtgctgggattacaagccgctctggtgtttctttagcttctcagagggctcacatgtaccatagcctgctcaacctgctctccctggcagaggggtgtgttggggtccatcttagaggagggaaaactctgaccaagagcacagcaggaaagcgtcatgaggcaaggcaggagccccctcagacccagcctctaagtcttggtgcagcaggggccacttgtgttctgaccaagggaagcccagaggatcgttctgtatccccctggttaattgctttttagacagttatgctgtgaagtcatcagtgtgtgctggaaataggagtttggctttttcttctctaagagaagccccctctggctgaattttatattgccatgtaaaaatgggcttctgcccattaaaaaaaaaaattttttttttttttttttttttttttttgagatagagtctcattctgttgcccaggctggagtgcaatggcatgatctcggctcactgtaacctctgcctcctgggttaaagtgattcttgtgcctcagcctccctagtagctgaaattacaggcgtgcgccaccatgcctggctaattttgtatttttttgtagagatggggttttgtcatgttgcccaggctggtctcgaaaccctggcttcatatgatccgcccacctcagcctcccgaagtgctgggattataggcgtgagctactgcacccggccaattttttttttttttttttttaaattttaacagagacaaggtcttactatgcttcccaggctggtgttgaactcctggcttcaagtgatcctcccacctcatcctcccaaagtgttgggattacagtgtgagccactgtgcccagcccagaagcccgttcttacatcttaaagagctttgattctccccctggatgttgaaataaaccctggaaaatgtttataggataaattatgttctgagtagcgggctcatttcaaattaatctatgctgtaggtgggtccctctgaagcaaggactacagctgttccaccccgccccccaccaacagaacaatctgggaaattgagacacagtgggcttgatctcaaagacaaacacagtgctcatactaactgagtgccctgagcccagaacactctcagagccccatttaaatcactgcagtggcctggcctgtttgctttatgaagactttcccctggtcagcccttgggtggcaaattaattcctgattagtatctgaaagtggacaatacaagctcaaggagttgcttccacctcgaggcaagaggtgagggtcttgggcacgcctggggtggttatctttccctcagtcctacaagagtagcttacaatgccctcttcagcttctttgagaagggctttgcaaagtccagctcaggtgcatccctcctgcctcccagggtttttcgtttgtttgtttgttgttgttgtttttgaaacagaatttcactcttattgcccaggctggaatgctatggtgcaatcttggctcactacaacctctgcctcccaggttcatgcagttttcctgcctcagcctccccagtagccgggattacaggctcccgccaccacgcctggctaattttttgtatttttagtagagacggggtttcgccaagttggccaggctggtctcgaactcctgacctcaggtgatccacccgcctcagcctctcaaagtgctgtgattacaggcgtgaacctctgtgctcagcccctctcaggcttttgagaggattgaattctgtcctgttcctaatgcccaactggaagctctcagcctcattctcctttgtggaatccaaggctcctgtgtggttgtcagtggggagtggaggccactaaatacagaaaatcaaaattcctcttagccgttgggtctcttaggcctcttccttttctcctccttcaccccgcaaccagagtgagaaaagttttgcctgctctgggaaagaaggagcccttctaaacctggaagcttgtttgggatgtcattgccacctctcatggcccccttcttgtgcccctgcctggctttgccagtcccaggcagaatgccaccaggaatttaaagcaggccaggccagccttggagaggtggcacaaagcagccagtgtcacaggcgccatgtggcagtcagcaggtttggactcctgcacccagagttcagtgtcaatctgacgacaggccctctttggtgcttggaggtccagggagaggagcacaggttctgggatctcagacacagatggaaatccagcagctggacgttgatttggtcccatcaattagcccagagcagttgtagttcttattgcctggagcctctgtcaatccatgatctttattgtagctgctgccatttaccaagcaaatcctctatgcccaccactcccaaaggcccagtgaagaaggtgtcattcccactttacagatggggaaactgaggcttagagaggttaaattcctttgccaagcttgtacagctggtcctggcagatccaggacataaactcaggactctctcactccaggactgtgctctttctacccaccatcaagctcaaggctgaaagtgaggtgtgtgactccaaccctatcttcctaaggatagatatattttgagttgttccaagcttagaaactcatgctcgggatattgaaatttccactgttagtgtaaggaagggccaaaaattgcatggtccatttggtttctttctcataggtttcctgacaattccaagccccagagagtatttttccctgttgccttactattaattctcatgtaggcttggaagtatctgcaagccttcattagagccatttcagcagggagttggctatcatgggggtgtcagtgtaaggcctaggcagttttggctttgggcatgtggaaaacctgcctggattgttctggaagctcagactgtctatgggatgctattttttgcttccgtagttttcctaggaccataattttttttaattttattttttatagatgggatattgccctgtcacccaggttggagtgcagtggcacaatcatggctcactgaagccttgaactcctgagctcaactgatcctcttgcctcagcctcccaagtagctgggactagaggcgtgtgcccccacaaccagccagtttttaatttttttttgtagagacagggtcttgctatgttgcccaggctgttcttaaatccctggcgtcaagtgatcctcctgcctcagcctcctaaagtgctgggattacaggtatgagccactgcacccagcttaggaccttgattatgtgaggtaggacaagaagtgctggaaagatcatccctgccctccaggggagatacacacatggattacccctgattcttacagggactacctgcatgtccatgggctgctatgcaagcttccaggaacttcagtctccttccttatagagtgggattgccccttgtgctctgtcactctgggttccatcccttctcacccactaatagtggggaggaagaagaagagctaatatttatgctgtgctttctgggtctgggcactaagataggaggcactttacaggttgttattacagataaagggctgaggagggcctcagtattcgtattcgtatttttcccccagttttcccccaacctccagtgctgcagagatacctgcaggggtgagtggagattgacaatcagaatcctatgagatctccaagttgagagcagagtcctttgaagtccctaggcgtcaccaatatacttgagtttgggctacatctgttctgacttggggctccccagaaagtttgtctctagcagccctgagattggttgggaccaggacccaccctatcccctgctagtggtaggtggaaaggtggggtgaggctctaatccatctgattcatctcccctttcactggacaagactgatttggcctccactggctccagagcaggcatgctggctacactcccaacactcatttctggaggtgtgacttgagcccattaccaagcatttttattcacccccctgctccctatctggcatcttctgtatgtggggacgtttatcaactctgtgctccttgggtagccttcttctgtgcccagtgacacaggacagctcagttcccagcctcagccagatgccctgggcatgttaggcaggtgggctggtactcacatgtgcctgaggttcccagcctcagttcacctccaataggtctaggtttccttttccatgaagtattccagcaaccagaaagtcaagcatctaaacaggccagcttgcacatgatttttggagatactggaggaggaaggaagatatctccaagatatgtatgcactgtcatttctgcctccaaccttgaaacccttctctgtatcagccagcttttgctatgtgtgtggtgtaataaatcaccttaatacttagtggcttaaaacaataatctcttatttaccggcaatcctgtgagttggtaatttggactgagctcacctggaacggctcttctctgtcccatttactgtcagactggctccctcagaggtctgcaggcagcttgaggtctgtggcttctcttccacatctgaaagttgactggctgtaggcaagggtggtaactgggccatgtgccacacatgttcagcagaataactggggctcattcacatagtggtggttgcaagggttccaagagcagcatgggaagtcaagccccgaagcacaagcatatttctttcttttttttttttttttttttttttgagacagagtctcccactttggctcaggctggagtgcagtggcgtgatctcggctcactgcaagctccgcctcccgggttcacgccattctcctgcctcagcctcccgagtagctgggactacaggcgcccaccaccacgcccggctgattttttgtatttttagtagagacggggtttcaccgtgttagccaggatggtctcgatctcctgaccttgtgatccacccgcctcggcctcccaaagtgctgggattacaggcgtgagccaccgcgcccggccctgcacaagcatatttcaagtgtctgtttgcatggcattgctattgtcctatgagcccaagcaagtcacatggccagttctggagttgctgtgagtggagactatgtaaaagcatgggtatagggaggagaattagtgtggctgttttttgcaaacaatttaccacaccctccctatccattcagctatcatcaggaaaaaattcatatgagcttttctcttgattggcagcagcttccaaaatttgtgaggcaaaggaagttataaaaaagcagaatctgccaggggcagtggctcacatctgtgatcccagcactttgggaagttgaggcaggtggatcacttgagcccaggagtttgagaccagcctggtcaacacagagggactccatctgtacaaaaactaaaaaatgtggccaggcacggtgcctcacacttgtaatcccagcacttgggaagctgaggcaggcagatcactcaagttcaggagttcaagaccagctgggccaacatagagaaatcccatctctactaaaaatacaaaaaaaataattagccgggtgtggtggcggatgcctgtaatcccaactactcagaaggctgaggcaagagaatcgcttgaacctgggaggcagaggttgcagtgagcagagatcatgccactgcactccagcctgggcaacagagcgagactccatctcaataaataaataaataaataagccaggtgtggtgttgcacacctgtagtcccaactacttgggagggtgaggtgggaggattgcttgagcccgggaggtcgaggctgcagtgagccttaatcatgccaccgcactccaagcctgggcaacagagagagagagagagagagagagaaagagagaccctgtctcaaaaaaaaaaaaaaaatagcgaggggagggcagaatgctaactcatctttcgcagaccctgccaagagctggtcactgcttgatggccatgttgcctccttgctcatcagggaagcattgcatcttcagggtgggagacacagcggggcctgcggttcagtagggattagatgcctgtgctcccacagctcctctccaggcctctgccgcagctccggtgctgctgcgcttccattactgaccggcacatctgtctttcttagtggattgtgggctccttgagggccgaaccacggttgtctttcatcttggactctccagcttccaacacagtgcctggtacatttgtaagaacctagtgtttgtgtgaataaattcatgaattgcacatgactgagctctgctgcatttcatccagagaattggtaatcatgatagaatttgcttagacattccaaggttacttgtaattacttttgttttctgagcgtgattgattagttataagcatcaatatgttgtgaatgcaagttgctaaaatgcatttgtaacactttacttgtcctgtctttctctaaggctacagcagctgaaaaaccaaaacttcatctacttgctgaaagtgaggtaagaaagctatttttttttttatttccttctgtaacattttctgtaaaagatagtgcgtggcaatcccctttgggataatgattttcagccagccaagcagctgtgcagtggcttctccagggtgtggagcagtattgacctccaacttgctccctgctggactcagtacacctgaacagggaaggtgctttccaagggtgcctagtaacagaggcccccttcttagccctttcttggaagcagaatgctaattgtcagagccaaacacaaggccttcctgccttggggatgcatggtgtcctgattgtgagagaccctgggaggggaaatggaagggtctctcccctcccgtcttttccattttacagtcaggcatgccagaaacttggcacccatctgctctgcacttcaatatggacaagtttcagatctttcctgtcgacatatcccatttagccccaaatcaaagagtttcctgcgctgtttgtgctgacctaccctcttccctcccattccccaagcacacagcttactatctctttaaagtggcaacagagtggatctgagatgggttgcttcatgcgaaggtggtgaggtgtacactttatgaatcagcttgggagaaaagcacagaaactctcgatttcccctgtgtccggggccattacctagtcccaggtgagggccaaagctgggtgtggattcaacctggagccccagagctctgccctgctcctcattccactgattgcgtagctttattcttgttcttttgaaaataaataagactcggtctccagcctcaaaagacttaatgactgagaagtgaagctcaatattttttcaaaagagaaagttacaacataggtgaaacgtgctttaagagctgggtgagggagtggtcaaccccgtcttgggtccagataacaaaggctggatagaggtgatgagatttgcagagagtcttgaagaagaggaaagcatgtgtcaggcgaggaagggcatttcaagcagagagagcagcatgtgccaaaacagagcctgcaaaaatgggaaaaagctggggagactgaggaggttggatgggactgggattggttgtccagttgagaaactctgacagcatggcctgaaggatcctctaggctgaggagtcctgtgattacattgttttctgtctggcagtagcaaggagcttgagctggaggaagccttgggcatccaggaaaccagagagggggtagggggcataagtgtagtgagacctccaggatgtgtgctgtgcaagatgatctacttcccagtgggaagaaagtacagttgaccctgaagcaatgagggggttatggacactgaccacccccacatcatgcagtagaaaatccatatataactttctactcccccaaaaccaaactgctaaaactactgttgaccaaaagccttactgataacataaagtcaattaacaaatattttgtatgttttatatactatattctgtattcttacaataaagtaagctagagaaaagaaaatgttattaagaaaatcataaggaagagagatagatttactattctttaagtgggagtggatcaccatgaaggtcttcatccttgtagtcttcactttgtgtaggctgaggaggaggtagaggagggcttagtcttgctgtctcaggggtggcagaggcagaagaagatccaggtgtaagcaaactcctgcagtgcaaaccggtgttgttcgagggtcaactgtattacaattccattgtcaccaactttttaaagacaaatcaacgttggtggccttgcaggtacccaggactctcacaatgaggaggggttgatagtggccccctcctttatttcctagaccatctttagcatattctgaagcatcgcagctttagaattgcttggttgaggccggatgtggtggcttattcctgtaatcccagcactttggaaggccggggttggcgtatcacctgaggtcgggtgtttaagaccagcctggccaacacggtaaaaccccatctctactaaaaatacaaaaatttagccagacatggtggtgtgcatctgtaatcccaactacttgggaggctgaggcacgagaatcgcttgaacctgggaggcggaggttgcagtgagctgagatcctgccactgcactccagcttgggccacagagtgaaactctgtctcaaaaaaaaaaaaagaaaaaaaagtgcttggtcgggccaggtgcggtggctcacgcctgtaatcccagcactttgggaggccgaggcagatgtatcacctgaggtcaggagttccagaccagcctggccaacatggtgaaaccccgtctctactaaaaatacaaaaattagccaggcgtggtggcaggcacctgtaatcccagctactcgggaggctgaggcaggagaaatgcttgaacccaggaggcggaggttacagtgagctgagatcatgccattgcactccagcctgggcaagaagagagaaactccatctcaaggaaaaaaagaaaaaaaaagaattgcttggttgaagtagtcttacgtatcatgttatttgggtttaattagactgatcctcacaaaataggcaagtggttttaaaagatttctgcataaaaaatgtgggttgagacaggtgtagtgactcatacctgtaataccagtgctttaaaagaccaaggagaggatcacttgaggccagggtcttgagaacatcctgggcaacatagcaagacctcatctctaaaaaaaattgtaaaaattagctgagcatggtgatgtgtgcctacaatcccagctacttgagaggctgaggcaggagaattgcttgagtccaagagtttgaggctgcagtgagctatgatttgtgcccctgcaccccagcgtgggtgacagtgagaccctgtctcttaaaaggaaaaaaaaaagtagaagcttttgaagctaacacaaatgaacaatgagaaaataagatggctgataattttcctacccctggtacagactattcagctacatcatggggttgaaagaagataaagatcttattagatataatgccaagtcagtcaaaaaattaaaaattagcaggctatttaaattctggctttacatatgatattgttaatgatgaactaatcactatgtgtacagagtgccttgagagaattagctaatgacactactaggccaccaaattttaaaatagttcatctttatctctttatttatttattttttggaaacagagtctcactctgttgcccaggctggagtgcagtggcatgatctcagctcattgcaacctctccctcctgggttcaagtgattcttctgcctcagcctcccaagtacctgggattacaggcgtgcgccaccatgcccgacctatgtttttattttttttaaatgaaagtataatttactaccagtcaaacacacaaattctgtaagcttaataagtgtgttgttgttgaaacagggtctcgctctgtcatgcaggctggagtgcagtggtgcgatcttggctcactgcagcctccaccccgtgggctcaagtgaccctcccacctggtctcccaagtagctgggactacagccatgtaccagcctgcccatttttttgtttgtttgtttgtggtttttgtttgtttgtttgtttgtttgtttgagacggagtctctctctgttgcccaggctggagtgcaatggcgtgatctcggctcctgcaaccttcgcctcctgggttcaagcgattctcctgtctcagcctcccgagtagttgggattacaggcgtgcgccaccaggcccagctaatttttgtatttttagtagagacggggtttcaccatgttggttaagttggtctcgaactcctgacctcgtgattgcccagctcggcctcccaaagtgctgagattacaggcgtgagccaccgcgcccagctttgtttgtgtttttttgagatggagtctcactctgttgcctgggctggagtgcagtggcgcaatctcggctcactgcaacctctggctcctgtgttcaagcaattctcctgcctcagcctcccaagtagctgggattacaggcgcctgccactacacccagtaattttttgtacttttggtagagatgaggttttaccatgttggccaggctggtcttgaactcctgacctcatgattcgcctgccttggcctcccaaagtgctgggattacaggcctcagccaccgtacccggcctatttttaattttttttttcagtagagacagggtcttgccatgttgccccggctggtcttgaactcctgagctcaagcaatccacctgcctcagcctcccaaagtgcttggattacagatgtgagccaccatgcccggctgtttaagaagttttaacacacgtatacacctatgtaaccgttgcccagttcaagatatagaacattttcatcaccccccaaaatcccttcacagtcttttccagtcaatacttcccatttcctgtcctgacagtatcactattctgacttctatcaccagagcttttccattcttgaacctcatataaatataatcatacatatgtactctcttgtgtctggttttaatattttaatgttgctgcatatatcaaaaggttattcctatgtaattttgttttttgcttttttttcatgaggcattttatttgtaaatatgtataacatctctagaaaaagaatcccaggattttccttcctgtgtgttttcgtcttgcttctttatggtccatgatgccagctgagactgtcagtacaatgaaatcaaactggccagatggaagcagattattctgcatttctctagatctttgagttgcacatcaaatctggggctgatcatgccacacttgtttagactgcctgtgaggttcacaacaatttgcctagctctgtgatcatccatgatttcaaattcgccaatataaccatgcttcatcatcacagtgagaaaccagacgatgactttggagcatggcctaagaacctggtgtttgtctctcttttcagcattgttgatgctcttgagagcatcagccaggacattaatgtgcaccactgtggtggcgtggaaagatggcaaaaagagccctgcatgattttgtacgtagaaaatcctggaatacccacaaaaacctattagaactaataaacaatttcagcaaggttataggatacaaggttaatatacataaatcaattgtagccaggcacggtggctcacgcctgtaatcccagcactttgggaggctgaggcaggtggatcacaaggtcaggagttcaagaccagccttggtttcagactggtgaaacccagtctctactaaaaatacaaaaattagccgggtgtagtgttgggtgcctgtaatcccagctactcgggaggctgaggcagataattgcttgaacctgggagatggaggttgcagtgagccgagatcacgccactgcactccagcctgggtgacagagcaagactccatctcaaaaaaaaaaaaaaaaattaaattgtacttcttctataaaattgcaatgaacaatataaaaatgaaattaagaaaacaattcctggctgggtgtggtggtgagtgggtcacctgaggtcagaagtttgcaaccagcctggccaacatggtgaaaccccatctctactaaaaatacaaaaactagccagttgtggtggcacacacctgtaatcccagctactcgggaggctgaggcaggagaattgcttgaacctgggaggtggaggttgcagtgagctgagatcacaccagtgtactctagcctgggtaacagagtgagactctgtctcaaaaaaaaaaaaaaaaaaaaaagaaaagaaaacaattccatgtataatagcatcaaaaagaacaaattacttaggaataaacaagagaagtatagacttttactctgaaaactacaaaggattgttgaaagaaaataaagaagatctaaattaatggaaagacatcccatgttcatggattggaagacactattgttaaggtggtaaactccccaaattaatatatagattcaacccaattcctatgaaaatctcagctggcttctttgcagaaattgacaagctgcttctaaaattcatatgaaaatggaaggggtgccgaatagccaaaacaatcttgaataagaagaaagagaactcacatttcctgatttcaaaattttaaaagcaggctgggtgtggtggctcacacttgtaatcctagaactttgggaggccgaaacaggtggatcacctgaggtcaggagttcgtgaccagccttgccaacatggtgaaaccccatctctactaaaaatacaaaaaattagccaggcgtggaggtaggtgcctgtaatcccagctacttgggaggctgaggcaggagaatcacttgaacctgggaggcagaggttgcggtgagctgagatcacaccattgcactccagcctgggcaacaagagcaaaactccatctcaaaaaaagaaaaaaaaaacttataaagctacagtaatcaagacaatgtgatactaacattaggataattatatagctgcatgaactgaaattgagagttcagaaataaacccttacatttatggtataatgatttttttttttttgagacagagtctcactctgtcgcccaggctggagtgcagtggtgcgatctcagctcactgcaatctccgcctcccgggttcacaccattctcctgcctcagcctcccaggtataataatttttgacaaagatgtgaaaacaattcaatggggaaagaaaagcctttcaacagatggtgctaagactctgtctctacaaaaagtaattttaaaatttcctgagagtggtggggtgcatctgtggtcccagctacttgggaggctgaggtgggaggatcacttgggccctggaaggtcaaggctgcagtgagctgtgattgatccactgcactccagcctgggcaaaactatgggaccctgtctcaaaaaaaaaaaaaaaaaaagtttgtaggtttcatttgtttgctttgtttgtttgttctgagatacatttacaggtagaattcttagggtttggtaacaggttacatgtggagcccatgggagtggaaggagttcaaggatgatggcagattttcagcagaggcgatgaggggctagttctgcctggaacactcttttcctagacactggcatagtgtccctcatcttattctggtttctgctcaaatgccgcatcttcagaggtccttccctgtccatcctgactaaaatgaaatccctaccctttatttgttcaacgtgtgtatcagttagtattagatttggctggcagtaacagaaaactccaaaatagcatttggataaacacattggaattttgtttttctctcaaattttagaaatatagaggtaatgtggtggggggaggggggaggctgatatggggcagcttgatgacaaggatgcaggttctattctattttgttgctttgttttgtatgggcatcattcccagagttatctcttttttttaattagaataacacacatgtattatctacgatttttgtaaccacccagagggttcactttgcccactgcctagacagagctgatttatcaaggtagagaattgcaatagagaaagagtaactcatgcagagctggctgtgtgggagaccagagttttatcattactcaaatcagtttccccaggactatttctctattgcaattaaatccatgcaccatgggtcagcagtgaccggcctgtagagacagtagcggagtcaacccccagtccaagagaagtaggcggccacttggactggcctctggatccgtcaccagagggaggctaccgaaccaggattacccttatggcaggtagtcttaagggcaatcctggacaagctcccaaacttgtaaccgcccaacaggttcaccttgcccactgcctagacagagctgattcatcaacaggggaattgcaataaagaaggagtaattcactcagagtcacctttgcgggagactggggttttactattactcaaatcagtctccttgagcatttggggattggagttttaaggataatttggtgggtaggaagcagccagtgagtcaggagtgctgattggttgggtcagagatgaaatcatagggaattgaaactgtcttgcactgagtcagtttctggctgggggccacaagatcagatgatccagtttatcaatctggggggtgccaactgatccatcaagtgcaaggtctgcaaaatatctcaagcactatcttaggctttacaatagtgatgtaatccccaggatcaatttgggagggtcagaatcttgtagcctccagctgcatgactcctaaaccataatttctaatctttttgctaatttgttagtccttcaaaggcagtctgatctccagacaagaagagggtttgttttggaaaagggctgttatcatcttgttgtatttttatttttattatttatttatttatttatttatttatttatttatttatttatttttgggggacagagtctcgctctatcgcccagaatggagagcagtggcccagtctcggctcactgcaacctctgcctcctggattcaagcgattctcctgcctcagcctcccaagtagctgggattactggcgcccgccaccacacccagctaatttttgtatttttagtagaagcagcgtttcaccatgttggccaagctggtctcgaactcctgacctcaagtgatccgctcgccttggcctcccaaagcgctaggattacaggcgtgagccactgcgctcagcctcatctttgttttaaactataaactaagttcctcccaaagttagttcagcctatgaccgggaatgaacaaggacagcttggaggttaaaagcaagatggagttggataggtcagatctttcactgtctcagtaatattttgccatgggtgtttcatgtttgtgggtcaggagttgggataagctgagctaggtgtcctgccttgggtcatgctttcctgctcatgtggttgtttgcagcgttcggttccttgtagctgtaggattcacatcttgcttcttctgagaggcctggaggctagaagtccaaattcaaggtgttggcaggcttgtgctccctctgaatcttggagaagaagaccctcccttgcctcttccagcttccagtggccccaagcgttccttggcttgtggcagcatcactcccatccctgcctgcatctttgtatggtcatcttctttctgtgtatgtcccttcacatggcgttctccctgtgtgtcccaaggttatctcataatccaagatgattgcaggatctccagccactctgcctgtcctccagtcagcgggaaggaggaatggcaaagaagcaggaaagccacagaatagctgtgtctcttaagggaggctccagaagctactgagacactctcactttcatctctggccagagcttggtcacatgcctgcatccgactataggggaggctggaaatggaatctttattctgggaggcctgagttcacctaaaaattggagcattgattagtttattaggacaaaggggaaatggatattgtgggatacagctgtgtcagctgcgcctgccttttctcctagtgcctggcctaatgtatatttaattagccatttgtttaccatctgtctctcccgatcagaatgtgggctgtgtaaaaccaaagaagaaaactgaggtaccagttaaaaaaaaagaaaaagaagaaggctgggtgtggtagttcacacctgtaatcccaacactttgggaggccaaggcaggcagatcacctgaggtcaggagttcgagaccagcctggaacatggtgaaaccctgtctctattaaaaatacaaaaaattagccaggtgtggtggcatgcactgtaatcccagctactcgggaggctgagggaggagaatcgtttgaacccgggaggcagagtttgcagtgagccgagatgatgccactgcactccagcctgggcgacagagtgagactctgtctcaaaaaaaacaaaaaacaaaacaaaaaaaacaacaaaaaaaaataagaaaaagaaaaaaagaagaagaaaatgactgaggcgagtctcaatcaatttagagttaattttgccaaggatgagaatatgcccagaaaaaagagacataagccacagtaggatctgtgacccacactttttccaaagagggtttgaggacttcaatatttaaagaggaaagggtggggctgggcacggtggctcacgcctgtaatcccagcactttgggaggccaaggcgggcagatcatgaggtcaggagattgagactatcctggctaacagtgaaacaccgtctctactaaaaatacaaaaaaaaaattagccacgcattgtggcgggcacctgtagtcccagctactcaggaggctgaggcaggagaatggtgtgaatccgggaggtggagcttgcagtgagctgagatcgcaccagtgcactgcagcccgggcgacagagtgagactctgtctcaaaaaaataaaaataaaataaaataaaaaataaataaataaaataaaaaataaagaggaaagggtgagcagtgcaggaaagaggaaagggaaaaaagggaagggtagataaaagagacaaggggttgcattcttttgagactttgattagcttagtgttccctgaacccacagttcacatgtgaaatgaggagggtggaggaacagtcagctatgcattcatactcagtgaatgtgcatttttacataagtaaagtaagcatagaataaaggaagcagtcaaatatgcgtttggcgcaggtgaaggaagggataacttctagtccagtccttgtcctgtacctgtgatggtaagctgtcagtgtacattgtttgggtgaaattcaacagaattctgttttagggtaaagggatttcctcatgagcaaattgtgagggaagccccctgggaagatatgtggcctacctttgcagctacctatgtagggacaaaatgggaggtgttttgggtgacacagttcccaagctaaacactttcctttggcatagggagtttgttggatttttgggttgttcaccacatttccagtgactaggaaagtgcagggcagattaggtgtttcacaaatatgtgttgggtgaataaatgacaaggaggggaattgagaagagtaagtttaaggagaagaacatgactgtgttggaagatactgagtttcgggtgcccatgggacatataagacttgattctcataggcagctggaaatataatcacgaacttgggagggagatgtggctgaagcccttgacaagagtgattctttgggaagggcatagcgagacagacctacagaaaacagcgagagaggagacatactcagcccactcagtggaatcaacccaagccagaagtctccacccccaccccccgggggagggcaacttcttccataacccacttatagcccctctggccttgcagatctgcctctctgtttggtttgagaattccccttataaaggaactctgcagggcccagatccacttgccacgctttaggaatctaagccacgactcagtctcctcggtgcaggttcttggaccccttcactggacctgagtgaaataagagaaataaggacaatatagtaaaataaatattgcattttgtcggaatgacaaggtgggctggagacacactgccttggcttggatcccagcttttccattcagttgctgtgtgaccttgagaaagtcacttaatcaccccgtgattcagtttcctcatctataaaatggggatattacgagtatccacctcattgtgttgttttaaggatcaatcagtcaataaataagtaaataatttagaacaatggtgtatagtaagttctacctaagtgctagctattaatataaagccaaatgtatttagcttacaaagcaaccattatttttacttctctgttttaaaatatattttcttttctttttttttgagatggagtctcactctgtcagccaggctggagtgtggtggcacgatctcggctcatggcaacctctgcctccccggttcaagtgattctcctgccccagcctctggagtagcagggactataggtgcacaccacacgcccagctaattttttgtatttttaatagagacggggtttcatcatgattgccaagctggttttgaactcctgacctcaagtgatcgacccacctcagcctcccaaagtgctaggattacaggtgtgagccaccacgccccgcctaaaatatattttcttttaggaaagcggttcccaacctttatggcactaggcactggttttgtggaagacaatttttccacagacccgtgtgtgtgtggggatggtttcggggtgaaactgttccacctcagatcattatgcagcaggacaagctgcagacaaaactcctcagacaccgagttaaagaaggaagcggtttattcagccaggagcatcggcaagactcctgtctcaagagccgagctccccgagtgaacaattcctgtcccttttaagggctcacaactctaagagggtccttgggagagggtcatgattgactgagcaagcagggggtatgtgactgggggctgcaggcactggtaatcagaacaaaacagaacaggacagggatttttacaatgcctttccatacaatgcctggactctatagataacataaacggttaggtcaggggtcgatctgtaactaccaggcttaggtcaggcagggccaggcctggtttcgggtctggttccttgctttcgggtctggttcctgggcgccaggctacctgcctttagttttgcttctctttctttttctgagtataaaacaatatgagagggtctgtctctcttctctcaattaggcactagattctcataaaaagtgcacaatccagatcctttggatgagcagttcacaatagggtttgtactcctacaagaatctaattgcactgctgatctgacaggagacagagctgaggcggtaatgctcgctcacctgctgctcacctcctgctgtgaagctcagtccctaacaggccacagaccagttggggaccctactttaggaaattatgattataggatatgaaaatcatacacctaaaaaagatcctggtctggcatggtggctcatgactgctaattccagcactttggaaggccaagtcaggaggattgcttgagcccaggagttcgagattgcagtgagctatgatcataccactgcactttagcctaggtgacagcaagactttgtctcttttctttctttcttttttttttttttgagacagagtctcgctctgtcccctaggctgaagtgcaatggcatgatctcggctcactgcaagctccgcctgctgggttcacgccattctcctgcctcagcctccccagtagctggaactacaggcacccgccaccacgcccggctaattttttgtatttttagtggagatggggtttcactgtgctagccaggatggtctcgatctcctgaccttgtgatccgcctgcctcggcctcctaaagtgctgggattacaggtgtgagccaccgcgcctggcatgactttgtctcattaaaaaaaaaaaaaaaaaaaaaaaaaaagccgcgaggtggctcatgcctgtaatcccagcgctttgggaggctgaggtgggcggatcatgaggtcaggaaattgagaccatcctggctgacacggtgaaaccccatctctactaaaaatacaaaaaattagctgggcgtggtggtgtgcacctgtagtcccagctcctcgggaggctgaggcaggagaatcacctgaacccgggaggcggaagttgcagtgagttcagattgcaccactcggccaggcgaggtggctcactcctgtaatcctagcactttgggaggccgaggcaggcagatcacctgaggtcaggagtttgagactagcctgaccaacatggtgacaccccatctctactaaaaatacaaaaaaaattagccgggtgttgtggcgcatgcctgtaatcccagctacttgggaggctgaggcaggagaattgcttgaacccgggaggcggaggtcacagtgagccgggatcacgctactgcactccagcctaggcaacaagagcgaaactccatctcataaaaaaaaaaaaaagagattgtaccactgaactccagcctgggtgacggagtgaaactccatctaaaaaaaaaaaaaaaaaaatctggccaggcatggtggctcacacctgtaatcccagtactttgggaggccaaggcaggcagatcacttgaggtcaggagttcgagaccaggctggccaacatggcaaaactccctctctattaaaaacacaaaaattagccgggtgtggtggtggatgcctctaatcccagctgcttgggaggctgaggcatgagaatcgcctgaacccatcaggcagaggttgcagtgagccgagatcgtgccactgaactgcaacctgggtgacagagccagactttgtctcaaaaaaaaaaaaaaaaaaaaaatcctttctaagccatataaaaactcagaatctaatttttgtttatatgtttaacttgctgacccatgtcatcttagagcctaggaaccctgcctaggtgttgacatgaactctgtgtgagcattttccagtatatcttggtgctgttgataaagagtcagtctgtaaaatatttgaagagattattctgagccaaatatgagcagccagtagcccatgacacagccctcaggagatcctgagaacatgtgccccaagcagtcaaactacaagtttattcatttcaggaagacaataaaatatcagtcaatacatgtaagaggtacattggttggctgggcctggtggctcatgcctgtaatctcagcactttgggaggctgtggcaggcggatcacctgaggtcaggagttcgagaccagcctggccaaaatggtgaaaccctgtctctactaaaaatacaaaatttagctgggcatagtggcaggcacctgtaatcccagctactcagggggctgaggcaggagaatcacttgaacctgggaggcggaggttgcagtgagccgagactgcaccactgcacttcagcctgggcaacagagtgagactccgtctcaaaaaaaaaaaaaagtgataaggggttgtggagaccaaggttttatacagatgaagcctccagatagcaggcttcagagaaaagattgtaaatgtttcttattagacttagagagtctgttctattctatcagtctgttgatgttaatgctggtcggatgggactgaattccaaaagggatgaaggtatgatgaagtatgtctgacacccccattccatcatggcctgagctagtttttcaggttaactcttgaatgccctggctgagaggagaggttgaatcagatgatgaggaggatggtgggttagaattttatttgtggtttacaatgctaactcgaaggaaaggattgaggactttttcctggccctgtgaaggtcgttgtgtgtgggtgctgggagaactatcccaggaaactcagggtaactggcaaggtgatttgagattgctctggtccaaaagataacgatttcatttggggaaaccatttcctttggagagctggctgagataaggagctagtctgaagcctgggaaggcctcaacaatctggttaacccttcctcctccaggatacaattctttctttttttttctgagacggagtcttcctctgttgcccaggctggagtgtagtggcacagtcttggctcactgcaacctccacctcctgggttcaagcaattctcctgcctcagcctcccgagtagctgggactataggtgcatgccaccacgtgcagctaatttttgtgtttttagtagagatgggatttcatcatattggccaggctggtctagaactcctgacctcgtgatccgcctgcctcggcctcccaaagtgctgggattataggcgtgagccaccgcgctcggcccaagctacagttctttacgcctatgacttttgtcaggctcagaggcaatttaatgaggatgggatgtctagaaagggacagggtgggactcggatttccttggctcttctgaggaacttttaccttcaaaggggagtagaagccactgcagggtggaaggaaaacttccgcttccccctccgtgaatttgctgaaaagtcaacagacaaaagacgattaagagaaaaggcatacacattttctaatatgcctagaagaaaacacagtgattaccctaacccttcaatggagtacagaagcttatatagccttttatttctgagacagaggctcactctgtcgcccaggctggagggcagtggcatgagcttggctcactgaaatctctgcctcccaggttcaagtgattctcctgtctaagcctcctgagtagctgggattacaggcttgcaccaccacgcccagctaatgttcgtggttttaggagagagatggagtttcaccatgttggccagcctggtctggaactcctgacctcaagtgatccacccgcctcggcctcccaaagtgctgggattacaggcgtgagccaccgtgcctggccatatagcccttttttttttttctgaagctggtaaggagatggggaatatgctaattctgtaattctgcatgatttctcaggagaaagaagggatcagagaattgagattaacttgtaaatggctctctttggaaactgaataagcccgagagacagacaggcattttatccctctaggggtggtgacattcttcagtcttcttttctgcaatagagaatcagataacgggaaggggaagggaaaaaattgttcccccaggggcatccttctggtcttttggtctttcccctttggaggtggggcagtctcttccagtgtctgttgatctttaagggcctttcattcaaaatactctttacacaagggagccgtattttggggtgaattatgttggtttccttcacctccttgggaggtgggaaatgtgtcctgaaaggtcagggcctctctgagtggagatgaacaggtcagggttgagtaaggaggaggctggcaggggcctttatgatacctgagaggactggggcttggatggagcaagagaggcactgatggagtaagattcaggtacaagacttaagtcttgcatcctaggcacggctcttgcctcatcctcatcccagccctaataatgggaggctttttgccggtaaattcccattattaggagctgaaaatgtcaatgccttacaggcgccagtcagcagtgtcaagcagtgggctgggtggggcctgggctggctggagctcccctaccctgtctaaagggggcggtggctgctcagctccagcatatgcggggaaggcgctggctaagataaggagctagtgccatgatgaccacgttgccacaggatcaagtgggtcctgtgtggtgtcacctttaggtgcctgaaatctagattttattttatttattttattactatacatattttttgagacggaatttcgcttttgtggcccagactggagggcaatggcgcaatctcggctcaccacaacctctgcctcccgggttcaagcgattctcctgcctcagcctcccaagtagctgggattacaggcgtacaccaccatgctgagtagctgggattacaggcatgtgccaccatgcctggctaattttgtatttttagtagagatggggtttctccatgttggtcagtctggtctcgaactcccgaccagatgatccgtctgcctcagcctcccaaagtgctgggattacaggcgtgaggcaccggcctgaaatctagattttaaagtgaaatttcttaatttttttttaagggcaggcacaaatttataaaacatcaggtgggccaaataaaatgttacaggccacagttttagcttggtggttgctgatttactgaccctgttataatattggaggtcaggactttgggcaaatgaaagagaaaaggaggcagactgagaatgtgattttacaactccagcctctccaggggctgggtggccagtgtctcctcagcagccttctcccgcaggaagcagaactgtctgcaacgctgatggagtcacagtaaccttcaccccactgagctcaggatctgcagagccactaagaccctggagcaactgccttcagcatccaacagaagctgctaaaaggattatgggtcaattcattttagacatttcttccagatgttcccatggaaagctagggtctaaatcagtggtcctcattcctggcagcacctgagtttcacctggggaactgttagaaagtgaaacttggacggcattcacattagtccagtctctgggtggggcttggacatcagcatttgtagaagctccctaggtggctttggtgcagccaggttggaaaccactgatccaactaatagaaatgctaggttgggatctcttccgaggcatctctttaggacaggctgtgcatgacagtcccatagtgtcagggttctaagatgctccaatggtttaggcactggtcttaattttcgttttttcgctctctttgagaccttaacaaactctatagggctgggcacaatggctcacgtctataatcccagcatttttttctttttttctttttcttctttccttttcttttctcttctcttctctcttttcttttctttctttttttctgagactgtctcactctgtcgcccaggctggagtgcagtggcacaatcttggctcaccacaacctccacctcccaggttcaagcgattctcttgcctaagcctcccaagtagctgggactacaggctcttgccactatgcccagctaatttttgtatttttagtagagacagggtttcactatgttggccaggctggtctcgaactcctgaccacgtgatcctcccacctcagcctcccaaagtgctgggattacaggcgtgagccactgcgcctggccaattccagcagttttagaggtcaaggcaagaggatcccttgagtccaggagttcgagaccagcctgggcaacatggcaagacctcatttcaatttaagaaaaaaaccaaaacacccaagctctataaccttcacatcctcattgactgattaagtgcagataatgatatttgcccttctaacctcaccaggctgttatcaggagaaatgaagcaataaatgagaaattgctctgcaaactgtcaacgttatgtaaacattgctattcagagtgtgctcccaggtgcgggaggtacagctgttatctgttggagatcactcctgaagtaacattcctagtgccatgggtcagatgggaattggtacagacattccaacttagaaggcagcctttattgtcttataagcaggtgcgtttcctggggtggcagcctggcactggtcactccaaccccaacttgtgtaggaggtaccacagtaaatgagtagagagagttcaggggacttgaagggaagtggagggccatctggagagggagggaactaaggactccctgtgggttggggtcttcctgaggatccagggagtaactgtcaaggagccttagcagggatctaagagctatgcaagagcaaaaagaggcaaattattaaggaaattagtgaagtcagcactggaacaacagagaggggacacagcagtgcagcatgggccctggcctcaggaagctgtctgattggggcagataggaccagccccctagaagacagtcacccatatcagttaggcagtcatgactcagtgttacttatctgaggcccaggttgcatgaggggttgggggtgggatggacagagcactggctgggcatcaggactaggctggagtcctggctcaaaactctaccacaacctgacactgggcaagatggcccacctgtggcatcccaggttcctgccctgtaaagaggagtctgggtgtatatccagatggactgtgagcacagcctgagtttgccctgtcgaggtgctgaggcctgggagattggggtgagtagctgtggtccagggaaggttggcaagctgggccttagatgagaggggatgcttggtcaggcagaggtgagtggagaaggcagggcaaggaagggaatatgagcggcgaacaaatggagtggacatggtgggggcagaggatggtgggaagtggccttgttgcggccagagtggaggaagagataagtgggaaagagtggagtcgattacagaaggcctcggaaaccaggcagagatgtttaaattggctctctcaggaaggagagggccatgaagggatttagggaagggtcatgacatgattatgctgcattttagcaggattaatgtgacctggtgctcagaatgacttggatggcatgaggccaggagccgaggaggacagttagaagactcttgtaatatttctggcacagggagatggactgggagttgggaggtggcaataggtcaggcctagagacatttctcaggaaatattgacaggccttggggcctggttgcattcatggagtggggaggaatgagtcaccttgagaagcagtttccctctcaaaggccagggaagacaaagcagaggcagctttcctgcctgcaaacaggacatttcagggtaacctggctcttccaagcgtcagcttctccctggctccagctcagataggagttgtaacaacgggttgggcatgggtgatggcaccggctggtggctgggttaagggccatgtttttgattatgcattaggcttattcagcctgccaagtgccaggccctgcgcttgtgtaggagacagagcaattagcaaaacatagtcctccatcctcaaggagtttccagccctgtgagcttggcagatctgcagaactcaaatgaaatggcagttgagaacaaccatcttgttctcattcactccattttgcttaacggccatgtaggtagttccaaatgtttgatgtgtaccagaaaatctctctcttcctggtttataattatgatccagggcaaatccaggttttgttgggcttgaaaattaaataaattggcactctctatggaaaataattcaaatataaatatacaaatatcacactgctaggccctcccagggcctagaagggtaggaatgaaagtgagagtccctgaagctttaaccgcattaacttttcagtcagttctatgatacctgccattccttaagtgtgtattatgtgcacgtattttgcgtacagtattacacaacaatcaaggggaggtgaggtgggcattagtgtcttcatcttatggatgaagacacagtctcagaggtgattcaagatgcccctctgcataggccctaaggcagggggtggggactgtgacctggacaggaagctggggcctcaggactgcatctaagctcctccttttctgtgggtgatggtggctgtcaggcccctgaacctacgtcatccctccctctgatttgactgtacctttgctaggcctggtcaagggctagggactcctaaagtcaagagctagggtagaggttgggggttggatctcagggcaccatatggtgcagacttggttgcaggaaagtgacctatttaggcagaggggctctatacaactgggaccacagcaaaccctagaggtgagcacctgcttcaaagactcacagatccaagctgtgatcctagatctacaacttcctggctgtataaagtccagcaagactgaggcctcactgagcttcaatttccttacctgtctaaccagaatagcaacaacttgtttgtatatttgagctcattacatgtcattttgtaaggcactaaagctcctggaggcttccggaacacagaaataattaatctaagaatcctaaagtggctgtcctggtagcacctctagggagtcctcccatcctacgtaacttcctctgggaaagtagaaaacacggcacctgggaaggggcgctgaaccgtgccccaagtcccagtgggcctggatgcccaagagcaagaggaggcccagaggatggggacaggccacgacctgtggcccaagtcccgcccagagggagtgcgccctgagggagagccaccggagctggtgactcgggggcgggtgctctggggtgtcgctttgggttcagcaatacaaatctgccagctggagattaggcggggcacgccggggagaggtgatgcactgccgctgaagacccaggtaggccggtgcgttcggcctgggtgaggaaggcgcgggacccgggtgcgaggactgcgtagcgtccccggctcccgcttccgcccgctttccacgcccacttctgcaagtcccctccggcacctcggcgtccaccggactcctaggggcgagccctcatttccgaggaatgggaccgccttcgtgcccccggggctgccagtccctagactagccctaggggcttctcgtcccggcggagccgggcggtgcctcctgcctgcgcctcgcacctccccgcctggcacggcccacccgggcacggcgccgccacgcgtgaaggcccgcatcggctccctacgtgggggacgtgcaggatgatgcggggtcgggggggatttcgctgcgtcgcccgccccctttccggcgcaggagggagcggccgccgcgtccccgctccccggccgggacgccaccgccgggcgttgcagaggcgcgccgcaaccaatgggcgtggaggaggtgggtcggctggcggctgtcaccctccaggggacgggagcgcggagaccgggagcgcgcgagctgtcgccgcgccccgggccgagggggaggagccgggggaggaggaggaggaggagccgccgagcagccgccggaggaccacggctcgccagggctgcggaggaccgaccgtccccacgcctgccgccccgcgaccccgaccgccagcatgatcgccgcgcagctcctggcctattacttcacggagctgaaggatgaccaggtcaaaaaggtgagcccccgcccgcgccgccgctggtcctggccgcagccttgcgttccggcatccgctcgccgcctccgctgcctccatcctccggcgcccggccttctccgggccagcatcgagttggactgcagggcgcaaggaaagccttcgccttcgattctaccggcattgtcagtgtctctgtgtgtgtgcgtttttgggaggggggcaatcgggcggaagacccccgagaccgggctgcctgctgcagtgtccttgaaacgggccctggatgtcagataggcccccgggctgtgcggggaggtggccggtgggcccttccgcagggcctgttcgggagggtccgagcgccgtgggaggaggtgtgatcatggagatgctggggaggtgatcgagcagcaggcgggggtgctggctggaggccaggcctcccatatttggggttcctggcggagggtgtcgggtgccccggagaagctgtcgccgggctctcccagttgtttgagctgctcgttaatctgaggacgaggtgacccgcccggcttcccggaacggggaggggcggcgaggccaccggaaactttgctcataggcctcgtgtctggagcggcacgtctgaatggaattttttattcctcttaagctgtaatttctagccagcacaggagctcaaataagcgactggtcatttgagttgggtggacgcctgtggcatgcttgttctagcacttggacgcatgcatcctcctgtcctgaggtgttgttgcctttgacatcttagtgtaaaatactgtccgctggcaggtcttaaaggtgtatttgtctcttctgccagctgtgctaccatattttaaagaaacagcctaagctgtagggaaagacgcccgttttatcagtgccaggtctggtacaggctccaggcccacccaccctgaacgtggtgacgttattgctggggttagctgggatggactggcaaagtcatcttgactttggcgttcagacaggtggagttctacaggtgaaaggcaggagtgacaggccttgattttctgcccggcaagccatagggtgttccatcctcttcctgtgcatctaagatgactccctcatctggcaccataggaaacaggcctactgagggcagcgaccttatcaaggtcacccagtgagttagaggcagagccagtcagggggatccaggtctcccagtgcctccacccaggaacttcaccagggtcctcctggaggtcagcttccaggagggagtgggtactgagagacaaagccgctggggaccctgccgtgatcttggatcccatggtgggtggggaccgggagtgaggtaggtaggagataggcttgggaatgccatctgccattgctctttatggctttaagcactctggggttgtcaaaccgtggcactcgaaacacttgctcctatggagcaccctggagcttccctctggccactgacctgggagctgtgcgtgcgggtgtgtgcatttcatgagttttctctagtggtgttgtgcatcactgatgttcttcccattggaccagggagacagttctcccggcatggcaagaagtgcccagaacaggcctcctgaagccaagagttcactgtcctcctgcacgtggtgtcctttatagctcaagacagtgggctgctgggctggggggtgcctgggtgaccttgtaaacctccagtgtccacacccaccaccacccacaacagactgctggctgttggctgccggtggcctccagcagctgagctgggctgaggtttggactccattcagtgggacatgttttctcagacatacagtgtctagggtgggcccagagctctccactcctgtgggtggctcaattcacatctatggatgcacagtctatctcctaggcccccgtaggtacctgagtgtgtgattcagttgacccttccatccctcctcactccgagtttgggattctgatgttcttcccttctcttccccgagaaccttgctggaggaaggtcttaaggccaaggtttccaccagatattatttgtcaaggagattcttaaaaacaagatgtttgcttgcatttcaccacggacttcctatgctgctttctataggggagtacgtggattcctgccagggggtccactcattttgcatagtggactgtgtggcacagccatctgtgggtgtggtcctggctatgattgcgccaccgcactccagcctgggccttctaaggacagtgacatagtgggtacttgctccagtgacctactcagttttgcccaagtgtgcagatgctggggaccacatctgctcttctggggcccaggatttcttagagaccagctctttccacgtaccactcaccataggaaaggctaggtgaaggtgcgggaccccctgttcttcctgtggggctggactctgcctgcctcccagcagggacctgctgaggatggttcccccccagcgtgggcagccatgatgattcagccctccagctgtaggcagcctccggggctctggagacagacctggcatccctcagtaactctcatctatcttcttgccctcagagccagaggtaggagaagggaagctggggaccatgccggggaagtttttgggattgcttagaatccaaacgtgatcatgaaaatggtgtcatttctttcttcattgcctatgaggcacatcaataattcaactccataaaaatatatcctgggttgaaacagttcaggtgtctgacttcccagcttggaaccccattatccagacggcatctgcataaattggttaatgggtgctgttgaagagggtgtactggcattaggctgagctaagcacaaaacacatatattcctttcactcttctagtgcctgtaggaggaaagggaggcatatgtgtgcttgtgaaggattccattcatcagaatcccagacatctgccagttctgcagctagaggctgggttctttgacctctaagtaactttaaacacgcatctcatctcgccagcttcttccactcggtttagccattaggagcttggagcagggtgaaggattgcatagtgctctgtttgtttagaaagggaagatgggtccaggaaggtcagaacttggcttctaaagaaagattagacttcctttcctccaggcttgtcagaatggtgagcaaatgccagtggattttctctgggcgagatccccataacgctaagtgatttccactagtaggtgatcatgaaaagggtgtcatttctttcctcattgccttgaggcacatcaataattcaactccataaaaatatatcctgggttgaaacagttcaggtgtctgacttcccagtttggaaccccattatccagacggcatctgcataaattggttaatgggtgctgttgaagagagtgtgatttgtccaatggccgaactcaggagtccttgagtacttgacccaggaagacaggggagagtaggcttagcaattaaagggttgcccaaggtacattccttagagcctatgtgttccagctgcaaaagcaagcattaaaaataaataaataaataaaaggccgatgtagtggctcacacctgtaatctcagcactttgggaggctgaggcgggtggatcacctgaggtcgggagttcgagaccagcctgaccaacatggagaaaccccgtctctactaaaaatacaaaattagctgggtgtggtggcgcatgcctgtaatcccagctacttgggaggctgaggccggagaatcacttgaacctggaaggcagaggttgcggtgagccgagatcacgccattgcactccagcctaggcaacgagagcgaaactccgtctcaaaaaaaaaaaaaaatgcccattcattattgctcaggggtgagagaggtgatagttagaaaattgtgaaaaatctggctgggcacagtggctcatgcctgtaatcccagcactttgggaggctgaggcaggtgaatcacgaagtcaggagttcaagaccagcctgaccaatatggtgaaatcccgtctctactaaaaatacaaaaattagctggacgtggtagcatgcacctgaagtcccagctactcgggaggctgaggcaggagaattgcttgaaccggggaggcggaggttgcatgagccaggatcatgccactgcactccagcctgggcaacagagcgaaactctgtctcaaaaaaaaaaaaaagaaaattatgaaaaatctgtgggttcttgcagtggcaaagaaaaaaaagaaaaaattatgaaaagtcagcctgggcaacaaaattaaacctcatcttaaaaaaaaattttttttagcctgctttggtggcatgcacacacctgtagtcacagctactcaggaggctcattgagcccaaaagattgatcccaaaacagtgagctgtgatgctatgattgtgttaccgtactccaggctggatgatagagcgagactctgtctcaaaaaaaaaaaaaaaaaaagaagaaagaaaattatgagaagtgtctcataacctctcaattctgatgttgtacaaatattcagtgagagcttcttggtgaatcttgactttataatccctgcctttcctaccttagatactcctagggtttctcccaagagaagccccatcactttatctggttggatagtttgggaatgtcatgaaggaataaactggcaggcagggtgtctgtgaggtgctttcacatctggccaagctgtgccatgctcccacgctcctactgttctccggagaagacataggcagctttccccttacaagactgatttggcatgactgggactgtctgtgtgtgtctgcagtcagggattcctggcagacagatttagccactggaatcacctctgagcatgcctgagaaggtccagggaagacatggataaagacagggagctgtatacctctgcatccaggaatcagttgtggtcagactgctggcacctgcttatggatttgtttttatttttttatagagacagggtctcaccatattgcccaggctggtcttgaactcctgggctcaggcagtcctcccgccttggcctccctaagtatgcttattgatttgaaaaccctgaagatcaaatctgatcacaggagctcaatcatttctttaaaaaatgtttgatttttttattatgtgcagaggactgtgctaggctggggtgacaactataaacaaggcagaaacggtcccagttctcatggagcataaaatatttgctggccgggcgtggtggctcatgcctataatcccagcactttgggaggccaaggcaggctgatcatttgaggtcaggaggtcgagaccagcctgaccaacatggtgaaaccccgtctctactaaaaatacaaaaaaggtgccagatgtggtggctcatgcctgtagtcccagcttctcgggaggctgaggcagaagaatcacttgaacctgggaggcggaggttgcagtgagctgacactccagtctgggtgacagaacgagactccatctaaacaaaaataataattaaaaaaaaatgaagtatttgctgtgttatatgtgcaaagcatatgggctatgagggcccacagcatggtgtggtcataccttgggtgggaaatccctaggctaggaactgcttacagctaggctgcagatgttagctccttaagtgcttcaggaagctgctcccatccccagttctggggatgtgttagtctgtttggagtagcaggacaggtgcccactgccttctggcctaataaaccttaacaacgggatcttttgcaaccacttaatatacactgggttgtgttcattgtatttgatcttaaagaaaaataggtaaaaattttacagtttgattggtcttgatttctggaaataacattgacttctggtaaacagtacacatcagggatattatacttagaaactttgtaaggtggagtcaaaattaattgtcacaaaaatgtgtattttttttttttttttttttttttgagatggagtcttcgctctgttgcccaggctggagtgcagtggcacgatctcagctcactgcaagctccgcctcctgggttctcgccattctcctgcctcagcctcctgagtagctgggactacaggcgcctgccaccactcccgtctaattttttgtatttttaggagagacggggtttcactgtattagccaggatggtctcgatctcctgatcttgtgatccgcctgcctcgacctcccaaagtgctgggattacaggtgtgagccaccacacccggccatgtattttcttattctttttttttgagatggagttctgctctgttgcccaggctggaatgcagtgatgtgatctcggctcattgcaacctctgtctcctgggttcaagcgattctcctgcctcagcctcctgagtagctgggattacaggcaccagccaatgctcctggcctgcatttttttttttttttttgagatggggtctcactctgtatcctgggttggagtgcagtggtgtgatctcagctcactgaaacctccatctcgcgggttcaagtgatacttctgcctcagtgcccccccctgccccccagtagctgggattacagtcgcctgccaccatgcccggctaatttttgtattttaaatagagactgggtttcaccatgttggccaggctggtttcaaactcctgaccgcaagtgatctgcccgccttggcctcccgaaatgctgggattacgggtgccagctactgcctctggactgcattttttttttttgagacagagtcttactctgtcgcctgggttgtagtacagtagcacgatctcacctccctgcaacctctgcctgccaggttcaagcgattcttctgcctcagcctccctagtagctgggattacaggtgcctgccactacacccagctaattttttgtattttttgtagagacggggtttcaccgtgttggccaggctggtcttgaattcctgacctcgtgattcacccgcctcggcctcccaaagtgttgggattacagacgtgagccaccgcgcctggccgctttttttttttttaatggctttttgtctctgggcatcctggaacacttcgtgagtgtcatgtcgggtatgaattatatatatatgtaattgagattacactataaatgtttctgcacacaactatactaacatatgtgtaggtgtgtgtatgctttcatatgctctttcaaaagcctcagcgaggttgtcagtacaggaagtattattcccgggcttcccagcacggctccctccccagggcatcctgctgcctgccttgtgtgttgcagacagaaggcaagcaatttattccccatttagaaacagagactgaaggcccatccagaggagataaaacatttttctaaggtcgaaagaaaatcaggaataggattcagagggctcttcttgcttcctctgtttccttcttttaggagaaaaacctgtccttgttgattttaatgttttaccttggaacctgtattttaatactgtcccctcacaaatcaatacatttgagttaattttttattatgaaatatttgaggcacataaaagaagattgaggttcacataaacacctctgagtctgctactcagcttgagaagttatagacacaattacaattacattacagacacagttgaagccctttctatgccatctctgagatagtttgctgcttctcccttcggaggtgacctctgtcctgaatttggtgtttatcttttcatgcatgtttttacgcttttattacatatgcatatgtctataaacagtatatggtattgctttatagatatatggttttgatcttttgtaaatggtgctatactgactatgtgtttaagcaatatatggtattgctttgtgtggttttaaacttttttttttttttttttttttgagatggaatctcattttgttgcccaggctggagtgcagtggcacggtctcagctcacagcaacctctgcctcctgggttcaagcaatcctcctgcctcagcctcctgagtagctgagatcatacctggctaatttttttgtatttttagtagagacggggtttcaccatgttggtcaggctggtctcaaaatcctgacctcaagtgatccacctgcctaggcctctttccaaagttctgggattataggcctgagcccccacactcagccagttttaaactcttataaatggtgctatactgtatgtatccttccgccatttactttcttttagctcaacattgtatttttgagattttaaaaatgttgatctacgtaactgtttcattaaactgctctggtttcttacagagtataaaagctccctagttaattcatctattctgcttttgataggcatttgtgtttctaatgtttcaagtgacaaacaatgccttggtgaactttctctagaacaactcattcagcgcatgcacaagtttctctaggctctaagctgtgtacctagggctgagatcaccaggcggagagatgtgtgcgttttcccatatacgagattctgccaagttgccatccgtggtcatgccagttcacactcccatcggaagtatgtgcaggttgcctttgttccacaccaacccttgttatggtcaaacctttgcaaatttgtaatagatgagttttagtctgtttccttcctcagttgtttccattcacatcacagtattcgagctgtgtttaaaattagcccatttcctgagttaccttatcagagtccttgcttcagagtcccacggactgaagttgacagctccatggactgctgctgctgagatatctgcactggggagggatagttgatgcagggaaaggcttaggatggctctccatggcccctggtgctgtgggctgactccgttaagcttttctgggagttgaaacacacatttgtgagctttcacttgcacacactttctctcttcccgggtggatccgacccgggtagggcaggcttatctgttgcgtaaatgtgcccagctctgctcagagaaaactcaagccagcagcctctcagaccgtcttccgtaaaaggagagggtggctgtacccacgtggcagggaaaactgaaccgtgaagtcggcggctcagccctttgcacacagaagctgagctgtccctgtgcgaggcagaaaatgtcggctcatgttcatcttgagtctatgcctgattacaggctccagactcggagacctcgagggtgccttacagggaagggggcattcagtgcctactaggcgcccggcttttctttttcttagcaggggtcttatttaatcatttctagtactcatatgaaccaaagccaacattcattgttgtattcattgccatgtactgtgctaaaggcatcgtgagcctttgcttagttcatccccacaacgcccttgtgaggtgggtgtgatttcagacggtgaggcccagatagtgaacgatagagccagcattcagcctcatcaaggctgatggcagagctcctgcttttattattttctcaattgagttataattcacctaccatgaaacgcatcattgtacagtgtacaattcagtggtttctaatagatttacaaggttgtccgagcaccatcaccatctaattccagaatattttcatcaccctccgaaaaaaactacccgttagcagtcacttcccatttcttcctccacctagcttctggcaaccactatctacctttttttttctttttttttaaatggatttgcctcttatggacatttcatataaatggaataatataaaatgaggctttttgtgtctagcctcttttatttagcataatgtcttcaaggttcatccatgtagtagcatgtgttagcacttcattcctttttattgctgaatgctattccattgtatttatctactacattttgtttttccatttgtcagttgatgggcatttggactgcttccactcttttcggctgttatgaataatgctgctctgaacatttgtgtgtgaatttttttttgtatagacatgctttctttctttcttcttcttttttttttttcagatggagtcttgctctgtcaccaggctggagtgcagtggtgcaatcttggctcagtgcaacctctgcctcccgggttcaagtgattctcctgcctcagcctcccaagtagctgggactataggcgcatgccaccatgcccagctaatttttgtattttcagtagagacggagtttcaccatgttggccaggatgttcttgatttcttgaccttgtgatccacccaccttagcctcccaaagtgctgggattacaggcgtgagccaccgcgcccggccagacatgctttcatgtctgttgggtgtatatgtaggaatggaatttcttggaaaacccctgcttttaatcgatttaaggaggaaggcatcaactccattcagaaatgagcaaacgaaggccccccaggtggtgaattgactttctgatgaccacacaactcatgaatgacagggataggaacactactgctggtcccctgattcagaaatccatgttctttccaccattacacccaactctcattgtgcagtttagggaaacagatgcaaggagggaaagactggggtgggagaggggtggaattggcttgggatcctccaggttccctgccccccatctcctgcccctccccagcaccagcatggtgtctcctgcctgtgcctgctgcctcacccccagccccatttgcttagtgttgatgagccccttccacttgggaaggaaatggatccgataaggtcattaacagtgaaatgttaggaatttgccctgtttttcaaatctcccttttcatttgtctccctctcccattcttgtctgcatttaaaagaggaccccccaggagggcaatgcttaacctgcatgaaaaccccctcaatgctccttgcgatgcccactcctggcctctgcctgggggtactgtaagcagctgtcgattccatcaattgattgacacatggggcttgtcttcagccatgttattcacccagacctcatgtccctgatgtctcctggtgccttctaggaccctgtctgggtgggtgtggtgagtgaagtaggagacccaggctactgctgtgataaagacaccacctcacctttacaaagttctgtttcatttataaaatacttgatttaatcagatgcttactttagttggatctttccatcaagcttggatgtaggaatttcttcctgcatcttacatatggggcaggtgagtcccaggaagtggaattcatgtgatctcggtggccagaaagcagaagagctaggatgggtacacagacctccctaacgccagtgggcaattcttgcagtacctgcagaaccagaacggtggtccagggctccagactccaaagccattgatggggttcaggacatactatccccaaatagtaatatggcatttgagaaaacagcagaagcaggaaggtctctcacctttcccctcccttcttccctgatgcagactctcattcaagaaggtgtctaccttatacccagaagaaagggacatccttatctctggagatacagggacacagagaagaacaaacagggcctgccaagttctcttcagtttatcactattagatcatatcccctttctccagtcacacttcttcacgatcatccacttcttcatcaaacctgacatagggaaatatgcagacttacctgtttcttttctttttttctttttttttttttgagacagttctcgctgtgtcgcccaggctggagtgcagtggtgcagtctcggctcactgcagcctccaccttcctggttcaagcaattctcccacctcggtctcctgagtagctgggattacaggcatgcgccaccatacctggctaatttttgtatttttggtagagatggggtttcaccatgttgactagactggtctcgaactcctggcctcaagtgatctgcccgcctcggcctcccaaagtgctgggatcacaggcatgagccgccacgccgggccagagttacctgtttctttggaccttcatttccttatgaaggcttctgcgtcacctaaaaacttagattaatttgtatacattgttcttgttactctgtcttttgttataggggcctcagccataaacctaagatgggaaggaaggatatttcttttcagctactgcgtgttctacatttcagcggccttcttcatagaaactgtcacccaaggctctgataatggagatatgtcagaaatgctggggctgtgtgtccagaatagtaggcgccagccataggtggctgttgagctcttaaaatgtagcaagtctgatttgagatgtgctgtggcatataaactccacacaggttttcaaaaatttcatgtgacacaaagaatatgaaatagcccgttaatagttttctaatattggctgggcatggtggctcacacctgtaatcctggcactttagaaggctgaggccagaggatcacttgagcccaggagcttgagatcagccagggcaatatagcgagacctcatctctgcaaataattaaaaacgtcagctgggcatggtggcacacatctatggtcccagccacttgggagtctgaggtgagaggattgcttgagcccaggaggtcaaggctgcagtgagccatgattggagtgcactgcactccagcctaggtgatggagccaagaccttgtctcaaaaaaaaaaaaattttttttctgatattgattagacatagaaacaacattttggatatactgggttaaataaaatacattatttcatttgggagtctgaggcagaaggattgctttgattgtttgaggctgcaatgagccttgattgcaccactgcactccattctgggtgacagagtgagattatctaaaaaacaaaattaatttcatctgttctttttaaatgtggctagtaggaaacttaaaattgcatatgtggctcatattatcttcctgttggacagtgctctgctagatggtaaattccatggctcaggagtttgcactctgcatttaaagcagtgggtttctgggcatccttgggcctcagtttcctcatgtgtaagccacagtttcctcatctggaatccattatctcgaaaggacccatccagcttgagcagtattgtgaggtgaccatcaagttccctaggcctcattttctttctttctttctttctttctttttttctttttttgagacagactcttgctctgtcatccaggctggagtgcactggcgcaatcttgactcaccgcaacctctgcctccctggttcaagcggttctcatgcctcagcctctctagtagctgggattacaggagcgccgcaccacacccagctaacttttttttatagttttagtagagacgggttttgccatgttggccaggctggtcttgaactggccaagtgatccacccacctcagcctcccaaagtgctgggattacaggtgtcagccattgtacctggcctggcctctgtttcatctgtcagataaggtaaatgattcctgccttgttctctgcccccacttttcaaatgagagaatggacgaggaaatacttggaaagtgtacacaactgtacaaatgccaggtgttatcattgtcactcacccagctcacacctgtagacaccttgagtagccaagtggaggacggcagcttcctggctaacagagtaggcagacaacagagccctgagcctgggcaggggtcctgagtgccattctgcctttgccttggattgtgtgagagctcctggaccatctgcatgtctgtgtgccctggccaaatggacagatgaaaatgacaccatgggctgctgaaatgccatgttctgaggactctaaagtgtcatggagctcctgtgtatggtatgtgaggccagaaggcagatttcatgattgctgttttactgatggaaatacacaagagatcgaagtgacttgctcagggtcatagagggaggcagtgcccatggccgaggcctgaggtctttcgatttctagctcagtccagtcccaccactgcagtatctccaagccacagcattgggatttggttgtctcacagtgaaagtaaacctgtctgcactcagatccttttctccctgttgtcgggaggtgctgggacagtgggaattgtgagactggaggtccagaggctggctgtttgctaagccatccaccaggaggctgagaagtaagcctgttgtgcctgccctgccacattccagggctgttctgttctccccgagggaatgggggcctgctttatttttagctagttcagtgtgacagccttgttctctttctgggcaaggacttggccacttttaccagtcaggaagctccctttagaacctccaggccctactcaggttctcctaggaagagggggccaagggaaggggagctgaagttggagtgccgctctgcttgctgggggcctggggcatttggcttaactgcacagccctaggttccacctgcctcatgtggggttcataacagctaccttacacattgtgcagatttggatggaggagcttagagcacccagcgtgggccctgtccacattcacgttgctagaacgtcagtttcttcatcaagaatggggatcctggctgggcgcagtggctcacgcctgtaatcccagcactttgggaggccgaggtgggcagatcacaaggtcaagagatcaagaccatcctggccaacatggtgaaaccgtgtctctactaaaaatacaaaaattagctggacatggtggtgtgcgcctgtagtcccagctactcaggaggttgaggcaggagaatcgcttgaacccgggaggtggagtttgcagtgagctgagattgcgccactgtactctccagcctggtgacaaagcgagactctgtctcaaaaaagaaaaaaatggggatcccattttcctcatgatttgttgtgcgtaaacagagttcattgaaacagaaccaacagtttacacatgctgagagacacatatgaacctggaagaagagaccgggcaaggctgtgtccccaggatggggtttttgagtgcctgagggatggttttggctttggtgatgatctcacacagacctgtcactgaggagccctgcggtggaattgattatcccagacacagttcctctggtagcttgcaggtgactcagcttgaatatgggagtgggaatcccgattatctttaggcccctctgtccctctgggcctcagccatgcagtggtgaagtgctgaggggaaggcaggggttagaagtgcctggaactctgtaccttaaagtgagaggccgctgccgggggagaagggctgggccattcggggaagtctccgggccttatctgagccagcaaaccctctgagacctccctaggctagtcattactggaggcctcccgcccagcacaggagccacccaacctggcccaggagccaccacgtggtgcctcctagggctcctgggcacacaaagggcccagagggcatggctcctgtacccctggcactcacggtctagctggcggtgtggaccatgcatgtgtccctgcaacgcccaggaaagacacacaccacgaagtgtctcccaggcagatcgactcctacatagtgaacacctaaggccgaggggatgctgaggagaggagtggacggtgtggggtggggcggatcatggcatgtgctcctgagaaggtgagttgggaggtgagctttgggaggaagaaggagctggggacggagaggcccaggaggcagactggacggggcttgcgaggaaggacctttgaggtgatgagccaccatcagggtgctgggggttagtggttgctttagggaccccactagatcagggctgcctcccctcgtggccatttccctccctgctcagagaccggctgccgagagcaggacagaaactaggttcccggctgccacccacactactgaggtggggctgggcagccgcagaagccatgtgcagtcaggaagaggagtccggggctgctgggcgggcacagaccacggtgcgggcccaggctctcagcttgctatggctgttgaacttccttcccagactgtgtgaaaggggaaggagcagatcggacagcttgttgtggctctgatcccagctggaggggagaagaggcctcctggaggtcacactggagtggcgtgcttttggcaaggccaggcagccatgctgttcttgggtggctggagctgtggcggtgatagcccctgtagtaccgcatctccctctccaggaagcccctggccctggctctccctggactgagaggatagagcacaggaccaggaatcagggagcttgctgtccaccccagtctctgcaagtatgtcgccctggccagttgaggaacctcctggccactcattcttgcccagggtgttggaagtgatggtacctgctctgcttctgcagacaggatgctgtaaggaccaacaggtaaacgcgctgtgccaattagagaggcctttataggtcaaagtcataggaacgcacccacttgacagatgggaagactgaggtgcccacaggatggcagagccagaagtcaaatgcaggtgtctacatggccccgactgtgccctgtcatcggaccgggaggggtcctgaggaagtctttagtacggctttgctagtttgagtcttagagagtgtctgcaggaaataggaagcgggaagtaggtttttaaagaaaaaagtgtttatgatataattccatttttgtaaaacaaaaagaaccatccatctctttatgtatgagtgtttgtttagggaggaagatagtcctagtacatagagctctaaagtccttgtacataaagcagggatatctctggggagactgggggaagaattaataatttttacttttatgcatttttatgatgttggaatatattttacaataagtatatattactgttattgcttcttttttgttgtttttttgagatggagtttcgctcttgttgcccaggctggagtgcaatggcgtgatctcggctcactgcaacctccgcctcctgggttcaagtgattcttctgcctcaccctcccaagtagctgggattacaggcatgtgccaccaggcctggctcattttgtatttttggtagagacagggtttctccatgttggtcaggctggtcttgaactcccgatctcaggtgatccaccagcctcggcctcccaaagtgctgggattataggcacgagccaccgcgcctggcctattattgcatctttaaaaaaaaaaatgaaacagtgtaaatgtttcaagtagttttgttagaatctttcatttgccatttttttcaggcatattgcctcccagctttagttttctaccaatgggtcaatagcattttggtagatgccttttttttttttttttttttgagatggattctcgccttgttgcccaggctggagtgcagtggtgcaatctcagctcactgcaacctctgcctcctgggttcaagtgattctcctgcctcagcttcccaagtagctgggattacaggcatctgccaccacacccggctaattttttttgtatttttagtagagttggggtttcaccatgttggccaggctggtcttgaactcctgacctctcaagtgatccacccgcctcggcctcccatagtgctgggattacaagcgtgagccaccgtgcctggccggtagatgtatttttcaggcattgagatgaaaggagttaggggtacatgattatgtcacttagggatgggagggagggaaatgacacttgatgcttactttgtttctgcacattaaaatcctccccataaccctctgaagtggaggatttattatctccatcttaaaagtgagactcagagagattaagtaacttgtccaaagtcacacagctaataaatcggatttgaacccagctctctgtccacagccctgtgtactttccaccatgtgaggaaaatggaaatgcttaaggtgaagccccaaatgggaggttacgagccctggaatctagacccagctgccatttctaaactccccaacttagcttgaatcatgggtctgtttcctctcctagataatggagataatgatgtctttcctgcctacttcactgggctgcagtgacaggagaaagggaactagcattaaagcacctgcttcctgcgtggcacttggcatccacaagctcatttcacttctttctacacagttcaaatgggataatgtatgtgaaggtcctgtatctgaagggccagtgcacatgtgagccattgctaattgtgatgttaataagcacccaggacccgttctctctgagtcagtgtccttagcaaagggaagtgaattctgatgttgaaatctctgtcctcccctaagctaacatctttcttaacccttcagggtgcacgccacaatttccttttgtaagtggagcgccttgcttggaaagttcattttaaaggcctgcgtcagcagcttcagtcacgcctgctgttctgcagcattctcgatcctcacgggagggtggatgagagagggagtgaaattttccatggctgtgcacccttccacggggtggggtgaaaatggctgggatggttaccagtggttactggtgcctcctgctgcgaccggcctgttcacttgggcatgtccaatcttgcgtttgttttttgtgcatgttctgttgggagcaggaggtggggctggggtcgggcacagaaatgtttgtgagttgattgcagtgctaggccattgagttctttccttggttggagggctctgagccagggaagcttggcgaggctgtgtgttctctgctgatgacatgtcctcctgctctgcgggggtccaactttgggagccgctgagagcttcaaggcccccttggtccacaagaaggagaatccaggacaagtgtctggaaagtgtttgagcaagagcgcccgccctgtgcagccggtctggctaccctcataggaagggctcttcactctgggcagcggtggacagaggccctggaggctggatgcgggttctcaggcaagagtctgagggacccagctcggtgtctgatgtctggtgtctgggactgggcgccttcccatttccatcccagcctgaccagactgaccagagtcccacatattcgtctcagacactggtttgagagggagcatttgagggcctgggtttctgtcatgactcctgggaacctctgtcttctgatagatggtccacagaccgaggcttgcagtggaagcagctggaagtggtgctgtgcggtgtcctccccaactcccaaatggagtgtggggagggattcttcgggcactgatgtttggctggagcagtaaagcagcggtgatgtggaggcagcacctaagagaaggggacaggattatggagatgtgagtgtgtgtgtgtgtgtgtgtgtgtgtgtgtaagtacttgtgtgtgtatgtgtgagtgtgtgagagtgtgtgtgtgtgagagattgtgtatgtgagagtgtgtgtgtgtagagagagagggaagaggggaaaaggaaggaggagagtaaagatctggagatgctgtggagaggaggacagaaatagaaaagttgaaaggccagactttggccaaatccccaaagaccaagagtcagcctttcttcctgggtttctggcagagatctggagcaactgggcaggagagatttctccaatgccctttcttcctccctctctccttcaacccactgcccattcccagcctctttcccagggagacaggcgtggtccagtggagtgccaggaggggctggtctgaacgaggaagatgcgttttgctcagtgaagtgctgggttctctgggcccctggaagttttctgcaggtgtctctagtcatgtgcttttctccagtgcctccgggccacttaaaggcccacagtccagaggggcatgtctgctgagtcctgcaccaggtgcctgcctggctgggcagtgtggcagataccagggagctgacttctcccctggcagcccagccccaggcctagggtatttgctggttcagtggccccttctgatctcccgaggaccagtggaaagaaagggcttcccttcattgtcctcattcatgtaaaatccaggaggccccagtttcagttccggccttgcctcaattgggcctcccttttggccccagtattcatgtctcttctgagaggggttgtacctcatgacgactcatgaacctgaacaaaaggaggaaaaccctccctccatagcagcttgaggaccaggccgttctctgtgtctgcagcctgctttttgatttgagcttctaagctttatttggatttagcttggttgtcctgaaacgttggggtttttggatcaatgtctgtgtgctgagctgcaccttgacttagaaggcaggatagctgtggagttatggagagctgccttttctagaagcttctcctgtccagcgggaaaaccccaacagctctacttggatctgccttctgcagagcaggggaccagtctttcttaaggggcagggatgattgtatggaggagccttagacttgcaggtataaaacctcactcccccagctgtgtgctttgaactaatcacttagcttcttggaccatcagtttctgtgtctgtaaaatggggattaagaacatctcccagacagttttgaaggttaaatgacatactggatcttgatatactgatatactgtaagccacaagagaattatatagtattattccaggatccagcattgtttgaattcctcctttgtgtcaagcaactgggtgagttccaaaggtctattcaatatgttttctttccctggggaactcacgcagtatcataggagatggacagcttggtaaaaggataatcatgatgtgtgaggagtgtggtcgttggggcgtgtccaaaatgctggagtagcaatgtaccttttttaaaattaaaattaaaaaaaattttttgagatggagtcttgctgcattgcccaggctggagtgcgatggcgcgatcttggctgactgcaatcttctctacctcctgggttcacgcgattctcatatctcagtctcctgagtagctgggattacaggcatgcaccaccatgcccagctaatttttgtatttttagtagagaccgggttttaccatgttggccaggctggtcttgaactcctgacctcaggtaatccactcgcctcggcctctcaaagttctggggttacaggcatgagccattgctcccggccttaaaattaaaattaaaaaatattttagaggtgcgatatcactatgttgctcaggctggtcttgaacttttgggcctaagcaatcctcctgcctcggcctcccaaagtgccaggattacaggcatgagccactgtgccagctagcaatgtagcttttattgtatgatcttgcgcttgctcctccattctccacgcagcagacacacaactctcatcatggttgtaatcagtaaagccgtcccaaggctcgctgtgctgtgggatcccgcttgtatttgtttatgtggctcatcaggccctgtgtggttgagctctggacagtctttccaggcacaccgtctgcttgttcatcacaaaaaccaccctccctccccttcggacttcacacatgcccttgcttgtgcctgggcatgctctccaacttcgcctctccaggaagccttctctcccatgcttgcaacgtggctgtctctccctgcagacccagggcactatgatggcaagggctgctgatgaatgccaccagccagaatagggcatggcttgtctctcctcccagggccatgtttttggcaattttatttcctttaaaaaatatatatacatatttctttctttcttttttttttggagactggatctaagtctgtcacccaggctggggtacagtggcaggatcatagcaccctgcaacctctgcttccccagctcaggcaatcctcccgcctcagtctcccgagtagctgggactacaggggcgtatcaccacgcctggctaatttttgtatttttttagagacgaggttttgccaagtttcccaggctgctctcgaactcctggccccaagcaatctgcctgccttagcctcccaaagtgttgggattacaggtgtgggccactgctcctggccaattgttaattttttttttttttagagacagtctcactctgtcacttaggctggagtacagtggttcaatcatggctcaatgcagcctcaacctcttgggcccaagtgatcctcttgcctcagcctcccgagtagctgagactacaggtgtgcatcaccatgctgggctaatttttattttttgtagagacagggttgttgcccaggctaatctcgaactcctgggctcaaatgatcctgctgccttggccttgcaaagttctagaattacaggtgtcagccaccatgcctggcctcttctggcaatttctattctggctcttggtggttcctgattgcccttctttgagctgctttattgtaaagggaaaaaggtggtagggctagtggttaggagtgggggcaaggatcatccttgggcgcagagagtgttggcagacattttgggaggcctaggtgggtggatcacttgaggtcaggagtttgagaccagcctggccaacatggtgaaaccctgtctctactaaaaatacaaaaattagcagggcgtggtggcgcacgcctgtaatcccagccactcaggaggctgaggcaggagaattgcttgaacctgggaggtggaggttgcagtgagccaagattctgccactgcattccagcctgggtgacagagatagactatgaaaaaaaaaccaaccccaaaaacaaacaaacaaacaaacaaacaaacaaacaaaggaaaaaacaccagtgttaaggtcttttcagccttgtggggctgtaaatctgtctctctatccagtgggagccttctgtgtgcaaggctccatgtgaggcactggggaggtcagggtgacacgcatggaaagctgggatccagaccagaccctgcctaggggtcagtgctgaaggagtggtgatatccagcctgaaggacttggacatcttcaggaggaagtgacagttgatttgaaccttgaaggttaggtgagctgggaagaaaaggaagggcatttcaggtagaggtgacagcagaaggaggagagcctggagcacctactaggaatggtagaggtggtttggccggagttcagagagcacagagccacacctgcagagggtaggtgccttggcagtggggaggcattgcaaggctttgggcagaggcatgacttgattagggttgcactttaagaggctgatgctgcagtggtgtagaagatgggttggaaggaagagattgaagataaactgttacagtggatcatcagcaatccaggcacacagagcagcagaaagagtggatggtgaaacaaaagaaccttcctcggtggactctacagggatagtgccatcaggacaggtgtctagctcaattctaggcacctagctggtgcccagtgaatccttttttgggagaataaatgcgaagatgccatgaaggacaaacaattagtgatagccagtgacaacccagggtgcctaaggttaggagcctgggcagcttgaggagaacggggaactcaggaagaggagcaggttgggtcaggcctggtgaagggtgggagtagtttgactcggaggtgcagggcccatggcctggcacacaggcccggcacatgggtatgggagcccaggggctgtctccattcattgaggctgggtttaaggtttctgtgctctgggcctgccaccctgtgttctcagaagggtcctagccctttggccgccatttctgtctttctagaagtcttgcccatggacacctgccagtactactgtctcatgttaataataatagctgatgtttattgagcagttactgtgttctaagtgcttgtgtctcatttgaacttgtcctatatgttaggtcctatctatcatctcagtttttcagttgaggaaactgaaattcacacagctgttaagctctggggctaggattgaacccagttggctggctccagagcccttgttcgtagcctctctgtcattcccatcccagtgagagtgagccagccaattctcagagagagaaggaggcttgaggtgttcctgatactggaggaaacctacctccatcaagtacttgggggttgaagagcagcttccatgtcatatttgagggttggaaaggatcttagagatatcgggttcattttacaggccaggaactagggctcagagcatttgcaagcctgttctgggtgacatggatgacagcagttgaatgaccttccgccatgcgatgtgccagcgtgcgtgttcctgtgcctgtgggagctggctatctcagcgggtgggtgcctcaccttgccctgtcctccccctcgacctcactctccttccttctcatccccctccagattgacaagtatctctatgccatgcggctctccgatgaaactctcatagatatcatgactcgcttcaggaaggagatgaagaatggcctctcccgggattttaatccaacagccacagtcaagatgttgccaacattcgtaaggtccattcctgatggctctggtaagtctgtcacccagagattgaaccctgagggctaaatgttctgtgaaatcttccttctaacttcatttgttcatacatttgctcattcattcattcaccattccatcaatctgctctcccatccatccatccatccatccgctgatccatctgctgatccatccatccatccatccatccgctgatccatccatccaatatgtgtctactgagaccttatgccagtcactggggataccatggttgggcaaggctgacctgctgtcattgactttactgtctagtggcttgtgatactttagaaagtgtagtgtttatgggtctcgcagatactgtgtgggttgctcttatgtcttcagaacatgaagaactccagaacaaatgaagggttcattttagggaaatctctccatcagggaatcaaagcttccctctcttcttatcccagataatagcaatcctaatggacaggtgggtctcagacttaaaggcagagattccagaccccctttggacagatttcacagatgcagaattgaggcagcccccaaaacaaagaaatacagaggggaggtagaattgaaagaaaaattgtatcctttcactctgcatcctgtggctcataccctgcagtggggcgttgggggagggccccctgaggattgtctgtttctcctccccagaggagtggtatcagcccctgcacctggctgagcggagactgagaagtcgcagtctggcctgctcagtggaagctgttcttcccggcagacccgcagttactagtttgtggaggtgaatgctgtgcttgctccagcgtggcgccctcacaggaatcccctgttagctgtgttctgtgctctagggtggggctcacctgctgtaggcagcagagggagggagagcaggaggaagtcaggtttcccttggggttgtgagtacacgaccagtgagtacagctttcacacacccctgcgatttcttccctgctctcgaggctcttatttaaaggagtgatttggggcatcttgtatgcagcctgcaaaatggacgccaggaaactgcagctgttgcaactgatgttcttgaaagatgggcaagtgggagtaggctggttgcagcaggaaaagacctctgctctctgcctgcagtcatcctgaatgagatttggacgctgataaagaggccttgtgctgttcactgtggccacgggtggggtctacttcatgctcacatattagcatgtatatctctgatgtaagcctactccacctccacccttttgtttaggtgttgattactagcacctacttctagctttttaagaactactgaagagattctggccatcagagtgaatagactgtggtctaccctgggtgtgttcgcttgtctctggctggagaagaaagaactttatatatagttcactcttgctttttcccagccatggatgtcacctacagccaggagcactggaacctttccaggatgaggagagctatgtagcagaggcatggctctgactgcttccagctgagagaagaggaaggagcggggaggggagggggtatgggcagcacccaggagagcacctgctttggctttgcttgggagagctcagaaggctacctgatccctgcgaggcacctggccctgtgtgactggctcagggcagacacaggggaggagacactttgcctcctacccactgggccctgctctcaagccagctgtgtcccagggacctatgtcagcaggggtgctctccctctccttcacaaactgtttccaggattgagagtctcaaggtgtgatccaagtgcagtagaaatccagccatttgccatattggctactcctccaaacaaggcttagaactcatactcatttgtgaaatgtatttttcacccccttttagagattcatagaaacggcacccccccattccaaatatttatgggtgggttcagttcatgtgccccagagcccacacttcgcttgcaatggtccctacagccccgcaaagacattgctgttgatgctaaggacttggatacccaacccccagtccacttcctgccccttcgtgttgtgccgggcttctgtcttcacctccccctgcctcttggctcctttatcatccaagaatcaggagatccctgcagtaatcagaatctgggtctcttaatagtaaatccatagtgctgttccctttttgaaatgttaatcactgcttcaactgtagtaattagtgacagaattagtggtaatcccaaaccacggagggataaattggcgctcaccatggtggagcaatgcctaagtggtgatgtgatttccaaggcaaaggaaggaaacaagcctttcctttcttgctgaccttgaccctggtcgactagacacagagttttggaactcaactgactttccagaagcatttctgaaaacatatctgatacatacattctgatacctatcagcccatttttaattagtttctttcttttttggtcattttttttttaatgggcagtgaggtttttgtttttggtattttgtagagatagggttttgccatgttgcccagactggtcttgaactcctaggctcaggcgatcctcccacctcccaaagtgctgggattacaggcgtgagccacctcacctggcctgtttttatttttattttttagttgttcttcaataatctgtatatcattaaaaaaaccccaaaaacctaaagtggctttttgctgctgcatatcatttttgaggtagtggatgaatgaataataaagaaggaaaatattgaagcctcttaacattggtgatttggctaaatagaattccctcttcaaagctactgtagggagcaagggaaaacgtcccctttgccctctgaatgttggctgaaaaatcagctcacaaaaggcagattaataggagaaagggcatacacatttattaacatgcatgtgggagaatcacagactgattactcaagtatcccggtggggcccagatacttacatttcctcttttcttttcctttttttttttgagatggagtcttgctctgttgcccaggctggagtgcagtggcacgatggttcaagcgatcctcctgccttagcaccccctacgtagctgggattataggcacctgccaccatgcccagctaatttttgtatttttagtagagacggggttttgccatgttggccaagctggtctcgaactcctgacctcaggtgatccacccgcctcggcctcccaaagtgctgggattacaagtgtgagctactgcgcccggccacacatttcctcttttcagaggggaggcaggagacagggaacagtaaatgattactagggagaatgaagatatcagggaacagagattaaccagtaccggttctctttggaaattgaataggagacagattttttttttttttttaagacagtctcgctctgtcgcccaggttgcagtgcagtggcatgatctcggctcactgcaacctccgcctcccgggttcaagcaattctccggcttcaacttcctgagtagctgggattacaagtgcgcaccaccacgctgggctaatttttgtatttttagtagagacgaggtttcaccatgttggccagactggtctcgaactcctgaccttgtgatctgcccgccttggcccctcaaagtgctgggattacaggtgtgagccaccacgcccggtttaggaacagacatctttaaaaaggtccattcaggtgtggtcagattcttcagtcttcttttctgcaatagataatgagataacagggagggtaaggataaagttctccttggagggtctgcgtggtctttatgcagataggagaaaagcattttccagcatctgttgatctttaagggcctttagttcaaaatactcattataccagggagccatattttggggtgaagtattttgggtttccctcactacccagtctcttgggaattgctgtccctctgtgcccagcctcccccattcgcgaagtgtcccttttttctccttttctcatttatccctaaggatattgtaagcactaattagagtgtaagcttttggaggctaaataggaatcgatacttcttggtttcggcttcattgttcctacacagcctttacccaaaagagaagtttttacccaaaggagaagtaaaaaaaaaaattttctagaagcttggatgtgccattatcttttttcatgcaaagcagagccatttacagtgtagtcacggttgttttggggccctaaatattcatactactgttttccagtcaacggaaggaaaatatttaccttctcttcttgcagcatttgggtggtctcagttttcttatatggaaggatagttgggttatctcaagtattctctctatctgtgaaacctcctgagttgaaggcgtggagttcccatcatgcagctggattgtagatgggcaggaatgcctgtgtatctcatgtacagaattaattcattgaggctgggcacggtggctcatgcctgtaatcccagcactttgggaggccgaggcaggcggatcacctgaggtcaggagttggagaccggcctagccaatatggcgaaaccccgtctctactaaaaatacaaaaattagctgggcatggtggccggtgcctgtaatcccagctacctgggaggctgaggcacgagaatcacttgaacctgggaggcagagttgcagtgagctgagatcacgccactgcactccagcctgggcaacagaaactctgtctcaaaaaaaaaaaaaagaagaatcaattcattgagctggactcaggcaggcatttcccgcaggcagagtttttgcttgccctgtattccagcacaggctggtactcgagacacatctgtcctgtgtttgttttccattatttgctggtaataatggctgtcattagaaagtggagaattgccagtagcccttcggatgtgttgtttaatgagctttctcttgagcggttctcccagcttcagtggaaatgagaaatgtgaggaaaggtcacaggcaggaggccccagtagcaggaagcaaggtttgagaccaaagattgaaagaggaagttgggaggaaacctattactgcagaaagaggctgagcttgtagccaaagagaaaaggaaataaaaatctagaacactgaatcggtctctgggtttgccactcccaacctgtgtgaccttggagaagccacttaacttctgagcctccatttcctcatgggtaaaatggccatggtaatccctgccccacctgcctcaccaggctatcatcaggatcaaatgagagtctttggaaactgcaaaccaccgtgagttatggtgcgtcatcgtcatcctcatcagtcttatgatataataactggctttggaagaattccttgggaaagtctttcctaaccaatggagccagtccaaggaccgcacccagcaggcctgaatgtgtaagccgagcccctgcaggaaggatgcagagtttttcaggattcgctggcatctctgtgatgttacaggggaaggaggcagagaaaaggggcaagccaaggcaggctgtctcacccccaacccctgagctagccacataaaatgtgggtgagaccacaggctacagctccagtacctctgcaagggggtgactggacacgacagctctgaatcagggagccaacccgaggtaaaagggactgataggtcccttttgttatggagggcaagtgggtatttgggggattcatttcctgacaaagaatattgaactaacctggaaaccttctggttgtagctgaaggaaatctgactcaaatttgtttaagaaaaaaagagaattctagtttcctataactgggaagtctcgctgtgagttgacttctgtatctagggattcatctgtctcttactagttcagtcagctcctttcctgtgtgttggcttcattcataggccatctctcctcttacagtggcagggacggcccctgcagccctaggctgacccctccccttatagccagcgatctctgtgcaaagagcaggccttgctccccatggacctgtgatggtcttggagagggctgtgattggcttacttgggttatgtgcccatcctgaaccaatcacgatggacaagatgggtgacttgggatgcccctggatcccatgcctggattacgcattggtacccctggagctggagtggggattcagccccacttccaacctcataggtgaaaaatgggagggtagttatctaaagagatgctggacatccaggaaagtttatcagttatcttgttgtccttaacagacatcattcctcagtgtcttttgcccggcagcgtataggaccagcactttgggaggccgaggtgggcggatcacaaggtcaagagatcgagaccatcctggccaaaatggtgaaactccgtctctactaaaaaatacaaaaattagttgggcgtggtggtgcatgcctgtagacccagctactcgggaggctgaggcaggagaattgcttgaacccgggagttggaggttgcagtgaaccaagattgcgccattgcactccagcccgggcaacagtgtgagactccatctcaaaaaaacaaacaaacaaaaacatgaaataaataaatgtttaggtgaacattaaaacagcaaattaattaagtaaaatattaaaataaaaagtaccgatcatttcatctcagtgtagtatttgcttttgtgccccttttccccctatgcacaagtggtttatagttgtttatcagactgagctttcactgtcttcattagagaatgaagcaaaataaaaccaaagctggccgggcgccgtggctcacgcctgtaatcccagcactttgggaggccaaggcaggcggatcacgaggtcaggagatcgagaccatcctggctaacacagtgaaaccccgtctctactaaaaaaaaaaaaaaaaaaattagctgggcgtggtggcgggctcctgtagtcccagctacttgggaggctgaggcaggagaatgatgtgaacctgggaggtggagcttgcagtgagccaagatcacgccactgcactccagcctgggcgacagagcgagactccgtctcaaaattaaataaataaataaataaataaataaataaataaaaccaaagctaggccaggcacggtggctcacgcctataatcccagcactttgggaggccagggcagtcggatcatctgaggtcaggagtttgagaccaacctggccaaggtggtgaaacctcgtctctactaaaaatacaaaaaatgagctgggcgtggtggtgggtggctgtaatcccagctactggggaggctgaggcaagagaatcgcttgaaccccggaggcggaggttgcagtgagccgagatcgcgccattgccgtccagcctgggcaacaagagtgagactccgtctcaaaaacaaaaacaaaaacaaaaaaaacaaaacaaaaaaacccaaagctataaggaatcatggaagttgaagagccccagaaaagaagtgtagccattcctgatgtgctgaagtctctctctggcccccactttccttggggatccttgtccctgagttctgtccaggaggcagttttcatggttatacattatggcttcggattcaaatgctgactctgccacttactggttgtgcgtttgggcaagttatctaacccctctttacctttacttgctcatctgtagaatgggcatcctgacagtactgacttcatagggttgtgaagattgaaaataaaaggatacgtataagcacttagtgattggtacagaaagactcagtgaatgttagctgatggatggtcaaataaaatgtttctgatattctagtgactcacctgcgaggagctacttcatactgaattcaattttttcagttatttcaatttttttttttttttgagacagagtcttgctctgttgcccaggctggagtgcagtggcatgatctcggctcactacaacctccgcctcctgggttcaagcgattctcctgcctcagcctcctgagtagctgggattacaggcacctaccactacacccagctaatttttgtatttttagtagagacagggtttctccatgttggccaggctggtctcgaactcctgacctcaagtgatccacccgcctcagcctcccaaagttctgggattacaagcatgagccactgcgcccggctgaattcaattttttaacctagtggtggtgtaaagtactgttggagttaggactccaatgggagcccaaagaaaattctatattgatttgaacaatgccacaaagtcggggtcagaatttccaccaaatctatgacacctgcttcccagcattctcccttgttctctctctttcctttggaccacaaataatttaaaaccagtggcttcatgtgatatatacatataatggaatataatcggttcataaaaaggaatgaggtactgatccacgctacagcatggatgagccttgaaaaccttatgccgggtgaaagaagccagacacaaaggacctaatattatacaattccacttatatgaaatgtctggaataggggcatctgtagagcagaaagtacattagtggttgctgggagatagggaggttgggaggaaatggtgaatggttgttaatgggtatggaatttcttttgggatgatgaaaattttctaaaattagatagtggtgatggttgcacaactctgtaaatatgctgaaaaccactgaatttttcactttaaaatgggtaaaaattgtatgctatattattatatctcaataaaactgttattaaaaaaacaaccaaccaatatgtgaaataataagaaatatacatgttggtctctgcccctagtctctagcatttagcttctaaaacccttgtaatttcttgagcaatacaggtgctaggagaatctttgatcctggtcctgactcagagctcctaaatcccttggaatttcttgggtgataggagagtctcttttgttccttggtgggaccctggatagcctcaggatggggggctggttgccagggggaaccaaccatgtgatcagagggttgctgtcagccccaacccccatgccgcctccagggagggagagagcctgaaaatagagcgaataaaccaatggtcgatgatttaatcaatcgcaactgtgtaatggtgcttccacaaaaacctaaaacaggccaggtatgatggctcacgcctgtaatcccagcattttgggaggcccaggtgggtggatcgcttgagcctaagagtttgagactagcttgggcaacatggtaaaaccctgtcactacacaaaatacaaaaaaaagttagccagatgtggtggcacgtgccggtagttccagctactcgggaggttgaggtgggaggatcgcttgggctctggaggttgaggctgcagtaagctgtgatcatgcaactgcactgcactccagcctgggtgacagagtgtgaccctgactcaaagaacaaacaaacaaaaccaaaaaaaaaaaaaaaaagcaaaaagaagaaaacctagaatgactgagttctggtagcttctgtctagctgaacacatggaggttcctgggtggcacatctggagggggcatggaaactcctgccctttctcccatgcccctccctgtgtatctcttccatccagttcttcatctgtatttattgtaatatcctttatagtaaatatgtaaatgtaagtgaagtgttttttctgggtctgtgagctgccgtagcaaactaatgcaacccaaggagggggttgtaggaaccccgatttatagtgatcagccagaagcacaggccacaacctgtgcttgtgactggtgtctgaagttggagggagggcagcctcgtgtgaacgagccctcgacctgtgggatatgatgctatctccaggtagctagtgaaataattgaattgaattagagagcatggagctggtgttcactggagaattcactgcagaattacttgcttggtgtgtggggaaaaacccacatgcatccagggtcacaggtgtgttctgtgttgtggtgagtagagaaaaggaaaaacatactctggtttttcctctgtgtgtgtctcacatgatggcgtaactgctttgtgcttaataaacagcaagcaggggtgctgtattagtccgttttcatactgttaaaaagaactgcctaagactgggtaatttataaaggaaagaagtttagttgactcacagttcagcatggctggggaggcctcaggaaacttacaatcatggtggaaggagaaaaggcatcttcctcacaaagcggcaggaaggagaagtgctgagcgaagggggaagagctccttataaaaccataaggtctcatgagaacccactcactatcacgagaacagcatggggggaaccacctccatgattcagttacctccacctggtctctttcttgatatgtgggcattgtgggggttacaactcaagatgagatttgggtggggacacaaagcctaaccatatcaggtgccttgaatgaatgaatggaccaccagtccctgtgaccaggcagctaatgagcatttgctgagctgtcctgggtgccaaggacagagaatcccaagttgtggtctttccctcaaggaacttgagaacgaagataggaacaggctgggcgcagtggctcatgcctgtaatcctagcactttgggaggccaaggcaggtggatcacctgtggtcaggagtttgagaccagcctgaccaacatggtgaaaacccatctctactacaaaatacaaaaattagccaagcatggtggtggacacctgtaatcctaggtactcgggaggctgaggcaggagaatcacttgaacctgggaggcagaggttgcaatgagccaagatcacgccattgcactccagcctgggcaatggaggaagactccctctcaaaaaaaaaaaaaaaaaaaaaaaagataggaacagtgacattcaatgtgagaattccttggtttgttgtttatttctttataccttcattaattccacaagtatttgctcagtttttacctacattccaaacaccattgtaagttccagaaatatagcagtgtgtcagggcttatagcttggtagaatcaaatacaaagataagtcagctttattgttaaaaacagaaagcaaaccttattttgtgttgaaaatcaaaagctcaagggacccagaataaccaaagcaatcatgaaaaagaagaacaaagctgaaggaatttcactgccaatttcaaaattttcagcaaagcaacagtaatcaagacatgtggtactggcatgaaggtagacatgcagactaatggaacagaatagagagttcagaaataaatgcatacaggctgagtgtggtggctcatgcctgtaatcctagcactttgggaggccgaggctggtggatcacctgaggtcaggagtttgagaccagcgtggccaacatggtgaaaccccgtctctactaaaaatacaaaaaaattagccagttgtggtggcacacgcctgtaatcctagctacttgggaggctgaggcatgagaattgcctgaacccgggaggtggaggttgcagtgagccgagatcatgccactgcattccagcctgggtagcattccagcctgggtaacagagtgagactttgtctcgaaaaaaaaaataaatgcatacattacggtcaattgacttttgacaagaatgctaggactattcaatgagggaaagaatagtcttttcagcaaatggtgctgggacactggatatccacatgcaaaagaatgaagtttgacctacacctcataccatatataaaattaacttgaaatggatcaaatacctaaatgtgggagctaaaactaataaaactcttagaacgaaatacaggtttgaatctttgtgaccttggatttggcaatagagtcttagctacaactccaaaagcacaaacaataaaagaaaaaacgtaaaactggacttcatcaaaatttaaaacttggccatgcttggtggctcatgcctgtaatcccagcactttgggaggccaagcaagaggatcacttgagcgaaggcatttgagacagcctgggcaacatagtgagaccttgtctctaaaaaaaattaaaaattagccaggtgtggtcgtatgcctgtagttccagctacttgggaggctgaggctggaggatttcttgagtccaggaggtcaagggtgcagtgagccatgattgcaccattgtactccagcctgggcaacagagcaagaccctgtctcaaacacaacaacaacaaacataaaatgttactgcatcaaaggataccataaaaaaaagaaaagacaatccactgaatgggagaaaatatttgccagtcatatgtctgataaaggatttgtatctagaacataaaaagaacttttacaactcaacacataaaagacaaatgaggccgggtgcggtggctcacgcctgtgatcccaacactttgggaggccgacgcaggcggatcacaaggtcaggagttcgagaccagcctggccaacatagtgaaaccccgtctctactaaaaatacaaaaattagccaggcgtggtggtgcacgcctataatcctagctactgaggaggctgaggcaggagaattgcttgaacccgggaagcagaggttgcagtgagtcgagattgagccactgccctccaagctgggcaacagagcgaaactccatctcaaaaaaaaaaaaaaaaaaaaaaggaaaagataagccaagtgtttaaaatgagcaaaggatctgaatagacatttctccaagtggccaataagcacatagaaatgtactcaacaccattagtcatcagagaaatgcaaattgataaagaagtcagactgtaataagtgttgatgaagacatggagaactgaaaacttcatgcattactggtaggaatgtaaaatggtgcagctgctttgaagaatggtggtaattccttgaaaagttaaacatgggttactatttgacagcgattcttgtcctaggtatatatacccaagataaatgaaaacgtgtccacacaaaaacttgggcacaaatattcatagtagtgttattcataatagccaaaaggtagaaacaaaccaaatgtctgtcagtaacaaatgaataaataaaatgtgttatatctatagagtgtaacagccattaaaagggataaagtctcatatgcactataacatgatgaaccttaaaaacattttgcttagtgaaatgagccagtcatacaaggtcatataccgtatgatttcttttcttctttttttgagacagggcctcgctctgttgcccaggctggagtgcagtggcgtgatctcagctcactgcaacctctgtctcttgggctcaagagattctcctacctcagtctccaagtagctgggattacaggctcacaccaccatgcccatctaatcttttttgtgtttttggtagagacaggggctcgccatgttgcccaggttggtctcaaactcctgagctcaagcgatccacctgcctcagcctcccaaagtgctgggattacaggcatgagccaccgcacctggccactgtatgatttcattgatatgaaatgtccagaagaggtaaatctatagcaacagaaaatagattagtggttgcctagggctggagaaggatgaggggcttgggaggtgatagttaaagggtatagggtttctttttgaaataatgaaaatgttataaaattggctgtgctgatggttgcataactccgaatatactaaaaaccattgaattgtatactttaaatgggtgaattatatggtatgtgaattaaatttcaataatgctgttacataagatataatgataaagatctttccctgcctaggaaaatgatatgccccaaagcagtctagtatttactgccataggattgagagcttggtggatcatgtgctgtggaaggcaggggtggccgtcacccctggcgtggtagatattaggacagtggggatgtcaccttagcatcacgagtgaaacatatcttaactgatttttctgggagcatcgtgaggataactaatgagatgaagggtagagaatgtttggctgtggcttaatggttggaactttgcccatggccgcctgcctttgctgtccgatggtctcagcctacagtcctgctctgccccctgaggcccaccccagtgctgcacatgtcactcccgagggaggtaaccatagcagaccagtactttggccactggtacttttatgtgaccaagagggacttctgttaaaagcatcctctgggtggaaacaacccaagggtccatcaacagatgaaaggataaacaaaatgtagtggatccatacaatggaatattattcagtcttaaaaaggaatgaggctgggcacggtgactcacgcctgtaatcccagcaccctgggaggccaaagcgggtagatcacctgaggtcaggagtttgagaccagcctggccgacatagtgaagccctgtctctactaaaaataaaaaaaattagccaggcatgctggcggatgcctgtaatcccagctactcgggaagctgaggcaggagaatcacttgaacctgggaggccaaggttgcagtgagctgagattatgcctctgcattccagcctgggcaacaagagcgaagctctgtctcaaaaaaaaaaaaaaaaaaaaggatgaaattctattgggggcagggtggctcatacctgcctatagtcccagttacttgagaggctgaagtgagaggatcttgggagcccaggagcttgagactgcagtgagctttgatcacaccactgtactctagcccaggtgacagagcaagaccctgtctctattaattaaaaaaaaaaagagtaaaattctgaaaatatggatgaaccttgaaaacgttatgctaagaggaataagccggtcacaaaaggacaaataactgtgtgattcttcttgtatgaaatatccagaataggcaagttcatagagacagagagtagaatcgtggatgctggggactgagggtgaggggaaatggaaattattgcttaatggttatagagtttgtgttggggtgatgaaaaagttttgaaaatagtggtgatggttgcacaacattgtgaatgtacttaatgctactgaattgtacgcctgaaaatggttgcagtggtaaattttatgctatgtgtatgttaccacaataataaaacacaaccctgaggagtaagcagaaccctggaataattgatgtcagagctgacatgcagagacccagggcaggcactgggtggacctcagatgtagggctttgtctgagttgaaatgcggtgtgattttttatttctgcatagcagtgctgtttttgaaataggttaagaaactagagaaacatggggtgggaatttgtacttaattcagtacttccattcccctatagtcagaagtaagagactgggattgcttgaagctatttctgtctaaggactctggggtaggatagggtttcttttgcctactctgcgtatatggcagtggttggatgaagtttgcatgattgctgctttctggctgataacagcatgtggcagggggaggcagacagggcctacgccctgccaggaagcgggcatggtatgtggcttccccttaacatttgaatctcatgtgatacctgttgtctccctaaacagaaaagggagatttcattgccctggatcttggtgggtcttcctttcgaattctgcgggtgcaagtgaatcatgagaaaaaccagaatgttcacatggagtccgaggtttatgacaccccagagaacatcgtgcacggcagtggaagccaggtgggtccctgctccctccgggtcaccccgtcgggccagcatccccttggttacctccaggaaccaggcctcaaagcactggcatcccaagcccctggaagagggttgctggaaagagtccctcatagatgcatatgtaaaaggactcctgggcagaggatgtgacagcctgcatgggggccctgcttaaacagaggctctccgtctgggcaaactggtgtagtggaagtgggctgcttggactagcagagtctgggtttgaggagggaggctccgcagctctgttgggtaaatgcactcattccctgtggatcctggggtcggttccccagtgcaggtttagcagagccctgggtgaaaatgcccttttctcctggtcattggcctcacccacttactggaggccccggccttgtagggtatggctgtggccttgtcgggcaggaatgaggtctcacagctctgggctatttgggggcttcttgttacctgatttagaataccattgcacaagcccttggcacagaaagcagaggaagcagggaaatcacggtcccctccttttacactcctgttggggctccccacgctgggcccccaggaagggctgcccttcctccctgcccaaggggctgtgggcatgcctaggaagggcctgtccacctgccccctcctctctgggtgcggggagtggtgggtctgtagctcactgaggaccctgtgatcagggctcaggcagcccactgcaggttttcagtcatttctgggtccctaagcccgtcgtggggcaaggtgcactcctcctctctcctgtagacattctggctcctccagtctggctcgcctcctgagttgtggctgctgtccagcatatgtactcagagctggccaaatgtttgctttaaggagggtgtgctcaccgcaaggttcatgactaagatttccagggaactctggttctggggtggacttcgagatgagacccaggagccttctcttgactctactgtgctcttaagttcttgtgggtgggacctggagcaagccaccaagccttttctttgtccaagagacaagggctaatcctggctaacctgctccctgggatttgggttcagagcccttcagattatgtcacagtgagtgtcacaggtgacactgtcactagagcaggtgagccactttatagtaggccaccaaagctgggtgcatcactactggatggccctgcccaagggctcccctgctactcccattactggggctgcagagactggcccatccatctggcgcctgcacaaaggctgccagctggtaggtctcttgaccatgcccagttggctgctgcattgcttctccttgcaggtggccagcagcccatggtttggcatcctgcactttctgtttggaacacacactggcctatcactctgtttcccaaggtccttgggttgagctacctaagcctggcgcattcaacactgagactcaccctgtgctgcaaacattccctgtgtgttttacaaacattccctgtgtgttttggcttgaccttttaggagcaaggtttgttaattaagggagtaccctcaccttcttaccactgccctcttcgtctctcccagcctctatccccatcgtcccctcttctcagtcctagaatcactttatttcctactgtctctgtttcttcctctcctccttttaagcagcctgaaaagaggatgatgacgataatcatgataatgtagtaccattatagcaaattcttttttttcttcttttttttaagacggagttttactcttgttgcccaggctggagtgcagtggcgcgatctcagctcaccacaacctccgcctcccgggttcaagtgattctcctgcctcagcctcccaaatagctggaattacaggcatgcgccaccacacctgactaattttgtattgttcgtagagatggggtttctccatgttggtcaggctggtctggaactgcctgttcaggtgtgagccaccacacccagcccagagcacttttaagctttaataaattcagaagcacaaatggaacattcttaaaatatcacttacttagttgtgggaattttgaatagtaaatgttttaagtttttgtattagccatcatttgccatctttaataagagtgactgagtctttatttttattttaaattattaaaaaaatttttttttaaagatgggatcttgccaggttgcccaggcagatctcaaactcctggactcaagcgatcctcccactttagcctcccaaagtgctggattatagatgtgagccactatgcctggccatagtgtgtgtatttctcaaataaagagtgtgttgtcaggcaagaagagaaaataatgtttttttttttttttttaagacactaaagctttgagttcagagcggttaggtgactttttttcctggttgatcgcagacatagtctagcctggggcgggtcacttcctgcctctttgggcaggcttgtcaccctggatcaccagcactccagaaacggcctttccttctcaatggtgcactctggggagttgtgtttggcctggatccgggaactggtgacaggtcccattcatgggaatccatttgagttctgccccttcctgaggcagccttcccttcacccggccttctctcccgaggctgcaggagagtctggagcctccgagtgcagatggcgtggggcgccaggaccaacttagtaatgagtttatatcagtctgcaatgtaggtcgcaggaagcttagccggcttctctggggagggtcatgtgtcaactcagcctaagatgccagctgctctgcagcctgagtaatagtgactcagggatagaaggtcctacattaaaattgaccaggcgttctattactctggcaacaaagtccgactttagagctggcttgggggggatctggggaaagatgggaacagcagtaatgacttctggccccctcatgaggccctgcaagtaaagccttcaggcagctggccttgtctgggagttcgggctggggccacttcatgtgactatggtttggctctcctaagacagccttcttctgggttccaaaaagctccatggctgtgtcactgccatgtgtaagggaggtctagtgtcatgagagtcatgtgaaagagacaaggggttagctaggctgtggcatggctgccaaaagtgtatatatatacgctcaggttggattactagaggcagagagataaagaagggaggttcttagttctactaaccactcttctggttagaacacacatagaatattatcttctgttctgattatattttgagacagggtctcactctgctgcccaggctggagtgcagtggtatgatcatggctcactgtagcctcgacctcctgggctcaggggatcatctcatctcagcctcccaagtagctaggactacaggcatgtgccagcatgcctggctaatttttaagctttttgtagagaggaggtctcactttgttgcccaggctggtgtcaaactcctgggctcaagtgatcctcctgccttggcctcccaaagtattgggattacagacgtgagccaccatgcctggccctggttatattttagagatgaagggaattattagagagatccaaaaagattaccttagaggtgttgagcctctcctcatgggcagtattcatgtagaagctagggacccagtgttccaggctctttctagcagattcctaagatatgtatgtacctgataagtcatagataacatgttatagcacaggcaagcttaagctacagtgcggtagataaattgtggtatattcataccaaggaatactgtgcggcaatgagaatgaacagttgtcaaagacaactccgtggatgactgtcatccacatggtgtcgagtgaaagaacacagacaccaaagagcacacacggtctcatttccctttagacacaccaaacaaacaggcagatgtaactgagggtgatagacgtcggggtggctggcagttgcccttgggctgggtggtagcggtagtgactgcaggggcagaagggggcatattacaggtgtttctccatctcgtgtttctccatctgggtgctggttacatggatagctgcagcttgtgagaatccagtgaactctgcacttaggatgtgtgtactttttggggtatgcataagacacttcagtaaaaagtaacattatgacagtctgaattgttaagtcactccagtgggctagaggctgtggaattgccctcagagtttctgaaattttcagagagcgtggcgtcgggcggggcgggaaggccactccacctggtggctggtggagatccgtgacctgtgtgttatgaaggcatagctggttttctattatttttccatttttctcagtacccagatgttgcatattagtgaccactgagaggccagttctgttgaaggctttgaattgcttcttaagagctgtacttgcccacagggtagcttttgaaaagtgactcttctctgcattcacacacagcatggcttttcagacagggccaccaggtcccaggagtacgagcactttgtttgggtagatgtattcctttctgtgtgtgtgggagggaatggtttatatttttctatgaaatgctaagcctgctttggggccccctgactgctctcatgtttccttcagctttttgatcatgttgctgagtgcctgggagatttcatggagaaaaggaagatcaaggacaagaagttacctgtgggattcacgttttcttttccttgccaacaatccaaaatagatgaggtaaggatgttctgggattatcgggctctgcagatgccccgggatggaaaagctaacaagcccttttctccacaacttttcccctttgttggcagaatggtttgcatgtctggtatttttaaagaaacatttgcagaagttagtgtggtatcatgatatagtgtttactttttcacttaaacttcagttatttatgtatttttggagacaaatcagggtatttttggccaccaggtagacagaagcatttattaatcttaggcaagcaaaggaaaataaagtagttttaatggtggtggagagaggtgggaaagctctttgccagaattgcatggtgtgatgtttacctggaaactgccctggttactgcgaatatgctcagggccctgtccctcaggtgccagggctgcctctccatagtggagctgatcagtggctccagccccagggatgcccttggcgacctccgaggtgacttgttgtacccaccttcctgtttgtcatctatttgttttttcattcgttcattcattcagcaaggatggactgtgatgataacactgaacttcagcactgcaggaatacaaaataaatacatacagccttgttctttttttacatggaaagacagaaaccacacacaccacaaacacaaaccacccatgaataaacttctaataatatgaattctggggttgggtgcagtggttcatgcctgtaatcccagcactttgggaggccgaagcagaaggatcacttaagtccaggagttcaagaccagcctgggcaatctgtacaaaaagttagctgtgtgcgttaacatgtgcctgtagtcccagtgatgtgggagaagcttgggagatcgaggctgctgtgagccatgattgtgccactgcaccccaacctgggggacagagtgagaccttgtctttttttgtttgttttttgagacagagtctccctctgtcgcccaggctggagtgcaatggcacgatctcggctcactgcaacctccacctcccaggttcaagcaattctcctgccttagcccccctagtgctgggattacaggtgcccaccaccatgtccggctaatttttgtatttttggcagatatggggtttcaccatcttggccaggctggtctcaaactcctgaccttaggtgatccgcctgcctcggcccctcaaagtgctgggattacagacgtgagccactgcacctggccaggctctgttttaatacatacttcacaggtattgcacataatcttcaagcatctctatgagttaagtgcttatgattcccactttacagatgaggaaactgagtctcagaggggctaagaacctgtccaaggtcacctagccaggaagattccatgctcgtaactggtctactctgctgcaagttagtagcatttgggctcagggcaccttccacacttgcagggagcacccctgggtccctttatgccattagggtaagcgtcctttcctgggcactgcttcctgtggctggaacccttacatctgtaaaatctgtggaatcagcaagaaggggcttgagagcacagcaggccaagatgagcgcagaggtctccccagggtcacagggcttattaatggcaggccttggaccagggtcccaggccccacctcccatccagtgctccacccacctccaacatgtctaaatgcctccgagatgttctgtctgacctgttatgctttcaggaagctgtggccatatgtagactcttaatctggttctggtatctgagaacgcccctccaaggtgttcagatcagtttggcctccactgtgtccttccaaaccctttggcaaggcctgttttcagtacaagtttcccttggcttttgagaactgagacatgacagtcactcccccttccccttcccttgtgagaggtgggcctggaatgaagagactttggtggactgcgtttcaccgttgtttacatgtgctctctgcagctattgactgagtgccatccctgtgccaggcatgggctaggccctgggagagaatggccagagtgtatttattttgtattcctgcagtgctgaggtttaatgttaccgtacagtaggtcccgtaacagcagatgtagcctgttccccatgaaggtgcagccttctatggacagaagtgttgcaggaggtgggagggaatgacttcctgggcacgagagcctgcagggtggagcagacatgcccaagagggggcattgtgaacagagaaggagccagaggtggggggtgtccacctgccagccttcaccccctctggagaatgcttcctaggctgggccagggtacttgctgtggcgccagtggagcacagaccctcaatttcccatccagaggcctgtgcatgttaccccttagggctggctgagaacttcaagattgtccacttctagatcagctccctgtttctagaggagcacagtgaacctcagaggagtgaagggaactgcccagcaggaaatgggcagacagtatgaagtgggaccaggtctccagattgccagccccacctttgtcccacaacacctggttctctgaggctttggaggaggaagagggctgcttgagaggaggcagatagtgtccagggcttttgcagttcctgacttagcttagttgctgctgagcaaagaaccaccagttctcatcaagggctgccctccctggtgcatactccagtctgtgtggctcccaccgtgagctggggcggggcccatgtgctcagaatgctatccctgagctacctctgcaggcctgcggggcctggaccgtgaatcttccaaccctgctgcatttatagtgacttgccccattcagagtaaaacagccaagtataacaattatttttctgttctcatatctttttagtttttttttaagaaagcaaaagcaatatgtaaaactatcaaagtaagataaaattatagaatgtttaccattggatgtctatccttgatgtttctctgctaatatgcaaagtgaaataggatcatactgtgtaaataggggagtcaccacttacaaatggcggttaagtcccaaagctggtgaagaggcacaaatcatgtatagtccacatcattccctaaatgtctgggacctggctcttaaaagctcagcagccaagaattatcttagcattttgtttctttttccaatttggctctggctttcttttcccagggctgtggaagccggggtctggttgggaagtggggaagggggccagggatttctcttgctcccttttaaaataggtctggctgcgcagttggcatccagttagattggcaagccatgtggcattactgtccccacatccacttgctttcttctggagtgaactggatattgtgagcaggtttctccccaccctatctttgcccccagagaagcccattgtgtggatgatcgggagatggaaatgagtctgggcccctccccaagcccagtgtgatctgggaggagccacttggcccctatgggcttctgcttcatccctgtcctggagcaatgcccagggccttggggtgctggaggcctcccagccctcatccagccccatccattcttctttgcaggccatcctgatcacctggacaaagcgatttaaagcgagcggagtggaaggagcagatgtggtcaaactgcttaacaaagccatcaaaaagcgaggggtaatttctcctgggccctctgcctcagccatgcaggggtgtggggagcagggctgcattctaaaacagaccagtgcccttcctggggggcagtagtgccaaagcctgaagacccaggcaggggagagttgagggctcacagtgtggaatgatgaggatggggatggtgcaaagcccagctctcggaggtgctgcctggagcacccaggcctggagcagggggtcacctcctgacaggagtgctgggctattcagggagtgggtgtcacggatgcagcctgctgtgcttagaacaagggcagaggagcccgccttatcggggacgtggacctcctgtggaggtttgcagaggaatgtagctccatgagtaaaatccccactacccaaagactcttaagccaggtaattaaggaaactgtgaggttttcatcatttaatcaccatgctctgatctagttaatttgagtaccagctgtaatgaaaccagtaccactcacaaaagcaggggttctgaaaacgggagcacttctgccaagcgctgttaaggtgtgtgatctctgctcccatgtgtgagtggacaatgacaccccgttatctgtccccaggactatgatgccaacatcgtagctgtggtgaatgacacagtgggcaccatgatgacctgtggctatgacgaccagcactgtgaagtcggcctgatcatcggtaatgcattcccctttgcccatccatttgttcggcccatctttccaggtggctctgcaccctccccgttgtgtggtcatagcttctgatcttgtcctgcccaggcactggcaccaatgcttgctacatggaggaactgaggcacattgatctggtggaaggagacgaggggaggatgtgtatcaatacagaatggggagcctttggagacgatggatcattagaagacatccggacagagtttgacagggagatagaccggggatccctcaaccctggaaaacagctgtgagtccttgacttttgcttctaaccacatatgtgagttaggggacatttgatgaaagatttgggatgggagatgaaaagggcataaagccaagtgatcacaaacagaaaagcctgtcacattttttttttgaggcggagtcttgctctgtcacccaggctggagtgcagtggctcaatctcagctcattgcaacctccacctcctgggttcaagcgattctcctgccttagcctccaagtagctgggattacaggcatgcatcaccatgcccagctaatttttgtatttttagtagagacagagtttcaccatgttggccaggctggtctcaaactcctgacttcaagcgatctgcctgcctcagcctcccaaaatgctggggttacaggcatgagccacctagcgcggcctaaagcccatcaaatttgcattatttgttgctccttgtttggtgagatgcacagctgtagagtctgtagctgaaaagcacctttaaaataatcttctctttgtttaattacactatgattgtgtccttgtaaaacatcatgaaaacaaaaagcacagaggcattgatgcatcttggtgtggggctcacaatgaacccatctgatggggaatgcggccagagttgagcaggtactggtggtcaggggaggagatcaagaggtgaatgggagcccaggagctcagtagcccctgaaaaaaaaaaatcctcaaattatcccctgctgcatgaaaattaataaatatgaatggttcaaaaatgcttccccaacaaagcacaggaaagttagtgtaaatgtaaggtttaaaaaatatctctatgctgtagtcacgagtgttgctgttcatggtaagagaggccaacatggtatgtggggcatctaagggagatgagtgtccattcattcatcacatatttattgagcacttactatgtgctgagctctgtgctaggctctgaggatccaaaacagcaccttccctcccaagacttacaatctagatggggaggtagggcagacatgcaaatatctgttgtgcagaggagttggggtaagaagagtataagtcatgtagacgttagggagaatggagaagcaacctccattcttactatggcaatctccgtatctccaatgtcaagcataaatagacacaccagagttgataaagaacagaagtaagagtgatattattcaggttagagtgggtattgctttctctgagccacttatttcctgaagtgcctgctcacatttctctgtgatgctggcatgctgctagctctctctgatctacccagcctcccagcagccttatcccagagttggatactgtcaacctacagagagatgttcactgactctgtagacctaataacccttatcctgatgctagagggacaggaatttactagccatattgaaatgcatgacccaaaagatctcagtactgcagggtggacagttggcctttccacctgaattaatggattttcatcaatggcgagctccccaccagtggaggtggcagcagtgaataaactaggtttctcagtgagggaattcccaagttcttacacccagagttgagcatcaccattgcaggctgagactgtggtaccagcttggtgacaagggaccccagttccaaagctctgacagtcaaaggttttttaccatacccccccccaccccgcccaatccattgaccccactggcatgacatgaacttattactgtgcctatttgtatgtttcactgaatagccctgaatgtgcttgatggcagtgctgcctcaggcacctctggaggtattctgtgacacatggcatgtataccctgttgcatctctaaaattctcaaatctccacattcccaagcacatgtgaccccaaagggtttcagataagaggttatgtacctgtagttactatcagtcacttaatgagaagtctcttttcttagaagtgcaggtggggcatgccacttgtggtaactcgacaggtaatgcccaggcccttatccttggttcccagtttgggaaccctgcatggcttgggtgtaaacttggatctctctgctgtccattgatgtttgcctgaaattttccaaagagatgaactgtatcccaaggctaaactataaactgtgtttacagttggcttgcaataaatatttttgggatggatggatggatgggtggctgatgatggatgagagatgagtgggtggctaaatgggggtacagatgagaaagtgaaaggttggggcaaaatctcttttcttgaatatgtttctcagttgtattagtctgttttcacactgcctataaagacatacccgtaactgggcaatttacaaaagaaagaggtttaataaacttacagttccatgtagctggggaagcctcataatcatggcacaagtcatgtcttacatggatggcagcaggcaaagagaaattgtgcaggggaactcctctttataaaaccatcaggtcttgtgagacttattcaatatcacgagaattgcgtgggaaagacttgcttccacgttcagttatctcccactgggtccctcccactacaacatgggaattcaagaagagatttgggtggggacacagccaaaccatatcactagtttactgcatactgtaggccaggtctcattgagaacaattccaaggaaatgacaaattcccaagttgcatcacatattcctggaaataggctgtaggctaaagagtttttttgcctaagcaaatttttgctgtgcccccaggcttctatctgaatctttggatcttccctatgtcgtttttccatggaatgcctagttcttgaaagccattttaccctctttgtggcagggaaagacgtttgctccatttgactgatgggaaaattatggccctagaataggacagaggtgacccaagactcattgttgaggtgtggtctggtgtaggtttggggatttttgccctgtttgaaggtttgaggttttcagagtgagcttccagaatcttttctcattggtaatcagggaggatctagggaagtgatttttcatctctgagtacatgttagagttacatagcggtcttttaaaaaaaatactgatgtccaggcatcctctcactaatgattcagttggcctgggttgcccagtcctctgtattgtaaaagctccctgggcgattccaatttttaaccagggttttttttttgttgttgttgttttgttttttgagacagtcttgctctgtcacccaggctggagtgcaatggcgcaatctcagcttactgcaacctttgcctcccaggttctacgtgattctcctgcctcagcctaccaagtagctgggattacaggcgtctgctgccacgcccagctaattttgtatttttagtagagatggggtttcaccatgttagccaggctggtctcgaactcctgacctcaggtgatccagccaccttggcctctcaaagttctgggattacagacgtgagcccccgtgcccagccattaaccaggttttaaaatctcagtgtgttagatttgtgcaaaggctctcagtgcccaagtgggctctagactaccaacagctactcattccatttgctttgattggagttagcatttaactgagtacctactgtatacagtggacagggaggacattgtcataatagctatgtggctcctgccttcattggtagttactgcatttgggaggcagcagaggaacctgctttgagtgttcaggccccaccttgccccagagccagaaggtctgtttctaaaagggatcagtcttttggtttccttgtctcgcccttatattccaggcctttgatattcttgccacatgcttgtcttatactgtggagttagccccaccttttatatcatttttaattctccttcccttttgtttccttgaggtttttttttttttttctttgagacagggtatcactctgttgcccaggctggagtgcagtgatgtgatctcagctcactgcagccttaaactcccaggcttaggtgatcctcctgcctcagcctcctgagtagctgggaccacaggcagcagtaccatgcctggctaattttaaaatttttttatagagactgggtctccctatgttgcccagctggtctcgaactcctgggctcaggtgatcctcctgcctcaacctcccagagtgctggcattacaggtgtgagctactgcacccggcctgcttgggcttcttgctcttctgctcttgctctgtgttctgcctggaatctctgggatcttgaatcctttttccctgtgattccttatcacatccttcaaaatgcagagcccccaccccacacaacaacacagcaacagcagtgactgcaacagcaaacgctggtggttggtgttcaggagagctctttggcctggatggtggttgagtaactgtgcgccttcaagtcagcacccagatgccttttctttctgtggttctgctgctccatggaatctctcggcagctccggtcctggtttgcttggccatgggcctctgtctcttttctttccttgggcttctacctgaagcagacccagggtgctgagggctcctctttggtgtgcaggtccttgcccatgacttctcgtggttgatgatgctcccctcccccatctcagcccttcctgggcccaccagcaggcagattggttggaacgctgccacgccgcctctcactgcctgtctgtggtcgtaggtgtctgactgccgagacacctgggcattacctgttcagttatcacaaggaaaagggcccgggcgttacccgttcagttatcacaggtggcatgccctgagaggcagatcatgacttgctcgatttcattaatttcacttgagcagatgggaagcacgctgttggaacaggagccggtctccatgagccttggtttgaacagagagaagctcgtgagaggtgctatttgcttgttctgctgctctaacagggcctttagggactgggaaaggacagaccctggccgtgggcctctatctggaaaagggggtatcactatccatgtgtgtaataggccatgtagaaaagggagcagattgttctgggcgtctttagaaggcagagtgaaaagcagcgggcagagggtgccaggaggctgatgttagcgcatcctatggggaatgccctttctcttgtcacactgcccaacagggaaggctgcctagggaggagaacaggcagagaagctggggtagggtggtcctaggtggctgctagcatgatagtgacagctaacattgagtgacacggtccatgagacaggcaggaatgcacagtggttaggagtacaacttctggtgttagatctaactggattcaaaatgtggattgccacttgttagccctgtccatgggcaagttatataacctttctgtgcctctgtttcctcatccgtgaaatggggataatgctaatgtctccctcctagggttgtaatgaggatgaaaaaagttaatacaggtaaagtgctgggaaaagtgtcagacacataggaagggccacaggcactcattgttagccagatattgtagcactatctgacctatattaacccatatcctccatataaccttacaggaaagcagtcagtatctcattgcacaggtagggaggccagggtgagtagctcagtagtggctctgccaggcctccaccagtgctgagattcctgttcagggctacacagaggctgttcccacaggagcctggggtggcaccagacttagaagggcactgtcctgccagggatcctctgcctggctgcagccaggcggtcacgtctggttctgtcaggagcaggaacaatgaggactgtgtttttaaggaggctctgtgccctgtgctgatggttgagggccgggtgctcaggtctcggcagcatccttggcttctgggcggctctggttggaacagattgttttgctgtgtcacagccagctgtgggtgtgccagctgggctcccgcagaggagcggcgggctgctctgatgtgcgcccacctcttcaatctgccctgctcaggggttcctcctggcccctcgtcagccaggatgtgggggctgaatctggctcacatatggcatcgagccctggttcttgccagctcccggctgggccttcagcaatgcgtgttggcttctatctctacacctggctgcctctcccctgcagcattgggctcattctgtcattggtcggtgcttgaccggggctggagctgtgcggtgagctgattggctgtcagtatgcagagcccagccctggagtttagggtaacatcagtgggggaggagtgagttcctcaaagcaaattcttgatccttttggccggagaaggagaaaatcatgccagggaggtgcctaacaaatgtcctgacagcggccccagggggagtggctgcctttccctcggagaagctgtttaccctttctgagctgggaaatggggagaatacttcctggccacctcctatccacagggcttggggtctcccataggagtggaggtgaaagttctttgaaaagtatagcatacaagccaggtgctgtagcttgcatctgggagggtcgcttgggcccatgagttcgaaaccagcctaggcagcataaggagactccccctctacaaaaatttttaagaattagctgggcgtggtggtctagctactcaggaggctgaggtgggaggatggcttgagcccaggaggttgaggctgcagagagtcgagattgtgtcactgcgctctagcctgggcgacagtgagaccctgtctcaaaaaataaataaataagtaaatacatacatacgtacatacataaagataaaaaataaaaagtatagcatacagtttaggaggagattatcatattttgcacatttctatctggggccttcttgacatctgcaatctaaatccaaacgctccccctgccttcaggcagccttccctgcctgctcctgcccatggtgttctcctagtcacaggcatggggtctggatgactcctgccctctccacagtcggcttggcttccgatccctctccctctgctgttcagtcactcaagcacatggttttgcctgccagcgaggctgggggctggtgaggggtgagtcggggcttcccattccttttatgtctgtcccagccctcgtgtgtggggcgcagaggaaggctgacaagtgccggtgtgcctttctccacaggtttgagaagatggtcagtggcatgtacttgggagagctggttcgactgatcctagtcaagatggccaaggagggcctcttatttgaagggcggatcaccccggagctgctcacccgagggaagtttaacaccagtgatgtgtcagccatcgaaaagtaggtaccatcccctcaaggctttcttggggtgttggggcagagaagagcaattggtcccttgttacttcttgagtccaagtttggtggcttttccttcaagagtgtcatggctttctgggtccgtgtcctctcactcttagttgacccattctgggccggactccctgaaggcacttgtggcggttcattaaagaatgacatagttagcctcaagtgcacaggtgattttcctgtctagctacaagagcagcctcctctcccacccccatcagcccatcacccccaccctccacacacactcagggtaagattagcgtccaggaagcagactattcgagcaaggagcaaggagctggtaaagcccggagcctgggtttttggaattccacctcccacttccagtctggagacctccagactgtgctgagggcactaagggcaccctagtaacctcaagatgttaattaggtgctccctgaaaaaagacttccttgaccaataggattgggaatatggcacatttatcttccagtttacaatattatggtaaaataaatacagactcacagtaaaaaagaataagaagtataaagtataaaaatacagatttatagtatcatcaacacattaaagaaaacccagtttgctttgacttgtcatttcccaaacttcttttgtgcttgaaaccaccccttccctgccacacacacattctttcagaggaaacctgttaacagccagaaatgtgccctgacgtgcaagtttgagaaacaccggttaacagatgagacaggacagttagaaggaaggacagagccagccagcaactaactgtagccccttggcatcacacaagaaacccgggattctctgtctccttgtgaagatttgcatcagctctctttgaggttagagaaggcagctgctggaagaggaaaggggtttatctggaccaactcttctgccaaatccatgtgctggagtttgttgtatgatcactctcctgagtttccagctgtcccttttcatgagtctcctggtcagtggctgggaaggaaggggagcgggagactcgtggattgtcttgaaaatcactggccaagtcaggaaatgcatgccttcctcttggcctgtttctggtattgactctttggttaccaagaaacacaaacccagctagctcaagaaagcatgtatattataataaaggctatctcaaaaaaaaaaaaactataaaaacatcctacaagagcagatgttagaggcattctctaaaatcaggagcgagacagtatcaccagtttctatttggcatcgtactggagtcttagccagtgggttttcgtttttgtttttgtttttaaagaaaagacgagagataaattaaaggtatgagaatcaaaaaagaagtgaaactgtcattatttgcaaatggtaaaagtctatatggaatacccccaaaatatctacagacaaatgaatagaatgacgggagaggttaaaaagatgtctggatggggtttcaccttgttggccaggctggtctcaaactcctgacctcaggtgaccctcccactttggcctcccaaagtgctgggattacaggtgtgagccactgtgcccagcccccatcctcttctatcatttttaaaatctcttctcccatcataaaattaatttctctcatattttttggtcaggtagaattgggaaagtcccacactctcctattctcgtattaccttaacatcccaagcttcctttccttttttggtctttatgaatatatttatatggacagaattaagataaacaaaattgatttccccattctctcacttccccatcttgtcttcctagaccccacagagttaaaacttgggactcccccgaccctcccagaacacttgtatattgtttgtttgaggttcgtgccgcagtaacagacacagtatttgattgcacatacagatgtttgctgggtatattcactgtacattttatttaatctggttttttgtttgggggttatttggggcgaggttggttttgtttttaaatattaaaaaaaatctgtcaaaaaaagatgtctggagataagatacagaagtcaactgtatttctatcagcaataataaaaatatgtacatattttaaaacacatttttaagaataattttagatttacaggaaagctgcaaagatagagtgtatgtatatgtgtttgtgtgtatgtgtgagtgtatatgtatgcctgtatgtatacatatatattttaaaggcaccatttgcagcaataacaaaactataaagtacttcagaatgaatccaacaaaagatacacaaaacacgtgtacagaaaattacaatttcactgagagacatcaaggaaggatgtataagcatccaggggcaactcacagaccccacgagtgggaggttctcctgagcctcatgagccctgggtggtggcagccatttcgccacctgttcagaggccacatagtcttgcctctccacttctcttcatggtcctggcttggcatagtgcaacctggtacagtttttcctatcactacctggcatttcttatggaggagaacccttcctgggctcttctcaggcatttgacagtcttcatcccataccatcccataccatcccacacatggtaagtggggctgtccctttccagcacctttgagcctcagtgctttgcactgcctcatgtggtcctcagtgcatcagtattggcttctaacttcacaggaataaggaaggcctccacaatgccaaagaaatcctgacccgcctgggagtggagccgtccgatgatgactgtgtctcagtccagcacgtttgcaccattgtctcatttcgctcagccaacttggtggctgccacactgggcgccatcttgaaccgcctgcgtgataacaagggcacacccaggctgcggaccacggttggtgtcgacggatctctttacaagacgcacccacagtgagtctgccctttgctatcattggcactctgtacccattgtgggtagggaccttctccagagatcagacttttgtacccggtaaacgtttttcggcagacaagacaatggtggtcgggggctgtggctcatgcctgtaatcttagcactttgagaggccgaggcaggaggaaggagtttgagaacagcctgggcaacatagtaagacctcatctttacgaaaaattgaaaataaataaatagataaataacatgcttagttctgggcataaggtcagcgtcgcccccttgggaagtatcgcccttagtcgattcttgctggtattgcttctgcactctgtcgttacctcgccctgtcaaaagtcgagatggagatttctgtagctgtcggctcctctgggtggaatgtgtctgtctctcgtccgcatttcatcaggaggaccttgggtcataggtgtggtacccacattcttgtttcagaagctcctgttaaaaccccccaaaccctcagactttacttttttaaatgggcagcttgtctgtgcttggcctctgagagctggagctgcaggagctgtaagttgtccccattggcaaggaggtgctttgttccccacacagccttctggtctgtcagtggccccagccagtcctcatgccatctcaccttagttttagaagccatgttgtcctgtgagaacgtggcttatactttttttaaaaggctaaagggaaattctaagtcattatttaataagttttaatgctagcctgtgacatgattgttttgcacaggacctcagagttgtttcccactgtacatataaatacaatgtgcatgtgaagcacccatgtcagtactgcaccttcacacccagttctgttgatggctcaaagaatgtcgacttcaattgaaatagttctggcctggcatggcagctcacacttgtaatcccagcactttgggaggctgaggcaggtggattgcttgagcccaggagttcgagaccagcctgggcaatgtggctctacaaaaaatcatacacagctgggtgtggtggtgtgcctataatcccagttacttgggaggctgaggtgggaggatcacttgagcatgggggtgcagaggttgcagtgacctgatgtgcctctacactccagcctgggggacagaatgagctcctgtctcaaaaaaagaaagagagagaaatagttttgtgttgctgaggggatagggtttgagccaaggacgtaattgtatttttaaaatatttttaaagtatttgcaaaaatcttgataatgaaacttttattagccatttctttcttttttctttgtaatttcttggctaattttttggacaagaaagcctagggatttgcagcatcacattagaatttttttagattgtggtaaaatacacataacatgaagtatatcatcttaacctttttttttttttttttttgaaggcagggtcttgccctgttgcccaggctggagtggagcggagtggtgtgctctcagctcactgcaacctctgcctcccaggttccagcaattctcctgcctcagcctcccgagtagctggaattacaggcatctgccaccatacccagctaatttttgtatttttagtagagacggggtttcaccatgttggccagactggtcttgaactcctgacctcaggtgatccacctgccttggcctcccaaagtactgggattacaggcatgagccacctcgcacttggccccatctgacttttgaacaccgtgcttttgaccactgtgctgtattatcttcctgtcatggtggagggcaaaatctttttagacctggaattttttgtatgtgatactcatgtaataatgagagtcttctctttttatgtgtgattatgaacgatttcatttttcctttttacctctctgcatttgctaacttttctacagtggatgtatatgatttgtgtaatgaaaaaagcaggtgcagaaaatggaattaggctgggcacagtggcccatgcctgtaatcccagcacttgggaagctgaggcgggtggatagcttgaacctagaagtttgagaccagcctgggcaacatggcgaaaccctgtctctactaaaaatacaaaaaagttagccgggcgtggccccagctactcgggaggctaaggtgggaggatcacctgaacctgggaggttgaggcagcagtgagctgtgattgtgccattgcactccagcctgggtgacagagcaagaccctgtctcaaaaaaaaggaaaagaaaaaagagttaaagagtggagaaagaaagggtggccggaggtccccaataaatgctcagtccagctgttgtggaatgtcccccctgcccccataaggtattcccggcgtttccacaagactctaaggcgcttggtgccagactccgatgtgcgcttcctcctctcggagagtggcagcggcaagggggctgccatggtgacggcggtggcctaccgcttggccgagcagcaccggcagatagaggagaccctggctcatttccacctcaccaaggacatgctgctggaggtgaagaagaggatgcgggccgagatggagctggggctgaggaagcagacgcacaacaatgccgtggttaagatgctgccctccttcgtccggagaactcccgacgggaccggtgagggcctgctgggggctgacatgcctgtcctgctcctgccaggaactgagccgcagtgggggaggttggattcgccagtggatgccttcacactggtgatgcacgattttgccagagctagaaactccctcacatctctgttttccatttttattaactgatttgtcatgtgtgtgactcagggcagtttaattttcctggtcagacctcccaggcaagtgctatctctaaaaccacagccctgctcagaacagtgctcttagctgggcaaggtgacacacgcctgtcatccagctacttaagaggctgaggtgggaggactgcttgagcccaggagttcaagaccagtctgggcaacatagcaagaccctgtctcaaaaaaaattaaatgaataaaaaagaagtgttcttaaaagctgggcaaatcccacagcactgattaggttttcccaaagccaaggaaagccagcagaaggataaacactcagtgtacccttcttaaatcttgatagagtatgcatgaggcattcagggcctggggagtttcgcattcaggcaaattgtagaacaaaatccaaccctttatgctaaccttggtagttttcactggagctgatcattatggggaatctgaagagcttttcaggtgggtccttggagtaacgaatgtttgtgacaggaatgtgtcctatgtgtaagttacctaataccacattataagccaccctcacacttagtggcttaaaacaaccacgctttattattgttcatgcatctgtgggtcagttggacagttctgctcatcagggccaggattggctgacctctgccggcctcattcctgcatctgcagtcagctgttgagtcagctgggaggcagatctcagacgcccttccccacatgtccagcagttggctgtcagctggggtgcaggggcccctggccctgtgtctcatccttcagtgggccacctggctgttcaagtggtggcagcaagggctgcgagggagaggggaagacttcaaagcctcctggaagcccaggctggggataggttcagctttgcctctgccacactctgttggcctgaacaatcctagggctgggctagatcccaggggaggagaaattgactccatgtttcagtgggaggaactgcagtcatgttgcaaagaaggattttgcacatgcagggaagggaatgatgcagctgtttttgcaaataccccacaccttgacataaattattattttttgtaggagattttcattgttgcagccctggtgaagtctgtgtattgtgacaggtggtttactcacatgctctcctcccagtgtggctccaagtctgtggtggtcagagatgtggtgcccactcttcctctgagtctgtgctgtgtcctaaagggaggagttgcagcttctcctctatgtttgctatggggttctccccttgaaagtctggagtcttggggttactggctgccaagaggcacttagctgtttttgacattctttacgcttttgactgcaacagagaatggtgacttcttggccctggatcttggaggaaccaatttccgtgtgctgctggtgaaaatccgtagtgggaaaaagagaacggtggaaatgcacaacaagatctacgccattcctattgaaatcatgcagggcactggggaagaggtgagattacaaaaccatagtgcatgtgcactgcacacacggccagtggcaccggcagtcacgtgatgaccaaaatccgccacggggtgcccacatggatttgtgtccttgtggcccagaagcaccagatgctttttgccatgcctggcttgtgacactctggtggctgagaagattctggaaaaggaggctcactctgcatgtgtgtggggtgtgttttcctacgtgtgtgtgtgtatacacactttggtccatgtgcactgataaaattaaaaccacagagagcacgggcgatcctttcttttcccctgcagctgtttgatcacattgtctcctgcatctctgacttcttggactacatggggatcaaaggccccaggatgcctctgggcttcacgttctcatttccctgccagcagacgagtctggacgcggtgagtctctgttcttagggctcagtgatcgggcagcactgagtcccctgtggcctgggtgggctggcccttgaggccttctccagcctcagtgtcattcctagatgacagtcacagtcacagtgggttgagccaggctttatttcacagcctgcagggcatactgagactcttctctcttcttttctctttgaaagcgtcaccttttctgggaaaccttctggtcctccaagcaaaaaaagaacctcatcctcttctgtgccccctgttcatttgattgttgccttgcttataacacttcttacacagttagttcttagtgtcttttgtttctgctagtggtagactccgtgagcaaggacctgtatccctgcacgccctagcacagtgtccaatcagaggagataataaatgtttgttcaatatatgagatgaatcagggtccaggatcagagcttgagcacctgctgactactgattggctgggctcagagctgaaggttacagctcctgtcctttggaaggccacagtctagtgggggagccgagtccctaacaccagcagctccagctccatgctgtcagggctggggagtggattctgggcagaaggaaccaatggtgcagagtcacggaggcaagacccagcctgtcacgctggaagagctgtaggtagctctgggtgtcacaggtggagacgtgaccaggcaggagttctggaggtgggtcttaggccagggtttaaggcttaatgagcagccctaggagagttaggtagggtcacctacctctgtaaaccagttaatccagttacatcgctgacttgggacttttttcttctgaaacccttttagagctcaggagttagatctgtttgtttgtttttaaagcatttcacttataccttcaccttggattcatcatagtcaacacacacccagtgtactttcttccccaggaagtgttttaacttcaatccagtgaaagctaaaatgtactttaggtagacacagtattactaaactcttaggatccttcagttatagtgtcagtagactcttctgtacagctggttatgccagtggcagcaccaggcttggaatcgggtgatctgggctcttgtccagtattgagtgccgtctttgccgtctgctgagtgaacttagacattgctatttacctaatgtgcctcatgctccatctgtgaagtgggattatttcaaacccctatgaggatggtgaggagggtctattcatattttattggtttgtcctcagatgtttgaactccgtctccgatgttgtaagccctcagcagttgttgactcaggagggagggttggaattttgtgttctccccttccaggttaattacacaggactctcctggtgctttttatgttgtagggaatcttgatcacgtggacaaagggttttaaggcaacagactgcgtgggccacgatgtagtcaccttactaagggatgcgataaaaaggagagaggtaactattaaaagaatgttttttaaaatctttactgttttaggggcttctaaaaagtgtatttgcctgttgtaaagaattcaggccaggcgtggtggctcacgcctgtaatcccagcactttgggaggccgaggcgggtggatcatgaggtcaggagttctagaccagcccgggcaatatggtgaaaccctgtctctactaaagttacacaaattagccaggcgtggtggtgcgcacctgtagtcccagctactcgggagactgaggcagaagaatcgcttcaacccaggaggaggttgcagtgagctgagatcacgccactgcactacagcctgggcgacagagcaagactccatctctaaataaataaataaataaataaataatacataaaaaagaattctaacaatacagaagtatgtgacctggccaagaaaagctccctatttcctgactccactgcccgcaataaaataagggctcataggtttgtgttgttaaaagattattattattttttttttagaaaggcaaatcatgactctcatacaaattgaaaaagagagaagcagcccctgacaggtgggcacagcctggcactctcagttaggccttggtgttctcctgtggaacacaaacaatttcacagagtccacaaacaattgcagagcagaaacatcagacacagccactccgtccgggaccatgatggatttagacaagaataagaccagtctgtaaccatagaattgcccctggttcctgacaatatccaatccagagcaaagccccacttctttaaaccttcccccaaaccacaacacagacacagatccaaattaaacttttttaaaaaaaatttttagaattttaaagtttccttttttgagacagggtcttactctgtcacccaggctggagtgcagtggagcaatcttggctcactgcaacctctgcctcccaggctcaagcgatcctcccgcttcagcctccctagtagctgggattacaggtgggcatctacatctggctaatttttgtgtttttggtaaagatggtgttttgccatgctgctcaggctggtctccaactcctgggctcaagcaatctgctcgccttggcctccaaagtgttggggtttttaaatagaggtggggtcttgctatgttacccatgctggtcttgaactcctgggctccagtgatcctcctgcctcaccctcccaaagtgttaggattccaagcatgggccaccacaccaagccactttccaagatgcccccggggtgtgttctccagtgttgcaatgagtcagtaaagcccaactttgttagattacaggtgtgtttctcgtggtctttggctggaggacattgaaaaaatataaaatgaaaaattcccaagatttaatttaactcattaattaatgagggagtcagtaagagactgttttaaattttttttttgactttttttcaaatcccattacactgagcaaagtaagaactttaaaaaacaaaacaaaacaaaacagaacacttcaaataacagtctaaagagcagacagatacctgggcactaggctgtcagggaagctgaaatgagtgtctgaaagagggctgatttgtctgctgtcttttgcagttaaatagaaaaaaaacaaaaagggctgagttgcatctggaagggtatgctacacaacttacaatatttcattgaaaatatagctgcgggttgggtgcagtgactcacacctgtagccaaggcaggaggaactttgggaggccaaggcaggaggaacgcttgagcccaggagttggagaccagcctgggtaacgtagtaagaccccgtctctataagaaattaaaaaataaaaaattagccgtcatagtggtgcacaacctgtggtcccacctactgaggaggctgaggtgggcggattacttgagcttaggaggttgagtctgcagtgagccgtggttgcggtagtacactccagcctgggtgacagagcaagactctgtctcttaaataagaaaggatacctgctgatctatttttgcctgcttcacaactattagtgttaattcttctagcttgctttccatgcatatgccaacacacacacacacactcacttaaaaataggaattataccatatatacaacatgacaaattgcttttttgatttaatatgaaacaggtatccttcctcatcattgcatttagatcaacctcattctttttcctggctgcgtaggattccagcatgtgtctgaattgccttttacatagcccatttgatcttcacttggattgtttcctctttctgactattgcatgtcatgcagtaaatatccttgtatgtgtgcgtttgtgcacctgcagactatttctcaaggacagattctgagcagtgagtttaatattttccattttgccctctgaaaggccataatgctttaaactccaaagggaagaagctatttgaccattgccccttgtctctcctattctatgattcctctaatagtatcatcatctgtaaaatgggtagaatactttcccttccttagatctcatgtttcagatatatccttaatagcaggggtttagtctgtgaaggaacattcattacctttttgtaggctggtaagaaaaccatcttagatgatgaccagtggctctctgactgcagtgcaacagacagaaccggcagcattcaagccaggcatagtgatcctattcctaaagctgtgtccctttctttgcaaaggaatttgacctggacgtggtggctgtggtcaacgacacagtgggcaccatgatgacctgtgcttatgaggagcccacctgtgaggttggactcattgttggtgagtgtcctggaaggtctctttccctgcagaagggaaggctggggtttccccgttttgtggggccttggcccagcagcttggtcctctgtatggggtagtcttatctgtcagtatcatttcttgaccagctccagagttcagggctggacgaaggcagcagagtctctggcggggggaggtgggggggcctttcttaagacacccataatgctacacattgcttatgatcagactgtcaagaactgaactcttcaggaatgaggacccaaaaggctcacttggcttgagtggagacaggtacctggagcgggcctggcaaacatggcagctctatgggccttgtatggaggggctctggtcaggtattgcagggggatggggtggggagggagtctgcggctggaaaggaagtagagagcacctcccatgctgaccacacttagagcatggaaaggggcaggatggtcttgggcaccattttgcctttagcagccactgtgtgcgcatggtcccagccactgaagggggttgcagaggggttgtctctgcagctcgttgccttgtaatccaaaacacattaggggtctgggcctcgagcacataattcctgaagcatattgatttgggctatgaggaaaccatttgtcctgctggccctgctcctcgcgtcaggggatgctgggaaagaccccagggagtttcttagccaacatctgcggactctgcctggtgagtgagcagtggcacccctgctactggatcagttgctgagtgtctagagcttgggaagaggccccagcaggctgccttccaggtgccaggaagaacttttcattcattgttaagccacttttcgcttctgttgaaattttaaaaaacctagggagcagctgctggtgaaaaggttgtttggggcctggctttctccacccagcccctccctttctttccatgaatgggcttgggtatgaaatgcaaagctagagtgacacagcagctctcctcctcctgcaggccccaccttccctcctgggaggtcaggcccgcccgtttcctggcaccaggctccagctacatttcatagctacttcatagctactttttctttcctccatcaattgatctctttgctcaggactcccataggcaagatgtatggtttccatgttttggctttctttgcatctcccactcccatcatcttccgtttctggagctcctcttctctcagttttaaccttgggtgaaaagggggctgagaaaacaaagaacaaaaatcatccaactgtacagtctttgaactctacttaagtttcttcaaaggggatgaaaactaccaaagcccttttggtctggccagggggtgtgtcttgtgccctcccgatgaaagttcacctacatcccaccctggatgggtggatggtgctcctgggcgcatcattagcatcatcctgggagcttgttagagatgcaggctctcaggtcctggccctagcctcttgaatctggatctgcttcttagggtccccaggtgatccaggtgcatattaaagtatgtgtgtgaagcactcttcctgggttagttgattggtttttaaatgtccagtctattcagtgaggcaagttcagtgaccacaagcttggatatcatggcaattaaaattgctgtgaaagttgcaggatgcttgccttcagtttcttagctcctcatgggctggaacagcaaacagtcggtggtccttctattttgagtgactctgctctagggagttcaggaatggaagtcagagattcctgagcccctggcaagcatatgtcaggttgcatgtgtgcggtgtgtgggtccacccagagaaaggtgcctttttcacagaagaatcctctgatcttcaaaggtctgatacaaaaatgatgaaaaaccattgcttttgaaagccccccttgaaatgctgaagacactgtcctgccctgaactgtgggcttcatcccaaggtatgtaggaaagcttattgagcaggcatagtccacgaccaaccatccttgtcgagaaaagataagtggggctgggcgtggtgcccacgcctgtaatcccagcactttgtgaggctgaggcgagagggtagctcgagcccaggaatttgagatgaacctaggcaacatggcaaaaccctatctctactaaaaattttaaaaaattagccaggcatgatggtggtgcctgtagtccagccacttggaaggctgaggtgggaaaatcacttgagccctggaggcggaggttgcagtgagccaagattgcgccgctgcactccagcctgggtgacagagccagaccctgtcttgaagaaaagaaaaagaaaataagtgaatatctatggtatgatagaagataatcccctaatattttatacacatatatataggcatgtatatattgtatattcatgtgtgcatgatgttgtgtgtgtacgtatatatttcttcttctggtctgaatgttgcctaaacctctaccattgatgctccatctctttgctataaagccatcttctattaaaataaacataaccctgcctggacgggtgaacacattggctcttggttgaaagtcagctaagcaggtgccctctgggtgatgtggctcagactctccatttacatttcaaatttttccatttcaaaattgggaaagaaaaactattactttgttcatcacaaaaaacgtgccccctgcctgtggaacctcaggccccagaccccaggcccagttgcaagacccccaaatgcaaggccaccgctcctcattgccccctcgtgtgttccagggaccggcagcaatgcctgctacatggaggagatgaagaacgtggagatggtggagggggaccaggggcagatgtgcatcaacatggagtggggggcctttggggacaacgggtgtctggatgatatcaggacacactacgacagactggtggacgaatattccctaaatgctgggaaacaaaggtaaccccgcctggtggagaggacactcacagtcagggtgggggcagcacttggctgcattctgccacttgcagtggaagaagtttctaggaggagaggtctgaacagaggtttcaagactggaccccctggctcactcctgacctttgtcttttggacagcagagaaccagggaggacagacccccaacatggtacaagatggcccagggttgatgcctgtctaggggctgcctgtgactgttttttagcctggaggattctggccttccggtccccttgctgtgttcctttcccatcagaataacaagggggtggggtgagggtggctgggcggcaggttggtgtgaagcagaggccctgtcgcaatcgtcctttcctccgtgagcctcctgcaccacctagtggccttgtggagctttgcagctcaggtctcaggtaccatgtctgaaatggcagtgtctgccctttgtctcaagcccccaggaatcaggccatcctctgccacggccaggatgagttggtccaagttgtctccctaggagcagaaagaagggctggagcagcacccagcatgagtcactccctagccccctcaaggtttttgccttttctaaataccacccatgctgttatttacttagtgcttttcttcgaatcagcttacagttttttgtttttctttttgtttgaggtggagttttgctcttgttgcccaggctggagtgcaatggcgtgatctcggctcaccacaacctccacctcccgggttcaagcagttctcctgcctcagcctccccagtagctgggattacaggcatacacaaccatgcccagctaattttgtatttttagtagagacggggtttctccatgttggtcaggctggtcttgaactcccgacctcaggtgatccgcctgtctaggtctcctaaagtgctgggattacaggtgtgagccaccgcaaccagcccttatagtctttttcttttcttttcttttcttttttttttgagacagagtctcaccctgttgtccaggctagagtgcagtggtgcgagctcagctcactgccacctcctgggttcaagtgattctcctgcctcagcctcccaggtagctgggattacaggtgcacggcaccacgcccagctagtttttgtatttttggtagagaccaggtttcaccatgttggtcagactggtctcgaactcctgacctcaggtgattggcccgcctcagcctcccaaagtgctgggattataggcgtgagccaccgtgcccagtggcctttaaggtctttactgacatttaatgaaggaggaaaaagaggaagaaccaatagtaccataaagagatggtaactaaaaaatgagtatagtgaagaaccgtgctattcaagtctagctgatgctgtcgcctaccaaatgacctgaactaagaccccctttgggctgagtgcagtctatcatcaaagtaatcccagcactttgggaggccaaggtgggaggattgcttgagctcaggaggttgagaccaccctgggcaacatagggttgagaccctgtctctactaaaaattaataacaataataacaacaataatagtaagacccccttggttaaaaagcggggggatcagcaagtgttggaaggggttaaggacatgtcagcaccaaactggggtggtctttgtggtggaatgagaaggactgggtgggacttcgtagtggtggcccacccctctgtgattccattctgtttcatgttcttccatggaccacatgaaataggaggaatcctggagttccaaattccaggggactcttctcagctttgggacactgggcttgggcatgtgccatggaaatgaatcaatcctttgttatttcttgagatccttgagcatggagagggcaggaaatttgaagtcccaagaacaggttgacctccagtgtgttgtggtcactgaattctccctcctgtgtggcctcatcactctgctgtgggcttgaccagtactctgggtatttgcaaaacctttagaaaaatctagaaactttccttttttttgtcttcttgttcctttaagacttagcccagtcatttgcttattctgcagatagtttttgggcactttcctgagggcccagtgctatgctatgctgtgctgtgccctggggactcagagctgaaaaagacacacatgccctgtcctcttggggctgtcactacagcagtggtggtgggaggcagtgagctcaggtgtgttgtgaaggaggagaatggtgaggtgtgtgggaacctgaaacaggcaggtagaacccaggatcaggaggaggacaggctctcggggaagtgaccttggggctgagagctatcaggcagctgaggagggagaccagtctagcaggtagacatgaatgctggtggttttgtttctgatgtgagagagtggaggactccctggtccttcctggtcctcccactctgcctctgcggcagagcacagggctgggcacatggctgttgatgatgcgcttgaggggcagtaggagacgcggagtgaccgtgagaccgaggggtgacagttctcctggccacttcccatagacaccccaggcccctcctcctgtctcaggtatgagaagatgatcagtggtatgtacctgggtgaaatcgtccgcaacatcttaatcgacttcaccaagaagggattcctcttccgagggcagatctctgagacgctgaagacccggggcatctttgagaccaagtttctctctcagatcgagaggtgagtgggcagtgtcttccctgccagcgcccacccttcagaggtcgcctggctggtggattgtgatgggggtggtagggaccctaggggacattttggccatttttgaggattttttttcctctggaatagcagaccctgggcatttgcatagtgaaatcttataattttattataaattacttttcttggcctggtgtggtggctcatgcctgtaatcccagcactttgggaggccgaggcaggcggatcatgaggtcaggagatttgagaccatcctggctaacatggtgaaacccgatctctactaaaaatacaaaaaattagctgggtgtggtggcatatgcctgtaatcccagctacttgggaggctgaggcaggagactcacttgaacccaggaggtggaggttgcagtgagctgagatcgcgccactgcactccagcctggcctggcaacagagcgagactgcatctcaataaataagtaaattacttactttccttttatccatcctttatgttggggcattatattgatttatttgaaattatgtgtgtaagagggccatatggattccatttcagatggtaaagatgcactacacatacttgtattgggggtgcatagggcccacctggatttatctgaaaggcagcctggggttcagtgccaggccacccaggagctgatgcccctcagcaagttgttccaccttctttctacttttctcctgtccagggtacatttcttcctggcctttgctgtcttctaaggcacgctgtgtgagaaggaggaaaaaagggtcagaaaaaacaaaagcaattgtgcaaatactgtgttcttcttagaatggtcataataacctaacgtaggctctgtgtaggctgggcacggtggctcatgcctgtaatctcaacactttaggaggccaaagcaggtgaatcacttgagttcaggtgttcgagaccagcctggttaacatggcaagaccccatttctacaaaaagtgcaaaaactagccgggcgtggtggcacattcctgtggtcccagctatttgggaggctgaggtgggaggatggcttgagcccggtggcggaggttgcaatgagctgaggttgcaccactgcactccatcctgggcgacagagacagactctgtctcaaaaaaaaaaaaaaaagagaaagaaaagaaaaaaaatattaaaccttaaacaaaaaaaaacctaacaagcctatacactgctcttacccaggcaaaatggtttttaagtatacagttcggtgacattaagtacattcacatagtcgcacagctatcaccaccatccatttccggaactcttttcatcttctcagctgaaactctgtacgcagcaaacactaactccacattcctccctccccccaccccagcaaccaccattctactctctgtctctatggatttgacaactctggatacttcatataaatagaatcatacagcatttgtcctttgtgactggcttaattcacttagcataatgtcttaaggttcatccgtattgtggcatgtgttagaatttccttatttttttatttttattttttgagacggagtttcactcttgttggccaggctggggtgcaatggtgcaaacttggctcgccataacctctgcctcctgggttcaagcgattctcctgcctcagcctcctgagtagctgggattacaggcgtgcgtcaccatgcacgcccggctaattttgtatttttagtagagatggggtttccccatgttgatcagggtggtctcaaactcccgacctcaggtaatctgcccaccttggcctcccagagtgctgggattacaggcatgagccaccacgcccggccataatttccttatttttaaggctgagtgatattccattgcatgcacacactgcattttgtttattcattcatccatccatggacacttggcttgcttccaccttttggatattgtgacaaatgctgctgtgaacacgggtgaccagtatctcctttcagtttgtgtgtgtgtgtgtacgcaccccaagtggacttgcgggatcatatggtaattccctgttcagttgtttgtggaaccaccatgttgttttccacagtggctgtaacattttacattcccaccagcagcccgtgaaagttctagtttctccacatcctcgccaacacttgttattttctgagttgagaatagccatcctaatgggtatgaagtggtatggaaagtcttttcaagcataatagcaaagaaagaaatcataaagaaaaatggccaaatatagctacatagtgtctgtaagtaaaaaaaaaaagtaatcaaacttaaaaggcaacggtaaactgaggaagacatttgtactgtgtatgacaagacgcctagcagggcatggtgggctttggcaggtctggtctacacctgctcttctccaccggctgtgtgctttgcaatactcaatttctcccagcctcagttgccttatctttaaaatgggaataatcatacattcattggttgtttgaggagtaagtaaggtaatgtatgtaaaatatatgttacatggtaagtcctccaagaagcctggctggtcttcattgtaccatcccagttatcgtctctttcaatttaatataaataagacaaatatatcaggagaaaagtcttgagacgtaagaagtagtttatatggccaaaaaacaaatggaaaaaaaagagatcatcctcactaatagagaataatataaattgaactacagtcttgtgatgccttcttataaaactgtcaaaagttgtaaaaaaatgctcttttccagtgaggataagtgtggccaaatactctgctgaagagtaaatggatacaattttctgtaaggcatctggcaatgtgtagcaaaagctcgttgacccagaaatttatcctaaggaaaaacatcagaattgcacacaaagatttataaacaaaccttatcaaaatgtttctttataatagcagaaaattgcaattaacttgaatttctccaagctggctaaagaaatcatggtgcatccctagagggaatactgcagcagctgtttccaatcctgttctcagataaggctgtgggaaattgctcaatgcatgaaacaggaaagagaaagaaaatcacatatcaaggataatcccattttgcatatcatgagaagcataccagctaggaaaaataaactggaaggaaatatattaaaatgttaatagcattttcctagatgttgagatagtgaatggtttagattttccaatttttattttgctagatttgccaaattctccacagtttaacatgtaacacttgcccttgactctgtctgtggatgagtacagtgattgggggcggggggcgtcctttggacgtggtctccaggctgctcttgtgggtcctgcttcatccagccctctggctcttgtcccccacagtgaccgattagcactgctccaggtccgggctatcctccagcagctaggtctgaatagcacctgcgatgacagtatcctcgtcaagacagtgtgcggggtggtgtccaggagggccgcacagctgtgtggcgcaggcatggctgcggttgtggataagatccgcgagaacagaggactggaccgtctgaatgtgactgtgggagtggacgggacactctacaagcttcatccacagtgagtgggccttccagttgggatgcgcagagcttgctgggatccctttgggttagggggtatcagggtgtggtttacgctggggaaatgccctgcgggagcccagccaggctgaaggctgtgcgttcaggagctggggattgtctaggacaaggtaatgaacagtttgtagggtttgactgggatccttagggagacagagaagtggcttcacttggccagctcacaccagtggcatgatgtgaccctcaccccactcctcctggtcccccttaggtgggggctaggcagtgggagaggaggtgagggtgggcgtgggctcactcataagcctggtgagctgtagccaggccagaggctctgttgggtaagtggggagaggatattaagaaaggggaggagctgggtgcagtggttcacacctgtaatccagcactttgggaggcctaggtgggaggactgcttcagtccaggagtttgagaccagcctaggcaacatagtgagaccttgtctgtacaaaaaaattttgaaaattagccagggatggtggtgaatgcctgtagtcccagctactcgggaggctgagggaagaggattgcttgagcctgggaggtggaggttgcagtgagcccagatcacgccactgtactccagcctgggcaacagagtgagaccctatttcaaaaaataaaataggaaaggaggatagccactctcttgttcatctgctgaatcagtttgctaagacttggaagggcgggagcggtttgggccctgggcttcatggcagggaggggtagggagtggcctccctctggtcaggcatctgaccccccatgccagagaaggacatgtgattgcacttgctgtgtgattgtgatccaccgcatgtctcaccttatgaatagggtgaccatattatttatttattgtctacactagggtactcttgccagtcaagagtgctaataattattactctgggactgtaggcaaactaggaccatcccagataaatgaggccatagtgtcaccctacttataagcaacctcacccgactcagtgtagacattacctgcttacctcatggccgtggcttggggtggaaccatctgtcttgctccatcctcacctctgtctctcccccttaatagctgtccttgccatcagctgaggcagcacacaggagtggtttagagctaggctttggagccacatactcttggatttaaccctggcaccgtcacttagaatctgtgtgcaattgcttaatccctgcaaaatctcatcttcctcatgaggtggcagccactggcaggactagaaattagagctgtaaaatatggggcacctagtaggtcctcaaactccttggctcaagtgatcctcccaccttggcctcccaaagtgctggcatgagccaccgcactccgcccacctaataggtccccaaccaaggacagtgactacttttgagagcccctcaccacaagcatcttcagcctggccctgcccttcattttgagcccaacttacaagcatgtagattcagcctttgttcagatactatcttcactggaaggcattcctgtctttgggggccaggctgttgatggtggggcgctgggggtctcagggttgcagctggagatgggtgatattcattcctgcatagcctcctgaaccgatccagtgcttggctggcttgcacctgccttaatgatccatgtcagcccctaacatcctccttggttttgaggtccccctggagcctcaagctccgatgtgggtgtgtgtgttattcatgtcctagccttcataagccatacagagcagttgtgtttggattcgcagttgggcctccctgctgaaaactgtgacaatgggattgaccgtgggcccactttcctcccagccattctcaactggccacagctgcttctaagcagcctgcctcccaaccatgttcaccctccttgttgttgggttcagagtctctttgacttccgatgcttatgtcctgataaacccatcacaaagtcgaagaatcctaagtcgaatcatcaccagtcagggggctgtctgtgctttggtgttttcgggtaggcccagcgtctctcatcttcctccaactaccttctgttttctcgtcctttttagcttctccagaatcatgcaccagacggtgaaggaactgtcaccaaaatgtaacgtgtccttcctcctgtctgaggatggcagcggcaagggggccgccctcatcacggccgtgggcgtgcggttacgcacagaggcaagcagctaagagtccgggatccccagcctactgcctctccagcacttctctcttcaagcggcgaccccctaccctcccagcgagttgcgctgggagacgctggcgccagggcctgccggcgcggggaggaaagcaaaatccaactaatggtatatattgtagggtacagaatagagcgtgtgctgttgataatatctctcacccggatccctcctcacttgccctgccactttgcatggtttgattttgacctggtcccccacgtgtgaagtgtagtggcatccatttctaatgtatgcattcatccaacagagttatttattggctggagatggaaaatcacaccacctgacaggccttctgggcctccaaagcccatccttggggttccccctccctgtgtgaaatgtattatcaccagcagacactgccgggcctccctcccgggggcactgcctgaaggcgagtgtgggcatagcattagctgcttcctcccctcctggcacccactgtggcctggcatcgcatcgtggtgtgtcaatgccacaaaatcgtgtgtccgtggaaccagtcctagccgcgtgtgacagtcttgcattctgtttgtctcgtggggggaggtggacagtcctgcggaaatgtgtcttgtctccatttggataaaaggaaccaaccaacaaacaatgccatcactggaatttcccaccgctttgtgagccgtgtcgtatgacctagtaaactttgtaccaattcaaagacccgagtgatgcttaatggctggggacggggggacaggcagaggggggtgcagtttcttgggatgtggcaaagaccaaacactggggagttttgtggccttctgggcggaggagtttttttttttgagatggagtcttgccctgtcacccaggctggagtgcagtggcacaatctcagctcagtgcaacctctgcctcccgagttcaagtgattctcctgcctcagcctcctgagtagttgagactacaggcgtgcatccccacacccagctaatttttgtatttttagtagagaaggggtttcaccatgttggccaggctggtctccaactcctgacctcaagtgatctgcctgccttggcctcctaaagtgctgggattatagaacaaggccacttggcttccaggctgcttgggttcagtgagaggactgcaacactggtcccctctctgccatccccacccggatcctgcccttcatcttcctctctgccaaccccaagacaaaggatgaaatgtgctctgccccacccctcccctccctctctacccaaacacagatgaaatcttgaagcagcccaggctggctgcacgctcccgctcccggatcttttttctttattttttatttttattttctgtagacagggtctcactgtgttgccagggctggtctccaactcctgagctcaagcaatctgcccccctcagcctcccatagtgctgggattataggcgtgagccatcgctcccggcccaccccttctggatcttagattgacctcatccctaggaaattaacccttgtctgaccttttactctcccttcccacccccacctcaagagattcctggtctatccccaggctaccattttggattctcccccagccttggtgggttccatgtcactctgcacccaagcaccttgtgatgtcccaagccacagctgcggctctaagtggcttcctgcgagaccgattgccagaccacctggtttggtgagatcagagtccctttattaggggcatggtgctggtgtctacggagcagtgattttttggagaacacagataacattacaccttccagtgtgcattgacaatgttacatggctcttctgcaggggaaccagggcgtggaggctgagttggcaagcaggaggtgtgcccctgggatgggctgggccagaccgggagctttctgggagttgggacagttgctgctttctgccctctagcttcttgctgcagaagtgggagtgggagctgtgctgctgctttgtaggtggcttttgtgtgaaatagttaaaagtcatggctaacagccaggtgtggtggctcacatctgtaatcccaccacttcaggagacaggcaggaggaatggttgagcccaggagttcaagaccagcctgggcaacatagcaagaccccatatctacaaaaaacttaaaaactagctgggtgtggtggtatgtatctgtggtcccagctaca

SEQ ID NO: 254 - DNA, 8657 bp, Homo sapiens
  source 1..8657: mol_type = genomic DNA
agagctggagggcgggaggagggagagagagagggagagggagagatcttagtgctggctgatcagaagtgattgataattttccaggagaaagtcaaaagcttaaaaggatagcatctgcatcaaggggctagagaaaacaccagaaattaattttataagcccaaaccctgaactcgagataggcatggcaagttcacttgcttttctgggtttatttggtgaggagccttcgtgctgaagggaaataaaaatgtcacagaatccctgttaggagatgcttattagggcaatcgaaaacaaaagttttcgtggtttcattattcgtattattttattttcttcctgaaaatgtgcaagaacagctcatctgggtggcctgtggtttgtttgggagaggggtggggaaattcattctgactataatttaaagagaagaaattcttaaaatagatatgtcgatgttgcacaaaacctccaccaccactaccctgcgttctaaagacccaaggcacgaatggaagacgttgaccaccacgcagctcctcctgcaaccaggcccaaggggttcctggggaagctgtcacagaattgaaagcagtattgaaccccacggaaatctgctcttgtgggcacttgcaaaacaacgaaccccacgtgatccggagatgtggtggaggggtgaggctaacatttcctacaacctcctgcaaaggatggaagcgcgtgccgctctcccgggtttcgggaggcagcctgttttgtagcctctgaggctccggggaaaggtttggctgcgtctaagagagacgtttggagccatccgtcttattttgtttgaaaagtcactcgttcaatttgtcactgtgtgacagctcagaataaaaccaatttgcggccgcccctcctcctcgcttcccggaggatctcctgggaggcacgaggcggacgcggtgctgagttgggccgggactcagggcggcaacatttgggcaagggcccaggaaagatgaggggctttgccgaggacacggactcctggaataaaagcagaatgaggtcaagagaagggaagcaaaggggccaaagcgcgctccgctctccaccgggaggcgggctttgcagagccctaaagagtgagattaccgtcccttccccacgcccccaactcgccccgggtgacaagcgcttcaggaaagctcctgtgatcaaccctccttgccccgtggcggttcggagctgcagaagttagaagagagtcagagccctccggagcggctgcctggcccctacgcagagtagcaagaagcactgcgatgtgcgctactaagcccacgcggccgcagcaaaaactttggcgtggccggggcgtggctagggtccggccaggcccccttgttcctaattcccctccactccccgctcccattggtcacgaggatgaccaatgagcgctcggatcgaggtcctaccccgggcctgactcgaaagctcctgccaaaactttgggagtttttagagacgagtttttttttttttctattacttttccccccccctaactaacggactattattgttgttgttttaaatttagctcttagggcttagctatttgggttttcttgcggtgtccggctcccgtctccctggctcccccgcccgccctgcggccccagcgcccctcgctctcatccagcccgcgaggagtgcgggcgccgcgccgcctttaaagcgaggccagggagcgaggcggtgaccggccgagatccggccctcgcctcctccctcggtggcgctagggctcccggcctctcttcctcagtgcgggcggagaagcgaaagcggatcgtcctcggctgccgccgccttctccgggactcgcgcgcccctccccgcgcgcccacccacccagtccggctggactgcggcagccgcgcggctcaccccggcaggatgttcgcagccgggctggctcccttctacgcctccaacttcagcctctggtcggccgcttactgctcctcggccggcccaggcggctgctccttccccttggaccccgccgccgtcaaaaagccctccttctgcatcgcagacattctgcacgccggcgtgggggatctgggggcggccccggagggcctggcaggggcctcggccgccgccctcaccgcgcacttgggctcggttcacccgcacgcctctttccaagcggcggccagatccccgcttcgacccaccccagtggtggcgccctccgaagtcccggctggcttcccgcagcggctgtctccgctctcagccgcctaccaccaccatcacccgcaacaacaacagcagcagcaacagccgcagcagcaacagcctccgcctccgccccgggctggcgccctgcagcccccggcctcggggacgcgagtggttccgaacccccaccacagtggctctgccccggccccctccagcaaagacctcaaatttggaattgaccgcattttatctgcagaatttgacccaaaagtcaaagaaggcaacacgctgagaggtaggtcttgggcgggaggctgcaggcctctgaccactgacccactccccggaccccgggctggcttggggtgcctttgagtgtttttacaattaaggacaaatcggtaaaacgggagagaagaaaacgaattgtaagaaaactacaaaacattaggtctaaaactcacctgttctatgtaaaacaaacaaaaaatgactccagggattctttaaaaacacgtcttagaatcaatatttataaaagtggttggtgtaattatctgctaacatgactttgatctctttaataatgtatctagagacagaattatattttctgacagctaaagcatttttgggaaacactttcgcacttatctgatttctagtaaaaatttcacccaggaaatgtaaataataaacaaaaccgcctagatgagcgggcagagtggggccaccttggggcggaggttttgcgtctgtggcgttcttggaagacacgtgaaagtgaggccgtaagccgatttatgtaaagcctttacttactatatacatgcatatggacgtgagggacacacaggaacttttcgtgcgtcgctccttggcaactgttgggagagagaggtttcagcgcctagacgggttctctcttgacttcgctcaataaaagtgaatccagggcaaggggaaggggaggaacaaatcagcggagagtgtgagtgtgcccgagatgtaacctgctatccttttcccttgtccccagatctcacttccctgctaaccggtgggcggcccgccggggtgcacctctcaggcctgcagccctcggccggccagttcttcgcatctctagatcccattaacgaggcttctgcaatcctgagtcccttaaactcgaacccaagaaattcagttcagcatcagttccaagacacgtttccaggtacggaaaaactccagagtactgcctaacgggcgagccgactaacagtcagaaatctcaggactgacgcctccagggctgccacggtgtcgcaatctcacaattggggcgggaggctacggagtcaggagagagaaaccgaaagatttctcagcgagctagcgctcgcttcggatggttccccttgaaaaggggtagaggcgcctggagatcccagaaagtgtgtgcgtggacggtggggtggggggctttctcgaagtcttttcgccccagagggcttgaaaaatgcagcatcaatgttgcttattagcatatacacattttgggatgacctcaaacacttgtgcttggcgagtttatgtctgggtgcctggacacatgcgggaataaacacacacacacacacacacacacacacacacacacacacacacacacacgagataattcaattcagggctgtcatcattcaggcccaagggacatttttgtctactcttcgtaggcctgatggccacgcatgaggtttatgtttttctcttggaattaaaggacaagccgccaggcttctccactccacgctcgctttaggtcttccgactgtcgtgtaaaattcctccttagaggggccattcggtgtatgtgcgaagggctttctgaatgagggtggaatcgacagttaacacgaaacagtttcaagccttacggggacccccaggctggcaggtcaaggactggacactgaacggccctcttgtctttcttccctctggctcccgttctgcggcaggtccctatgctgtgctcacgaaggacaccatgccgcagacgtacaaaaggaagcgttcatggtcgcgcgctgtgttctccaacctgcagaggaaaggcctggagaaaaggtttgagattcagaagtacgtgaccaagccggaccgaaagcagctggcggcgatgctgggcctcacggacgcacaggtaaggcagttctggctccagcgcacagcgccctcgggcgggcagcagcgcacggcctagtctggtaggtcccctccatcccggccgactggcctcctgcggtgcaaacgcaagatcttgactttcaagaggctttgtggactacgcaacttgaggcaggagaagaggagggtggagatggggtgagggagaaggaccgagagaagagctcatccccaagatgtgtgtcaacaagcactgcatgtttattttggccaacaggctaaagaaccacggagaaagcaaaagggccgctggaaataacactgatacactcaactgtagtgcaattcgctgtaggaggcagtttatttcagaaaagataaaaacccaaaggcaagagattgttgttgggtttttttccctctcaccctccctccttcctcctcctcctgctgcttctgctggattgtgaaatccccagttgtgaggaagtgaaaatataatttcaaacggaattagttagctccaggagggcagggagtctgcttggagtggccacacattacaaggcttaggctctgaagaaaatctgaaggaaggggagaggtgagggaaagaaagaaagaaaaatgattctcttagaatacccaagagcatttcagcaggttctgcctatttgaattttttcaagacaataggaaatgtattgtggctgaaataattttattctttttcttaaatttaagaactgggcttccccaccccccaccacccgagctttgactgtggaagagtcactcttgtgcaccccatagcactggctctggctctggggtgctgattttccccagcaggtcagaagccagaggcaggcttctttttcttagctccttggtccccaaattgctgtctctgtttctttctgacctccattacacaactcttctccccagtacacacacacacacacacacacacacacacacacacacacacacacacgaggagcccagccgttttccaccagctgtggatgttatttttaaaagggaagctggaacttgtgtgaatgcgttgggtcccccaggggatcgtatatatctgtatagattctctgccccatctctatccccttccttaattttgcacacatttaattccattgttttctgagcccccaggagaatttgtttatccttaacaggggcaaggtccttatcagctcttgcgtacaaacacaccaaagaaatgctgtcttactgaaagcccaacaatgcccccaccctactgtgattaacagtttaaaacccctttccctttctgcttcccatgtttccttttttgaaaaaagtattgctttgggtagtggcagtagaggagagggccaacttagagcaggaattcttaacactggcacaccaaacccttgacattgtaagcaatatcttgggcatatgtgtatttttctgggctaggagtccataactttaatcagattctcatgggggtcctggcataaaaaaattacatggatttagagtagagagagagtatgttgggggtcgggtgcaggaatctgcctttccaacagtcactcaggtcattttagtcctggggcctgagggttgcattttgaaaacggtcttagtgggttccctaggccaggattcctggcttcttgtgttcccctgggctgccccttggctcctgcgcctaccacagtgtctggtccttggtagagtcgccaagtaagcgttgctttttcactcagggaggtggcttgagggtgcacgcgagtcggataggagcaaacctgggtctcatctcggtgtctcttcttgtctcccggtgtggcgcggcgcaggtgaaggtgtggttccagaaccggcggatgaagtggcggcactccaaggaggcccaggcccaaaaggacaaggacaaggaggctggcgagaagccatcaggtggagccccggctgcggatggcgagcaggacgagaggagccccagccgttctgaaggcgaggctgagagcgagagcagcgactccgagtccctggacatggcccccagcgacacggagcggactgaggggagtgagcgttctctgcaccaaacaacagttattaaggccccggtcactggcgccctcattaccgccagcagtgctgggagtggtgggagcagcggcggcggcggcaatagtttcagcttcagcagcgccagcagtcttagtagcagcagcaccagtgcgggttgcgccagcagccttggcggcggcggcgcctcggagcttctccctgcaacacagcccacagccagcagcgctcccaaaagccccgagccagcccaaggcgcgcttggctgcttatagactgtactagggcggaggggatccgggccttgcgtgcagcctcccaaccatgggctgggttttgtgcttactgtatgttggcgacttggtagggcaggagacgcagcgtggagcctacctcccgacattcacgcttcgccccacgctgctccgactggctgcagcggacactgcccaaagcagaggggagtctcagtgtcctgctagccagccgaacacttctctccggaagcaggctggttcgactgtgaggtgtttgactaaactgtttctctgactcgccccagaggtcgtggctcaaaggcacttaggacgccttaaatttgtaaataaaatgtttactacggtttgtaaaggccgcttggctttgctgggggttgttaaggccagagatctacaaccggaccttagtcccggggacactgtagaatgcagcagctgaaggtggtggggctggagtttcaggggaagtggctcaacctcagagccatcttgttacagacatcagagatgggcgtctgggtttagaggcttctaattaagagatttctagcgccaactgccactgaaagtgccctctgagaccctgagtagcctgagagtggagcaggccatagaaactgttaggccagtgcaacagatggtttccccattcacagtatggacgaaatgagttcctagagtactcagagttggaatggggaaggcagtgatgccaggcggggtcaatctaggcacagctgtaatcactatgtggacgcgaagcgcgggcccagagccctgcacaaacttttccttgttccgggatggggtagaggacaggtttgcaatgttgctgaggaaaggacagacatgacacagtggttagagctggaagcttgggtcttagagtgccagggccctggttgtaaacatgccaaacaaagaggtgacttcttcaaggtgaagcagaggcacagcccagatcagaacttggacttcctggcctacatgtggccacggatagaactatgaagttgcatcctccattccctcatccacgcaaaaattttcctttgcaatttggccactggaggtgcctagatgagctctttctccccaaagctgctgagagtcgtgaggcagtttccccatcccactgcagctggaaaatatgtagtaaaccttgacactgctactaggatgggcaattcaaagattttttgtttgtttatttcttttaaaggtgaaaagttaaacctctctccaggacctgtcctcctgcttgtaactgtgaaatgtctggagttgctaaaagctctttggggggattttatagcaaatagatttctttgggaaatcctgatcagtctcagtgccaatctcttcggcactgagcaagtgaaggacacaaggtctctggcagacccagcatccaggcggggtggccagttctcagaatgagttgaggagaggtgctgaagtcagagagcctaggacacacctcagtcccttggccagagtgggaaagttctcagcagtcctctgtcttgcttatctcctccacttttagacattcccctggagctcattccaggatctctgttctcgacttttccatccaggggtgaagtagaggcagcagattgagccttcttacacttgcatagccagatacaagatacagataacaagtcccaaagccaacacatggatgcaaagatgatcatttcctgacccagccaaccccctaagtccccaaatcgagatgattcaagagcagtgagaatggagtaggggcagaatgatcagagatgtacaatttagtcaagagaaaagaaagagcataccacaagggaccccatcttcaatagg

SEQ ID NO: 255 - DNA, 145634 bp, Homo sapiens
  source 1..145634: mol_type = genomic DNA
aaaccctcagatgtaaatgtaaaaaaaaaattcctttccttaaaaataaaatctaaccatttaacattattttaaaaatatatgagaatcctttttgaatagtaaaagtctcaataatttcaaagattacaacaaattttaatgtttcacctacagaaagtatacagaattctgaaaaattaaatacagcttccaaagaatgaaaatatataaaattgatttaagtagaacttgatacaatatttgttttatacccttgttataaattcaaaaggggtcaaatagtctaatagcaaaatgatagcagcctgaaaacaagtggctgtatattcccccacccccaatttttctgtgcttctcttatattcaaagattaacgcaaaaacaaaattttggaatctgctctttgctgacctctgtacacgttaccaaaaaaaaaaaaatcctaggatataatgaggtatacagcacaaaactggctggctgaactcctcagtgactcccctgcattcaccttcagaatttctctctactcctggcaaaaagtgagcaaacaacacaaacccaaaaacctattttgtacgtgtatgtgaaatgtgcacaccacagtgcaaatatgtgatagtttttaaatgtgcacgattggcagttaggaaatgtcactgtaatcgttaggtgaaacttcaatccctttgatgaagataccatctttgagccaagccctgacagaaaacctttggttcctgttagacccctccctccccagtcagctgctgggctccatccggagggatggaggctctctctctccattacagctaagcgttcccagacccagcagaaaccctgggttcctgcagagcactcaacgtgcagcaaagtgtcccagctctgcaaagggcagctggaaatggatttaaaatggcaacgcggaccaatcagcgctgccgcgccaaagcagacatttacacgcgcctcctccacatgcacagcggaacctggcggtgcctaactcctgcttagggctgcaaagtaggcgtttttattccacggtggtctgtatctttgaaaaaaataaattcttccccaggtgaaagtttttattttggaattagtccaaaataattttgggtgtgatgtgtgaaaatctgaacctaattttttcagagttttgtgttattcaaggatgaaaagaggtacatttaaaaatgtactccaccttttaaaaacggactgtggccattatggtgttcacataactcagaacagcccaggccataaaattaggacttggcagaaagagagttctcaggcagaaggttaaatcgaggtaaactgaagggagagttgggcagtgagtgcaattgtggtgttaggaatctacaaggtgccctttaccctgggaacatcggattcccggggagggggatggggagggaacttcggttgcctctagtctttcctggagaaaaaagttcaatgaagaagctggggcgctctgtgtgtgcacattgtttgcatgtgtctgcgaatgtgcatgtctatctgcgtgcctgtgtgtatgtgtgtgtgtgtaaatgcgggtgtttaccagcgcatgaatgcccccgtgtccacgtgtatctgcgtgcatgtgcttacacgcgtgttcgtgtgtatctgcatgcatgtctccgtgtatgtgcgcgctcgcccgcccgcaggctctgtggtgagggcattccgaggcggagtacggctgtcaggggacctctcccactccactgcagtcccttcccactcacagtgaaccggtgcgctgcctgaggtgcagcctagacgcttcctgcaaagtgttggctcggcacggtagaggcgcaggtaaaggccaagccccgaaacgtggctccgggacagtcacgttcccgcgccttcccaggacaactgcccaggggtgacctcgagaggcgggtggagctaggcccacggcgagccagcccgggatccccggcctgtccctttaaccccgccgccgggcgggagcacgtgagcggggctccgggtggcacccgggcgccgccgccgccgaggcagttgtatttcgaacgctgcctctggctagcagccaggcgccttggctcggcggtccgcctggcctccctcctcctcatacttttcttcctgcgcaaccccctcccctttatccgcccacgattagaggtgggcactccccccaccaccaccccctccccaagcgcaagcgcgtgcacgcacacacaccacacacactcacactcacacacactcacacacactcatcccacttgaatcttggggcaggaactcagaaaacttccagcccgggcagcgcgcgcttggtgcaagactcaggagctagcagcccgtccccctccgactctccggtgccgccgctgcctgctcccgccaccctaggaggcgcggtgccacccactactctgtcctctgcctgtgctccgtgcccgaccctatcccggcggagtctccccatcctcctttgctttccgactgcccaaggcactttcaatctcaatctcttctctctctctctctctctctctctctctctctctctctctctctctctctctctcgcagggtggggggaagaggaggaggaattctttccccgcctaacatttcaagggacacaattcactccaagtctcttccctttccaagccgcttccgaagtgctcccggtgcccgcaactcctgatcccaacccgcgagaggagcctctgcgacctcaaagcctctcttccttctccctcgcttccctcctcctcttgctacctccacctccaccgccacctccacctccggcacccacccaccgccgccgccgccaccggcagcgcctcctcctctcctcctcctcctcccctcttctctttttggcagccgctggacgtccggtgttgatggtggcagcggcggcagcctaagcaacagcagccctcgcagcccgccagctcgcgctcgccccgccggcgtccccagccctatcacctcatctcccgaaaggtgctgggcagctccggggcggtcgaggcgaagcggctgcagcggcggtagcggcggcgggaggcaggatgagcgcacgcggtgagggcgcggggcagccgtccacttcagcccagggacaacctgccgccccagcgcctcagaagagaggacgcggccgccccaggaagcagcagcaagtcagtacgagggcgcggtgggggcaccagcccaccccgtccccactgccggggcccagacacgcgcggggcggccggagtgcgggagcccagtcgccgcggccgtcgcacactgcccgccggccggccggggggagcggcgcagaccccacgagtgcgccgcgcggccccggggcgccagcaaccctccgggcggggaggtggggagccgcggcgggcggcccggggaaggcgggaggtggggtcgggcgaagcgcgtcctcggactttcgctattgtgcacggccccgagtggcgcggtgtcgcccagtgactggaagcgaccgggatccgacaaacccgggctcgcaggcgctttccgagttgcttttgcaactgcccgggaggaaggaggtgccggggacccgggcgcttcggccgatctgggctgaaggggctagagtcttgggggccggaggctctttctcccgcctcccggggctgctcgcgggtcgggggctggcgcgccgcagccgcccccttggcgccctcctccaagctctcggtggcccaagactcgcgccctcccgacaaagaacgcatggagacccggctgcctggtcctttttgggctctttaaatatgcggcggccgccggagggagcccggggcaggggctacggggagcctggttccccgcaggacggggttaactcgcccagctaagggcgcgttgaaaggagtgtccaagagagtgcagggtagccagggtcgcttccttgtcaggggcccggtcccccttttgcccctggatctcgcgcctcagagctgcagccattaaatgctcttctccaaggccagtggccgggggttgagtaggggacgatcgaggggcgcccgggaccctgcggagtggagggttttgtctgcggatgcaaccaattaagcgtgcagccggcgcttgcagagctgcgctcagcgcgcagggctgggggttttgttcgctgtaatttccaagccgcggcgggcagagttggagcgggatatgtctattgagaacatttaaactccactttctcgggctttaaaacttgctctctgcttagtcttaaatcgcttccttcatggcaaacacgccgattagaaaataatcctagagtcccaaagttgtccgagagcaaggtggggaaactgaacaatgtttgcttgccagtgcattttagaaaaattgagagttgtacctttttgaaatcatcaaaggaaacaagccgatctagaggcccctgagttttcccgctctgcccaagcgacactttacaccgcatttgaatcctgttttacacctcccaggaagtctctgccctcccccacttgtttcccacccgccacccagttctaactcactaattgccccccctccaaaaaaaaaaaaaaaatccaaaagaaattacaatggggtctggaggtgattggatactttacctttgagttaaggcagagttcacaaagaaagaaaaatttgtctccgatgtgtttgctctcgatgtgcccactggtgctagtggtcccacagaagcttgcagggaaccttcccgaattctctaaatgggatgcgaattttcattgaggacgttcatgggttttaagttaattagtctcacttaatcaccgaatctgaatgaaatgtgaatagatgattcactggataaatatttgggatctggaatattaatcatcgcattctcttaaccacttgagtatttactacttggcataggagccatttaaagttttgctaaaccaagtgattgcttccatttctcattcccagacactccattcctcctcgcttttacctccttttagttttctccactccacccccataagagttttctcaaaagaaagttttgaagaaaatatgtttatttttatcaaaagatatttaaatttagactggaggccatgcctgcatctccaaaaggaagtggagaattgaagcaattaactagatgattcaagcaaaacctcccaccatagatttactataattatttggaaattttagggggaatggagttattttgaactgaagaacttgaataattgctccagtatttcactcaaaatgtgtcagttgaatcataatccacctagaaggcaggtatacaaagatgattaaaggccaccttttcaatatggaagattgttgaaatatctgtgatggtagcttcgtatttctgttgtttgaaatgctagtataatgcagagtggtgttcgtttaaaatgcctattattcctatgagttgccaaatgcatagccctgtaaactttacaccttaaaagtatatgactttctttctagaacatgcctcttcagtctttgttaccattttaggtttgaagtagaatctagttttcatatacaaaatagagtttcctctttgaacccttgcattaaaagtatagttatttcccctttctgtaaactctgtaccatcatcatccatttatgcttgaactgaacgtgttccaacagctcttttgagcagcacatgcagaaaatatagctaaagagtcagggtcaatttctttcagacattcttgccacaacagcatttttttttccctcacaattaggaaccaaccggtgagccctctcctaagagacccaggggaagacccaaaggcagcaaaaacaagagtccctctaaagcagctcaaaaggtgagatttctcaagtcaagctctcctaacttcatcaatgactgactacaggagcctgcctgtaactttcccattctaactccgcagccaggaatttgtcccaactgggtaacacaagactcatttcttacatttaacattagttagatgcgagttaaccttttttgtaagcagatgctcagcataaaaagtttatgaagatacttaacagtgttgtttttaaacaaacagccaccaaataatttgaaccttaaaacgggtagaagtgaggaaggaaggggttgcggggggggcgggatgaaaatgacacaattaatatttgcaccagttgtaaatagttaaaaacaaatcaaaactatagattttgcctggtggtaaagtttttgcaatttcctctgaaaaatgataaagattgatttactttgtgcttattacatggctactgcaaaccaaatccccctattaaagtactttgccaaatagacgataattagaagtaaatctagttgtgggatagtggaaaaattccatgaattttgcagctttaattgtgataataaagtatactgtttgttttacaataaacctgcagtatagtatatcataatctcaaaatgccttttcatcaagtgacatagaaatgtctgaattggacaatgagactttttaaaacaagtatttggctcatttaatatctctttttgggcagaatggaacccagttaagtgtaatattcagtgtttatcttaataagtttaaacttgcagtttaagataacttcaggttggctgtgtttaagctagcaaagaggaactatgtcagggttaatgcatgtatagagaagtaccagtcacttttttgactttataaataaattggaaaaaaaagtttctgcgttgtatttgtaggtttgtgtagtaattgagaacaaagtttcaaaaatcagaactaaatttggatataccttttcaccggttttgggtactccatgtacagtatttgttagaaaggactatatgctcatcgtttggggattaatgttttgtgtgattttctttgtgactgtgggtactaactgtaatgtatgtaaactgccatagcaactaatggtacatataaagttatttaggaagttactctgagttcttgtctgttttaacagttttgaacagagttgaggagcatatttttaatatatttaaatttaattgcttcttagagtttagatttaattgtttcttatttaatcaataaactttaaaatagctctaagtaaccttgttatttaaaaatggcaatatataatctggtatttttaatatgaatactttacatttgtttcattttatctcatttataaattaactaaaatggactgattttaccaaggagtttttctatgttgtgtaagtgtggagtttacctaatttacttttattctaaggagatgcacaaatgaatatcttgttagatagctgacacgcatttaagctgtggtataattcctctgaaaaacacatcatgataatatctcctaggaagaaatctttaaatttcaccataaataagtaatttgaaatttaatactaaaaaggaaaatgaattgtctcccatattttactatatttcatgttttttggatgaatagatagaaacgctcccatcgcctccgcttcattttaaaaagcttaccactgactaacaaaatttgtattgagaaaagggaagctgaagctagtgcctagtttaccacctaaagcaaaatttttaaagttgatctattcctaagtaagggttgatttatttttagtgactctagtgacaggcatttgtaaatgacccccctacgccgctcatctttctgaaaattcttcatgtgtatgcatacattattccaatttccaaaacagaagtaggctttcttttttctaaagattccttctccagaatctttcattctttcagacacaattatttcctacaatggtgttataaaaatccctcttgtaataaaaatgaataaatacatttgcccataacatgacttatttttcttcagttttataaattacgcttcatctggagaagagaataccttgcaaaataatgaatgacattgatgaatcgttcatggcatgtgtaaacttaaggtattttcactttcaaatcagaatttgttgagtatgttactattctatataaatatgattttcaaacatttgtttattaagcatatattgtgttctaacaaaacatatatgttcgtcaggattttgcaatgcaaatctttttagaaaaagttatattgttcataacatgtaagataaacataccctgtgagactgaccagaatagatatgagaagtcttctatgagtaacaaagtgagtgttttcctgtaaactgagacccatcacaatgcaaaatacattgcaaagactggtaagtatatgagaagaaagaagcctaaaattagaggagctgcaatgcacactgaaatcctgatggttatatacttaaaatttcttgctgcttggagtttcttgacttacaaagtttatatttggattcagtaattggccttgggacatttgaaaacaaagctgttgatttgaaaattaacagtgtgaaactggacaatgcatgcagaatgttgcaagaccaagtgaatgactactaaattagccatcacttcaatttcaaaccatattcagtagaaaattgatttatataatatgtaaaacaaagacatttataagaacacaatttcctatgcttggaacttttggaagagaagataattattcttcaatctacttaatattccattaaaactaattactatgcatgaccattgtgtaatgattctagtcattcctcagaactccaatctgagtgctcaaaatttgtccctgaatcagtttcatatagttacctgaataaaagaaatcagaagttaaagttttcctgaataattcatttgtccatgtgtgtatacgtctgtgtgagcatatctttacccttttatttattttttagtctgaggtacacctatgaccagttatgtcttaacttccttttttgttttgttttgctttgctttgctttcctggttgtggtggatggaaatctttgcatttttacagttcccagatggttagagagaaagaagttataatctcctttagtttagggttttgttgtacttttttaatcatgacagaatactggaggggttgtcactaattcttcagtgttgaaggtctcaggtcaaattcacctttaagttttaagccaattctcattcacatattttaggaagtttttttctgaggttgaattaaattttattggaaggaaaatgaaaataaaaaaaaaagatctcaggtgtgagataaccctacttcatcatgtcatatatttgttcaccacccttttgactttaggtgtaatggacagatctaggaagcaaagtgcagaatgaaaatatctagataaagtagttatagttaaaataatgtgttcagagtaaatgtttaatctctatgtttgatttgctataaaaagaaggcctgaattaattagatactgtaaagactacttcatgctccttctaatcatttgcatttctcgaaatgtggtttgcttttcataatcattacccacaccaatcacagatattttaaaaagagagaagatagttttagtcaccatttcagaaaaatcattcagcataaatgctgagtgaggacagaattttcttcagaatatagtaggcctaattaaaaggagaaaccaaagacattattattggtgagttaaggaaaggtaactttggaagttatcatataattctggcctatggtttctaaattaaactactatgatttagtttaattcctctgtgtttcaatgggcaggtaagttttattgtgggattcagggccctatctgaggatacaaatgaattcaggcggattcagggccctatctgaggatacaaatgaattcagcaggtgaaattaagtaaagtccaactgttgttccattatcttgatatttaggctgacttacctaaacaattgactaatttttttctttcactttgccagggaagacaaagccttacttaatgcaccagcacattctatctggtaatgcttttaatcatcacagattatgatccaaatatgggagattgaaatacatttgaattatcttatgaagtaattttatttcaagggacctatagttctacttctctggaagctctcatccttctgaactcttctgaacttgaagtctcctcatttctctggctgacctacattcctggctcatttttatctcaagttctcaacagatcattttgctaaggagatagaatataccagattggtattctattgcatttcagttctttcttgagaatagatgggtgctgaagaggattttatgtcagttaaatcattcaaacatgtcttgtcttgttagttgactttctgcagtttacagagcagaaggcacaaagtggaaactgaattaatttcactgattctgaaggttttagttatgaatctttgttctgccaaccaagagaaaaggggaaatagagaactgttatttgttagggcattgcattatttcatattgttttaatacactgagcaattttgaatggcatattctatttaaattagggaagagtagtgcaggcattctcttttgtctaggatcatgtttgctcagaaggtaactcctgtgatcaatagcaatgatctcttgtatcattgctattgatttttatgattacaaagaagtagagagaagatttggaggagaagaatcttaaactttgaaaatgataactttgcctgtcatttggctttggttttaatttagtgtttgtatacatgaagataagcatgtgcaaaataaggacaccagagttgacagtaaaggctaacttgggtaataggcaggaactacaatgggtgatggaaattacttatattttctattggaaaatatattgtgatagcaaattgtaatgtctcttcaaggctaaaagtgttgcatgtaaaattaggaaacttacagaactggattatcaaaaaggtaaaatgagaatttcctcagtacttagtgggattgattcgtagagttgattttgatatcagtgtacattgatttatactgtttatatttttaaaaatagcaactgaaggaaataaaatgtgctttctaggctttggatagtgggcttcatgcaaatcaagatacatgcaaacaagacagggcaccatcacacccaaatatttttctagttttttttttttttggtacagatgcactgatggatttgcagtgggggatttctggctatatcacagtacataaaaaaaatgatgagagaacttgtaatagcaaaaaattaatagccacctaaacctgaccctgaagtcagaattgaattattcttagtttccaacctctgctcttgtccatgtgtttataggaaacttggaaatacattacttttaactaatttgattttcaccctagaaggttatcttttattttttaaatttttgaatggcagttttattttatatgggaatagctctccaaagaacagacacttcactgcattgaaatcagattgggtctcagttctactacctgtgaacatgggcaggttgcttaatctcccatttgtaaaacgggaagtaacacctgccctgccctactgaagtaagataatgcttggaaagtcactttggaaactaagaaaattggtaagtattatatttgtgggtagcattttaaaataaggggagggaaaagaaattacatttgactaagtgctaaatgccatagcttttgtcaggcactttatatatatgttagctcctttaatcctctgatttaggcattgtggtcttcattccacaaatgagaaaactgtgattcaaagatgtaaacaggacatatctgatattcaactctggtaaatggtagcacctgggtttgaattcactttaattctaaagcttatactctttccactaccatgtgctgaatgttctgtaaaatatttgttacaaggtagatttctgttatctccagtaacctgaaatgcaggttggaaattacgctttgggaaacctttgaagggccactccaaaggttataaagggattggaaatgtatgccttctgcgactgatacccacaagacttctggttcccaaataatatcatggggctatgtctttgggaattgtaacacatccagaagttttcttctttgctaaatgagagggctaggtgaaattatctctagttttactgaactctagaattctgatgataagagggaaataagacacacatataaacacttttccttcctttcctcttgccctccctccctcccttcttcctccttcctttttttccttccttccttctttccttccctccctcactccctcccttcctcccttcctccctccctccctccgttcctccctgcctctctctttgcctccctccttcccttccttcaacaagtatatagtgaacacctcctgtacacgaggcactagtgctaagcactgttttcaagctcaagagatgtatttgctagtgaatttctttcctaattagtttttaaaatatgcagtacattgaagagcctggagtacagaacttcttagagaaagaaataattatatttcccatttaacatttctcctaatcttcatggacttgcttctaaatatatcataaaattaagtgtacagttttgaatctgaagtttaaaacataaaaatattaatgagggcaaacaagggagaaatgacacttttaatgagatatgattgttgtaaatattcgcataatagtgctggtaacagtctgaaatttcagttcttaccaatgagaattccgaccatatctcccttttctctcttgatgtgagcaataaatagtgagaattagttatgcctctgttatacatgggtttgtagtataaagccaaattctattctggcaaaggaaaaccaaatatacacttctacagtattgcatatgttaaaacaaaacaagcctcctgaatgttttgtttgtcttttttgaaaaataatatcctgaagagcattaaacacaggaaaacaatattaaagctgatgttttccaatatgtaaaaatcctggatctaagctggtttacaaactaaaaccctaacttgttttgcagcctttgtggagtttgattagaatgattaaataatgtgggttttaaagaacaatgaaaacctcccagattgacgccacacagcacagctaatgtgtttcttctagatgtagtctcagaagagggtttcagtttacatgtaacactggcctgaacgaccaaggagcaagtttgcttttaacaagtccgagtgataatcgtgatattttgccctttagttaatggtgcaaattttatttctcaataggctttttgtaaatgagatgctcatttaaaagtcatcttatttgcagggctttttctgtttttgagagatttgctttctctgattttgaaatacagtgaaactctttcagaaaaaaaacctctctcttcaatagattttagatacacccagatcacatcatggcccctgaaacataacaaccgtgcagaaaaagcctggtgtagcactgttaacttctaaggtcaataggctccttctcccaccctgacttcacacccccttttcaataaaaaggatttctattttccatgtttgtgtaatttactactgggttaactgtgcaatcttacagttgcttccaaagattaagtcagatgctgcttctgtgctagagaactccacactcatgtataactcactatgcaatagccaaagggatccttaaaagcctcattctaaaggtgacagatgggtgtgaaggaatacttgcattgaccaaggcttctgtgagaggaaactaacttgaagaaaaactccctttctgggaggcagaggcgggcggattacgaggtcaggagatcgagaccatcctggctaacatggtgaaaccccgtctctactaaaaatacaaaaaattagccgggtgtggtggcaggcgcctgtagtcccagctacttgagaggctgaggcaggagaatggagtgaacccgggaggcgcagcttgcagtgagcagagaccgcgtcactgcactccagcctgggcgacagagcgagactccgtctcaaaaagaaaaaaaaaaaaaaagaaaaactccctttaagggttccatctagttaggagtgaaagaacacttatggagcacctcatgggaggcaggaacttctaagtacttctaggaatgatgtctcacaggaggagtcatctccattgcacggatgaaaccaaattgaggtcttcaaggacctgcccaaagtcataaagctaaaatggaagagcaggaattggaatctaagcgttccaaggtagagtctgtgatcttctcagggcacctccctctccatgaggcaatgctctgaagagggtattatttacttgacactctgggctttcgctaaattcatgcccttgggactgaaggtaagacaatgccactaacctctgacaacaaatgattcctttgtggagccattcaaaagtgataataaacaatgattcagagtgtccaaatcagatggttagatagaacccctaaaggctaccaggttttcttttgtcctgggaaattaactgaatcagtgacaattttagtttcctaaagtatttttttatggtagcaaatgcttgtatactaccgggtagtagcattgttaagaggctaggagcacagtctttacagttagacaaaactgggttcaaatcccaggtctgccacttacctgctttgtttgtgaccttgagccagttgtatacctaacctatctaagacttagttgttcatctacaaaataagaggaataataatacccactttataaggctgctgtaaggattaacgtaacacatgtgactgacaatcgagtgcctgggatattttaaatgctcaatatttgtgagttaacattacagtcatatagagtttgcgttaattcatgggacctgttggatagtaatgccagatcagggagatactatttggtgagaaatgttgtggcttattttatctctcatctacctgtctgtctatctgcctatccatctatctgtttgtcaactatcatgtaaagctatttgtttttaccaggcagattgaagagaaaaagaggaaagtttcatttggcagtgtagacagtcaatatcactgtaccaagtacccccaccggctgctaactcagataacaaaagtaaaatgtggaacaaggtatcctggttcaagttacctgtatttgtgtgttaatatagccatggatgattcttatacatgaaacaatatgtactaagttttctttatcctaaaaagcaggaacacgtttttatagatgtatgtgatatgtgtgtgtattggtgtgttgttgtgtatgaagattggactagggctgacaaaaacggaaaaactaattgctttataaataatgttaacaactgtgatatcagaaaaatcttctgtgaagtaaagcaatgaaataaactctcaagatagaaatgtattcatgttaagtgtgggattatggttaataaagtacatttttaattaatcattatttctaggcacatatagttttaatcactgggacaaactgatgatttctgcctgcttttttttcctctgctttaggtgaactgattgacaggtgattgtttcaggcaaggaacattaaattaaacatgtagaagtgtgcaaatatttgttattttgaattagaatgcttgtgtattctttttcacatttatacttgcttttgactaccaatataggtagaagagctttgtaaattgtaaagtaatatgtcaatattaatttttgcaactttagttgtgacatggaaagaatcttgatcatcttaagaaatattaattttctaaaatactaacttatgtagttacagaatgtggggataatgtttttaatatggacagaaataaaagcaaaatagcttttgaaaaagcattttcatgtatttcagaagagatcactacagggggtgtcttttagggcgaggggttgcatagatacctctttacatcatgcaatgaagaagaatctactcagaaatgtggaaaaagattaaccttagaggagacgaagtttgttaaaaaaaacaaaaaaaaaaaaaccgatacgtcatctgcaaagcagaacattcttacttcaaatgtgtcccttggtgcagtacttataaacaatgtcaggtagaaaactataatgacttcctttttcatttgcagaaagcagaagccactggagaaaaacggccaagaggcagacctaggaaatgggtgagtaataagatataatttttcttcttttttttaaagaaaaatttctgttgtattaaatgagaaaagttttatttcgtcgattacatgaatttccaacttctggtttgatgaatctttgaaagggttaagtcaagagacaaattatcatcacttcctaccactaggctccaggtgtttacgtagaacacttttctttcctgaaggtggactcatttttctatctcttatcaacatcaaaagaggctccactcttccttcaaatagggtaacaatgagatgatttgttcagtagattgagtaactaaagttaaagggtattatgaagccttggaagttgattacaaatggtgttaaaattcatacacaatgtgtatgtgataactttttaacgtttttcttttttctttttctttctttttctttttcttttttttttttggttttctccatggcttttgtttggacacatctcattttctagatggtttgtgttttctttttcacatggctttgttaggaagcaagggtttattttgagtttttcttgcttcccttagtagtcattctccacatgcaaacattagagatagctgtatccatacaagtgcacctgatcctataggcacacagatcctgtatcttttgaggccagaaattcagtggtcactgaagagctttgctaattttactgcttgaactttgttcccttgtttgctgtgttacccatgttcttctggtctgtctttcccactgacggagaaaagaagtcctaaaaatgaatgaaatcgtttctcaagaaggatgagggcatcctttatacccagtgttgcatatgatgggttctttggctttgctttttcctcttcctcaattctttcttcatgcttcaaattttaaaaagattttttttttctgttatgctggattatatgttcctgtttgccattcctttctcctctagagttctgcatcactttctatttatactttggtattgcctttcttttaatttattcatcttatatttttcctctgctcaacatgtgttgggattagatttcttagcataaggaaatgggatgatctttagatgaaaaacatctcagtgttaaaatgtgaccttaaagtaaggatatttcattcaaccttctgttcattaaattagttctctccaaacctacttatcaagtggtgatcatctagcgtgcttgattacctttaaagttagggaacttgctacctctcaaggctgcctctttcttctaggaaagctctgcacattagaaaattgttccatctgactacctgtaacttccgtccactgtctctaggtcatccttctgggaatatatagagtaattgttttcactttcactcatgatagccctgcaaacggttgagggcaattaacacatactgtttgtatgtatctgtgtttgtatgtaacacatactccagttttctcattttttccccataaaggaacattcttgttattcttttctgaacatgtttgttcgttaatcttttgaaagatgtcacctagaactaaatatcatatttcaagtgtgggttccataaacagtgggtttatcaccttccttgttgtacatatggttccagttatcgattgctgcatagttaaccactctaaaacttaatagtgtaaaaaaactattttattatgcatatggattctttgggtcaaggataggcagggtagagcagaaagtcttgtctctgctccatgatgtctggggcctccactgggaagactcaagcatcaggggatgactttaatacttgggatccagaatctggagctgtttcacttacaaatctggtgctttatcaagattggctggaaatctgggcggatctgggagtgcgtgcactggatcacccatacatggcctccccaggataatcaggcttcttacatgcactcaggactacctctgggaattttctggtaactgaggaggaagctgcaaggccttttttgccttagactcggaagtcaaaaactgctgcttccattatactctaatgagcacattgttgactaagttgatactggcatacatatcaaatagagatctgctgttttctaagcatcagaactctgaaaggacatcccataccattgaactaattaataagaaagacgtgtataatctttctaataggcaacataatagaaaatagatgagttctttgaagccatgggattaatgtggctaaaatgaaattaaattgcaagcgaatacagtggcagttaaccagcaaactaacctccatcatatggggcctcttaactctctcagcctttcatctcctctgcccttgggctgtcctataatggtcaccaattcacctccataggttagagtcctgtcttctccgaaccttcctatggctccacatctggccagctagttaattacagcctgccctagtacttcgaagtcattcagtttacatctacctttctttacagttttctttctcaccacacatccttaaacagttgatgattcagccaagcaggagtaaactatagagcaattaaaggatatatatgttttttttcttaacggattcttgctaatttaggggggatctggatttcaggcatcagatcttcctgctgggtaagaagcacatgtgaggcccccaccacagaaatccttgcctttctgagaatagctgggccattttctttgactctcctggtttctaatttttactggctgtgagaatggaaaatattatgtggtgaattgttacaagtccctgatttggtccccaaagaagagttgttctactgagaagaggaaataaaaggaaattgtatattttttctagacagtgtgtttcctctttgcttgtatatcttctgttgggtagagtatgcagccagtcacagcaaggcattccgttcaatggcattctttgctggaaagcttgtgctgaagaaataaatcattgcgttttccataggaaatgggcttatactttatagcaagttcaattctttccaacagtgtcattcaccgatttccttgagttagagatatatttttgaaccgactggattcattaggtatatgggttagaagccaaattgttccccttttattcttgtgggatattttgctttgttttaaagttcttgtgcttctaaaacttgttccagtagatattatagattcatgtaagaggcctgggaaaagatacctaccgaggaatcctctgatctgatgtaattgggatccatatgggtaggtgtgggagagaaacttgcatcagtcttgctttcagaggggatgaagcattggccaattcagtgatctaacgagtgtgttaactagatttgcttaagaacacttctattgtttactttaattcccttcatctttttttttttttatccccctagtttgaactggatttcagatctattgtttttatgaggtggtctgattttcatgtgtgtgcgtgtgtgtgtagaagaggctagaggtaaattgggtctctttttttcctggctttttatagttaagagctcaggctctggattcagatggcttgggttcaaattctggtccgtcacttagctaactggagtcttaagaaaatcacatgacctttaaaggtccagtttcctcatctgcaaaaggtatatttctcatagagttgtaaggattaaatgagataatgcatgcaaagggcttaataaagagcatggcacataggtagtgctcagtaaatgttggaaattatgattaatttcactgtacactttcattttgacattagctgtaggctaaaccttaattacttacagccaccagtagttacacatagaatgaagtaacagagttatatgtcagactaaccaagtacccttgacagtatcattatgtcctcaatatatttatgctgaatattaatcaagtttaagaactgcttataaataatactaaagaacattttaattctctttgctattaaggaggagttttacattgcagcttagaagcctttcttccaatagcagagatttggtgtcatgtggtgttcatcagtttgaaaagaagtatttctgctgtttgcctcaagatgtacatacagagatgtgctgattctcagaacttctatagaattccattagccagtcctgccaattgaaatttggcatttaattatttgcatttttctattcttgcctaggaaaggagctcgtcacatacctagtttagtgatggaaagtatttggagaaagttttagagagtggggctcaggctcaagaatacaatgaagtaataaagttgttaacctcatgtataaaatcctccatccagatgttgcttagtgatgcagctagtgcttctggaggaaaagaagcaagaaccaaataatgaagactacatcaatgggaacaagtgatacttttaggtgttttgttctcagaatattttaaaagaaaggaaattaacaacagaagaaaaatatttccctatatgaattaatggtttttataagaaaaatatctttctggagatactaagattgacctagaaattgatccaaggaccagatgcttaaagttcacttcaattggtcactagaaagatcccagcaatccccagctggtttctcaggctgctgattccctttatttggtaatggggtgtgtgcagtacgttgattaaaaaatatgcatttccattccattgcttttgaaggggggcagttgtctttctcttattaaagagcttgtgatacacaggaaagtgatgtaattttatatattagtcaaacgtgaggattttagataagacagcaagggtttttttcccctagtttgtagaaatctagaaatttaagtgatgatttgaggatcgagaagggagaactgaatcaaaataaaatctactacacacattctttggttttggaattctttggctttattctaaagatcccaagcattaatgcattgaagaacccggaaatctgattttgaagctaaaacattaagttttacatgtccattactgtttccctccagagaggtttgctacttacacacacacacacacacacacacacacacacaagcacacacacacacacaaaacaaaaacttttagctgtttgtaatttaagactttccttgttgaaagtggctgggcatggtggctcatgcctgtaatcccagcactttgggaggccaaggcgggcagatcacttgaggccaggagttcgagaccagcctggccaacatggtgaaaccccatgtccatcaataatacaaaaactacctgagtgtggtggcccatgcctgtagtcccagctattcaggaggctgaggtaggagaattgcttgaacctgggaggcagaggttgcagtgagcttggtgatcatgccactgcactacagcctgggcaacagagcaagactccatctcaaaaaaaaaaaaaaaaaaagaaatatataactgcaatgtttagaaagggatatccaataatgcagattgaagataattgcaactttgtactggagtcagaggggaagaaataactttgatatgacatcaaaaactgtctgctaatggaatgtgtgaaggtgaaatcattttcccttagacccttgccattatcacgtgctttaaaaaacaggagatgctctttttaaagcaactgcatttttaaaatacatgcttagtaattaaatataaatttgctgatgcatataatgcattcaaagttggtaagtaatattttctgaaactatcttttcctttgcaatattttatgataaaaatagagtacttttcaaattttttccctatggggaaaagtagcttaatcttattttaatagtttaccacaaaattcactaaagagattatttaaaattaaaagattaaatatgaaaacactaataagtcatatctaaaagtgaagaattgaatttgatcattcatgttttgattcaatactaacatctttttcatttgttttaatatgtaagtgctattcttaattattctgttaaatgaagactttcaaaaaaagagattgataatctgccctacttggtcagccagttcatccagtttagcatggccaacctctaccagaccctaaccatttaggattataaaaacattgactgcagagtctgaagctccagtggctttgctgctgtgccaaaatagcatcgactatcaccaaggaagaagagatttttctcacttgtgtggagtggcaaattctagacaggaggtagttcataaaaatatcttatttctccatatgctatcatcagatcaatagagtcctggccaagacagtaatctcaatttttaattctaataaaatgacaaatgtagaatcagtgaccattttgtatgacaacaaatgtatgtaagactttccttacacagtgtactatccctactcccatacacatatttacctacattcaccttactgtaagtatttatggatggtagtaaatatttctaaaaggttggaaatccccatgctgtatattaataaaattaatatgccacgtttttttaactaggtaaacaagtaaaatgattatattccaggagaacatttttgttgtgtttttaaaggtggaggctgcttttataagcgtttttgtttttgttttgtttcgttttgttttgttttcgagacagtttcgctctgtcacccaggttggagtgcagtggcaaaatctcagctcattgcagtttctgcctcccgggttcaagtgattctcctatctcagcctcctgagtagctgggactatagtcccacgccaccatgcctggctaatttttgtttttttagtagagacgcagtttcgccatgttggccaggctggtcttgaactcctgacttcaggtgatcctcccacctcagcctccaaaagtgttgggattacaggcgtgagtcaccactcacggcctttaagattttttttaaaaatcaaggaattcctgattctaaactcttcaatacttgacacaaacatttaaacatttttgacaaaagatgggatgaaatcaagcctactccttgtattccagattgaaaaaaggacctctgcgttttgatgggctgaatacctttgggcaggttgcttaatttatccgtgccttttctcatgtctaagtgcctgacaggaacattctgtccataactaatggctgtcaagcatttatggttgtaaaacacaaaaacctttattgctccagccagctctatcatccagggactgattattgagtttgtgatgatccagcctcttgtccccttctttgctttgttttctctcctcccccctgctgcctgccctttggccatttcactgctcattagcgcctccaccagatggggggcagggtcaggaacagggggtcagctctggtaaaaggcttggtaagaaggaggctgagagtaacagccaacataaggttttcagattatctacatccaggctcgcccccaaccctgtcctcaggaatcactgaatgcagccatgacactgaaatttgtttttcattcattattttttcattcttacaataaacgtggttttataagttagttaaaaagtctttttcaggatgccgtagtaaacaagagtcccttttgagcatttccttagtaaacgatgaatggctgctggtcaagcttgttctggcaagtctttagcctctgttcagattcagaagaatggcatcaaatctatgcttacattagactcaggttgtggaatgtagttctttcaattcaggtttagtgaatttgtcttatgatgctgaaagagtcctgtttgggtgttaagaggccacagagctaaccctaactatatgaccagggaaagcccgtgttatcacattgtactgtaatttcagtgcattaactcagaaaatgcacctcgagtgcctgtttaaacgtgatgttgtgcagaaggaacagcatgtacaggacagagatagagacggaggctactgaaacactttttttgttgttgttgttcacctatttggttgcttgtctctttcttggctggatcatttaaaccctagagttccagttctgagaccctttgattttgtgattttcccatttgtctaaacattttgccaaagccttctgacacgattataaatcaagtctgtgctgggtcctagggatgtcaaggctgacaagataggtggggctgcctttggggaatttatagtctggggagctctaaagagataacctgatacctgccaggtagattattattctatgcttcagatgttaggaggctaaattaaattacagttttcaagtattttgagctctttagaatttaagtccttccatagaagtaattatattgctttccaaatcctaatgacacactatttgaatttacctatattaacaccataatttgaatgttcatgtatatgtatacatacatactatatatatacacacacacacttatatatgatatatgaattggttgtgctatgtgctgtgtgcctggggttacattctctcattatcttcacagcaaatatataagctaatacaaaatgtatacagatttgatttatcaaagtagtcaaatttcatctagttagtattgggttaaaaagatgggtgttaaatcgtcaggtacaggctccaaaaagagggagaaaaagggaatcagaaaaaaacaggaaaattctgttgagccatttaacatatggtgaccttatttttcctctttgtgcatactcaatataatttatgcttatcaaataatttttaaatcaccaggtcttatagcaacttaattatatactttaatatttctgaatagtgcagccctttgtgttttaaaatgagctctttgagggttgggtgcatatctcctatttatctttttaacctcagcacctaggacataggagggaattcagcaaagtgattaagagctcagactgcctgggttcaggtatcagcttaatcaaggcaagttgttgatcatcccagccccagtttccctgtgtgtaaaacaaagggtaatcatagtttttgtctggtaggattgtttcataagaattaaatgagaagccatcaaaaaaactttattcagcatgtgtcaagctctcaataggtcataattgttgatgttagtacagtctcaggcccataatggtgcttactaaatgttcggtgagtaggatgacagtttttctttagtgtgtataaaggatggcctttgaatttttgttttccagtaatgaatgtggatttgaattacattctttgacttaaaaaaatccaaactaatgatttgtatttccaaagaggctacagcaggttttttttaaaaagcacaacctataggcatcaaagcagtatttgtaataattttgaattccatcttatgcctctccactaaagaagtaagctgctagccactatcacccaggcccaatagaaacttcgaatgtcttgccctatgttaatgtttccattccctcactcctggaaatagcattctgctttccaaaatagactcttatgctgtaccttagaaggatttttgtcacaattttggatcatcagaaaaacagaagacagctttattggccaaacctcatgaactaattttctaaggtagtttctctttctctctctctttttacaaaaacttattttaatggcctatttgtgtcccattttctttctgttaatttttagtactaacatgagaataaagaaaagtaaaaagtcaattactctatttgtttctttcaagggcatttgaaagcacttaaagtgatacattaaggcagtagggtgtacaactaaagatttactggggacaacaacctgaaatcctaggcttatgtcaacatgggagtaagtacttcagttagaataatagctagcaatgttacataacttaaaagtttaaggccgggtgcggtggctcacgcctgtaatcccagcactttgggaggccgaggcgggtggatcatgaggtcaggagatcgagaccatcctggctaacaaggtgaaaccccgtctctactaaaaatacaaaaaattagccgggcgcggtggcgggcgcctgtagtcccagctactcgggaggctgaggcaggagaatggcgtgaacccgggaggcggagcttgcagtgagccgagattgcgccactgcagtccgcagtccgacctgggcgacagagcgagactccgtctcaaaaaaaaaaaaagtttaagcattaccaataacggaagtgcaggtttaccaagttcccagaaaacccaaatatcttcaatattaaggcagttccccagtgcaggaagcactaaatcccaagaaggtgagataataactgtatgtgcatggaggaacatggactcatacgattatggttggtaatgttctagaaagcactgtttgttttgcggtcccttattatttcctgttcagaatgattctgatgtcagaaaagatacatcctacgcagtttgtgtcagaagctgatcctcgagtgtaatttccttattacagggtctctgtccctacattttctttcctgccattattctctcaggtagtccaacttcagtattccttaaattctctagtggaaacttgatgaggcatttgcatgcctgggcccactctcctaggggtggagttagaatgtatgaacatggccatctctgtgtcccctcattctcttgagagatggacattcttggcactggatgcacaccttataagttttaaggaaaggatgaaaaggcaatgagtgataatgctgtccatcttataacatgttcattctgtgctattaatctaaaatttctcttttaagagaaagtatagtttgatttacaaatcaataaataaatcccttattcccctttcatatctttggactacatattttccatatatatttggtgaaaaatatctcattcccagtcctaattctccttattataatttcttacatagcaatgtggtagagcttaatgacattgtttggatttgctattgagattttcctaaatgagagtggtcatctccagactaccaaaccaagacaatggtaggctctgtattttttttttttttttttttttttgaggctggagtgcaatggcgcgatcctggcttactgcaacctccgcctcccgggttcaggcgattcttaagccacagcctctcgagtagctgggattacaggtgcctgccaccacgcctggctaatttttgtatttttagtagagacagggtttcaccatgttggccaggctggtctcaaactcctgacctcaaatggtccgcctgcttcagcctcccatagtgctgggattacaggcgtgagccactgtgcctagcctctattttttatttagtattgcccttcctctattggtggttgaattttttgtggatattaaaatttgtcatcaaatcagccaggcttaaagttttgtgccttccatcctgtttagacaattgatgagctacataaaaccatttaaaatccataattttataagcaataaataggtaattttttctaacatgtagtccccctcgctattaaatcactcatcttagtggagatcagttgggatccttttcaactgttaagacctatgggaacaaagctgttacagctatgaccctatttgcactgttggaagttcttagggagccacagtatttacaggaaactaattcacactaaactcacttgtactgcattgtttcctgctatgataaagcaaatgggttatgtatattattgctttaatagaatgatcaatgcacttagattgtgtagtgtgagagagcttggccttacatagtcacagtatgaagagaccgaatttttttttttttttactaaaaaaaaagacttttctgctgggattgtaataatgtggtaagtattcagacttactatttgctatctttgaaacaaatatattacaataaacatttagagaagctgacattttatatccataaggcaaacacaaaatttcccaatttgtatgaaaatttgggtgttttatcctgtgcttttatttatttttttatttttgagtctgagatatttttgtgtccaagaaaatgtttagattaattcacttgcagtcttgaagttatctttggtagaaaaacatccttatgtgtatgaaaaaagcaatttagaaaggagatttcatgagcatccttgacagtggtgtacaagtttaatcgtctttcctgtgacaggagggtcttcatgtattcaacctagaatttctccttttacggttcttagtccatttcctcttgtcttgttcttaatggtgacagagaacatctgctatgttcctcttcaaaatatatcttcctacttggggtactgtaaagtgtacgtactttgggtcttaacatatctgcatttgagtctgaaccttatcacttactaaccttaggcctttgttacctctctgagactaaatttcttcttttgtgaaatgaggctggtaatatctccattgtagtttcagctaaagtatccagtacctagtaaatgctcaaaataccattattttggcctggcacagtggctcaggcctgtaattccagcactttcggaggccgaggcaggtcaatcacttgaggtcaggagttcgagaccagcctggccaacaaggtgaaaccccatctctactaaaaatacaaaaaattagccgggtgtggtggcgcatgcctgtaatcctagctacttgggaggctgaagccggagaatcacttgaacctgggaggcagaggttgcagtgagctgagattgcaccatggcactccagcctgggtgacaagagcgaaactccatctcaaaaacaaaaacaaaaaccaagaaattagacagctgtggtggcgggcacctgtaattccagcgagcagcttgaactcaggaggcggagtttggagtgagccaagatcatgccactgcctgggcaacaaagcgagactctgtctcaaaacaacaacaacaacaaaaaatcattagttttaaaccctgtgaaaatatgttgtcagctttccattttccacaataacattcccaagtctttctcactatgtcctgtttttctaacccactaatcacggttctgaatgagacttcaaatgatatggtagatggaacactacgttcgtgatgaaaggcctttctgacttgcattctgacttaatgaatttctagctttgtgaccttggacaggtgacttatccttgaacctgcttgctcttatgtaaaagagggataataattgtcatatcttctttgtcttcctgtctgggttgtggtcagaataatataagaaagtaatttgtactttgtacaaatttgtacaaggtacagtttgtacaaataataatttgtacaaataatttgaaagtaatttgtactttgtacaaatttgtacaaagtacaatttgtgcaaataatttgtacaaataatttgtacaaataaagcaccttgcaatcataaggtaacagcagtaagtatcagcaattaaaatttcatacactagctggatgcgggggctcacgcctacaatcccagcacctggggaggccaaggcaggtggatcacctgaggtcaggagttcgagacctgcctggccaacatggtgaaaccccatctctactaaagaaaaaaatacaaaaattagctgagcatggtggcgcgctgctgtaatcccagctactcgggagactgaggccaaagaatctcttgaactcgggaggtggaggttgcagtgagctgagattgcaccactgtactctggcctgggtgacagagcgagactctgtttcaaaaaataataataataataattaaaatttcatatactacaatagggtgaatgaaattgttcctgttatttatataacttctaacacttagcttgctatcttcagcttttcccttgtcttatctaatggtttatgaggcatttactctttttccatttccatctgctcttatggttgaaaggctaaaactgacaactttcagatgtatcacagagacatatcaaaagaattccaacatgaaaggtattgggttcatgtgcagaagtagtgaataaataagcagggttgggtgaggttaagagagtgccacatgatctatgtggtaataaataggtgaagtgcccaggagagagagatgagcagaagagacctctccagtagtagacattgaagaggaggattttagaattcgtctcttaagacattcactgccaagttccaacagaacatcatggacaaaacatatctaaatgagaaggaaactttgggacattgaggatggcttggagtggaaatgacctggaaggttgcagtgatcccaggcaggagaggacaatggccgtgtctgcagtggtacagtctgagggggaaggttgccgactgacgtgtggggaactgggagtgtggcactggagaagaccagttggaaaattgattgtcctggctgtgacagctgaaccatgaggactgtctaagagcactgaaactggggagaaaagaaagtagcctggacatggtaatgcttaaatgaatacttacatgtgataccgtaattatcaacagatttaaaatctgttgaatatactgttcaagtttaaatctgttgaatatactgttcaagtttatagaagcaagaaacttccccccatatttgtactgtattaatcttttggtttccttgcctcaattcagttttgtttcatatttaattatggggctgaaagtacataagtttgagtagtctagagtggaatgtggttaaatatccctgcagattactttatgtgtttcagtattctaataaaatcagccgcagtgatccatatgggatttgtagatgctgttttcccgaggcccttttctctatggctgtctgtgaccttagccattgactcgcttaatcgtttttggcctcctaagtcagtgattctgagcgggcagagtggtaatgtgatgtcatgtctggggcatgagcctgcatcctcgccgcacaggggtcccacccttcctggtctaggcagctcaatgcacagtgcttggcgcatcgtgagtgctcaataaattcagttgcttttcccgtctctctctggatctcaaatagaaatatccaaatttgagaatgccaccaaagcattaagttccctaattaaagtccatagtaaaagctgaggcagatgtgtgggaatgcagttccagacactgtagttaatctaggagagatgatcgcactgtatttacaacaaggcttcccatgctcatgaatcataagaactcttacaggattaatgagttttaacttaatgcagaatttttaaactatgtgtaatgctgggacatttcaaagtgtttgtcatgaaaaatggctgatgaaggtacacatttcgagatatcctgtgttccacctacgttgtttgttatcttgttgacatcttctgttccttttacaaaaaggtcagaaggaagtccctccacattttctgtagattgctagataagagaaacatcaatatagaaaggaacattttgatagccttacacatttatgtttttcaaaataaaaaaattctttaaataaaactttctttcgtgccctttctctggtagagagaaaaattagcccccttttctttcagagacgtgccttgtgggctttgaccagttttcccctaatgctggcattttgtaaaactgtagaacaagatctcaattaggatgttgacattcacacaatccattcatcgcgattagatttccccagtttcgcatgtacttatttgtgtgtgtgtatgtgtgagcatcaagttatatacaactttatcacatgtaggttcatgtattcactaccaaaggtattattattttttaagttccagggtgcatgtgcaggatgtgcaggtttgttacataggtaaatgtgtgccatggtggtttgctgcatctatcaacccatcagctaggtattaagcccaacatgcattagctattcttcctgatgctctccctccccactccggtattcttttaagactgtcagttgctcaggagtttgtggcacatcccatgatgacatacactaaatttgtcttctctaagtacacaagaactttgcatgactgtaggaatgtggggagaggaattctggcccatggttcctgtctttggctgtgcagttactctttcacattccctcattataaaggtctggctggccctggcaaaatcataggtgggctttgcacacagctaactgcttgcctgaagtaacttacacttttgtactgcattcagagttctgccaacttcagaggccaggaaagaaagaaaggattggcctgggagtgtaacacacctgcttttcctgaaggcacatacaacaggcgtatttgagtacctgcttgccctttgggatatattgaaacacatgcctgtttcgtcctgaagttgtggatgaataccttcatcccctggaaattccttgtttcacatagattttaaatgtccttgcgggcagatattcactgagaaaactgtcctgttaattgtactttggctatctggcccagtctctagaacaattatagtagaaccatgtcatcttgacacatttaggaagatccacatttgagaatgccactgtaatgtttaggttccccaaataaaaatttcatattacaactatgtctctctctttcctttctctctccctctctttctctttctctctctctctctctctcacacacacacacacacacacacacacacacagagcaaagctgtgctaagatgcaaacactaggcagatggccaagttgcccctccaggctaaatgtctcaggcctgcactctagtctgagaaaaaatggatttgcaaacagttcaaactgtgaatattaacatttaagaatggccaaggtctattgcattccactagtcactcttagaatctgagtgtttgtttaggtaaccagaacacagatgatgatgatgatgatgatgatgatgatgatgatgataatgattgatcataataactgaagagtaaaacactatcaatgtgatcattatgggattcttttggagaatacatttagtatatttggaccaaaagccctgttggatcctaaatcccagctatgctgtggcatacaaagagctgttttttctttttttttttttggactaatgctttttgactattggcacttcaaatatctacgaattacaagtgatattctttatttttggtggtaactattatcttatttaaacaaaaatcatgcttttgaatcagctgtagacatttttgacaatcttggaagtgcagaaaaagttatatttgaaagaaaataattatagaatatcagcatatgctgctgttgcttccatagcaaactcctttgggccttactcaaccaaaataaatgtggccacattgctgcagtaagcatggcttgaggcaaatggaagactgcagttctgtttcctgtgtcctgctttctgtccctgaggtccaagcaatgccagaacagtgaatttgaaagtattaaaatgttggtctgtgtggtccttggtcttcccatctataaagctagacttggtgtagagattatatagttaaatcctcttatattctacaggtgacaaaatgaaaacccagagcaattgtgtccagttcaaggccacacaaccttgttagctctgacaagagccaggtttcctgacttctagtccattgcttttccctgtagcgagccgcttcctcttgcctcacccgatcttccttggatttccattgggaatgttgaccacagttctgataaatctcttccttcaggtcctgtgttagtttcttcagggctgccataacaaagtgccacaaacttgggtgctttaccacaacagaaatttgctctttcacagtctggaaactggaagtctgacatcatggtgttggcagggccgtgctctccctgaaggctctagggaagaatctgttccatctctttcccttcacttctggtgctgttggtgatccttgatgctccttggcttttagatgcattgctccattctctgccttggttgccacatggtggtaacagcagttcctgtgtgtctgtgtctcttttcctcttataaggacaccagccatatttgattagggcccaccccactgacttcatcctaccttgattatatctgccaagaccttatttccaaataaagtcacattcatagagacaaggtgggttagggcttcactatatctttttaggggacacaattcaacccataacagttctttataactttaaacctgttagaaccaggctggtatttgtaatgcataatgagaaactgcagtgaatttcattaagtgtaaagcatcatatccaacatttgtagtttgttacaataacacattcaaaagatttatagactgcttttggtgtgatttttggattaattccctcttttgaagacatttgttgggcttagtttattttaaggaaggaatgaatagacctgaaaacacctaatttttattttcaatttagcctggaagctagcaaaagcttttgcagagaactgaaactgtgtcacagagcaccagcactgtatttgttatcattttggccttcagttttattaatgcttgtttgatgtgttaagcccctagctaagacaaaaagacagaactttagggtttttgtttgttttagcagtaataaagtctagaataaaatgtttgctctataatatttaatggtgtgtattcaatttttaaaccaaaatttaaaagaaagaaatcccattctcattcagcactgtcaaatgtattcattcccccagacttcactggttgaatataataatttgtgtgtataaacagtcttcctgactgcattctctttaatattcatttatcaatttgggaggaaatttccaaataacctttatttgcaccttaaaaaaatagttttaaacgaagtcatgggaatggattgctctgtcttttactgacttttatatatgtgattccaaacctccctttaaattaatgtcttttagcttcaaatatacctcttcccataaggctagtccccatttcctataatcttacagacctaggagaacaatattttcccttctgtcgttttgataattacatcctctgtgctcagtggtggcctattaactcacatgaataccatgggcttgcaaaatggcctcaaatttccatatattggaactgtgagaactttctataatggtgctttagcaataatgatggaggtgcaggcatttcctgaggattaatgaccagctgggaggaaccagtggcccttggctctgcctcccagccagccattaattctaaggaaatgtcttttgctgaggtcgttactgctattataagcttaaaatggaaaaacataataggcatatgagttatttttatgggttgatgcagtttccaatggtgtgtactaatttgagaaaatgaatgtgtatacatacaagagtaagtcagattgttagactcatccctcagtattccatatgttttgtgactgattttacagttctctctacctttctcatttacaaaaaaaaaaaagaaaagaaaatttgattcagcaattcctaaaagtattgtattcagtgacatctttggaaacaccagtttctgttatcaacttcaaataatagtcaagttttatgtatgatctaaagggaaaacaagtttgtttttcaatcctgtgataatttttcttttagaatgaagtgttgcaagaaatgaaaaattaaaaaaaccactctgtaacaattttgctgtgcttctttgatttttctctgtttttgtttaatgggtaccttatatttgtacctttacatattgaattcatgagagagttatgcacagcctagttatttgacattccaggggtttaaaaaaatgtatattaaatattgcagtaatggtgaatgctttaacataaaaccacaaaaaacctcctaaaaataaagccaaagagtctaaatctcgctcactgtgcttctttctgattatttttaaaaggcagcccttcttgtacagtatttctactttttattctaatcaactggactgttgcattatttttatgtagattgctaacaaggtttttgaagaaacactcttaaaagtcataaaagggaaaatcttgacagttctgggatattgccacccttgaccttttggagaaatgtagacagcatctcccaggcatgacgcctagggatcgtgtttatctgtcatcagttggtgactccatgtttattgagcactggctataagccagacttggtgagggactgaaacaattacaagacacagttctgcactggaagaaataggaatcaacctaagatttcctgtcctgctaggtcatcaggttcctgtcccactactttccttcctctaccaaattcacttatagcctccaagtagtgtaactatcaatagcacccctttcactccccaaagtgtcctaatttggagagtaagttgtatgatcaccctacctacagtctgcctgttttccaatgcacactttgtctctcccctgctcttgttacatgtgtgtcctgaggccacttccagattgttcttcctctgtcattactccagcatgtcattgctttgctcagaaactgctaactgggtcttcatttgtggttaaataataccatttttcttatatacatgtagccgaaagctctatttccaatatggaaataactaagagtaaacatcctattccatgaacaggacgaacactttctcaccttcacttttacctgcaatttccttcttccattttcagctgcttaaaatcttctttaatcttcaaagtccagtttagacagcaccttttatgaattagctccttactgccctagtcagaagtgggctgtctcatccttgtaggagggtaaacacgcattgcagatgcttctcaacttgccatggggttatgtcctgatacactcattggaagttgaaaatatcatcagtcaaaaatgcatttaggccgtgtgcagtggcttactcttgtagtcccagcattttgggagcctgagatgggaggattgcttgagcccaggagtttgagaccagcctgggcaatatagtaatgccccatctctaaaaaaaaaaaaaaaattaaaaattagccaggtgtgtggtggcacacacctatagtcccagctactcgggaggctgaggtgggaaaatgcttgagcctggcatgtctagccttcagtgagccatgactgtgctactgcactccagcctgggcaacagagcaagactctgtctgaaaagaaaagaaaagaaaagagaaaaggaaaaagggcatttaagacatctcacctactgaacatcctagcttcgcctagcctaccttaaatatgctcagaacagttacactgcctacagtctgagaatatttacattaaatatgctcggaacacttacattggcctacagtcatcttacacaaagcctgttttataagaaagtgttgaatatctcatgtaacttactgaatactgtactgaaagtgaaaaacagaatggttgtatggatatttgaagtataatttctactgaacgtgtatcactttcacaccatcgtaaagccaaaaaattccagtcaggccatcataggtcagggactgtctgtatgaatgccttgctttcattatagcattctccattttctcttgtactggtaatttttgaacagttatctttaccagttttgtaaactccttgagaacagttttgcattttcttcaaaacctaggactgtggtatacagtaaccgcttaatacaatatttgttaaatgaagaacaaaaaatacgtggctaggctactcaggtcattcccacaaaatgatttctttaaactgcgtaattggaagtttttgttttttcaaaaaagtatgtccacagtattatgtcattaattactataccctgaggaattactgctgctgctaatctcttggattcagtacttagagacataaatataagtgacattagcactgctactgttcaatgagattacaaaatagaaagtagacatagaagcagatgttggaaaatattctcaaagataacaaaatgtagaatatcttactaggcctggttcagggacataggctaagctgaagctgccacacatggtgtttgacttcatggcacacttttctgcagaactggaaaaagatgtgtctactttggggcattttcttcaaaattaagaaaaaaacgtgtctatgattgattttaaaaaagataatttaggccaggtgtggtggctcatgcctataatcccagcactttgagaggccaaggcaggtggatcacgaggtctggagttcgagaccatcctggccaacatggtgaaactctgtctctactgaaaatacaaaaaatgagcgggcatggtgacacatgcctgtggtcccagctacttgggaggctgaggcaggagaatcgcttgaacctgggaggtggaggttgcagtgagcccagatcgtgccaccgcacctccagcctggcgacagagcaagactccgtctcaaaacaaaacaaaacaaaacaaaacaaaaaaaggtaatttaagaaaacaatacatgctattgtattggatggataaaacagagcgttccatgtgacaaaacctgtatgtaaacgtatttcttattttttaatcatcattttatatatgtgggtcactatggaacactgcgttcagaaaataaattacttttctttttcaaaatattgcattggtagtttcatctcgttttaggtaatattgatttatcctaaattggtaaaaaaaaaaaaaaaaaacctagatactatatatatttaatttaagcaccttgtagttccatggaaaacaaactgataaaattttaagagtaaattgagtaaataaatatagattatacttaaattttttttctctctgtgaactggctttaaagatatgctttaacatttaatataacaacatatttttgaaaaaaaaatccgtttttgtgcaacatgtttctttttttttttttttggaatgaagtttcgctcttgttgcccaggctggagcgcaatggcgcgatctcggctcactgcaacctctgcctccccagttcaagcgattctcctgcttcagcctcctgagtatctgggattacaggcgcccaccaccacgcccggctaattttcgtttatttagtagagacggggtttcaccatgttgatcaggctggtcttagtcttctgacctcaggtgatccacccgcctcggcctcccaaagtgctgggattacaggtgtgagccaccacgcctggctgtgcaacatgtttctaagtgaacagtatgacttcagagagtcatactgttttaagagagttaacaaaagaataagcattggatatacttaccttttttcagatgttataacaaatttaccaaaatgcaccatacacacacacacacacacacacacacacacattccataacttcaaacaacagaaaatgggattctgtctgtctctgtgtcccacaatcagtaccaccaccactactacagtttgcttttattatagtattatcaattttctgcaaataagcctaaatgtcttaggtagttctacatttttatattacacagtaattgaggaaaaactaaatatttttgaaagtgcatttaaaatactactttagaacaattaatctacttgggtgtacaaaatgaaagccagttgttagaaatctcttatactacaaaaattaaaaaagtgttaagcatcaaggattagacctggactagaagtatgtgtcacttggtggatgaccatgcaactcaagaagaggaagagtggatttagaattcaagatagagatgaaacactcatgtacttagtgtgtgtgaagtttaggagagggagctgagctgatggagccatgggtcacagtagctgaagccatggctgtggataaagatcccaagagaatgtggaaaatgaaatgtgatatagaaagtggagaagaaagggaatatggggaccactgcacacaaaggagataatataggttgtcaactgccaacggcagtatgtggaccagtggtctttaccacatccttctccagctgtcccaccgtccacacgaacttacgcatgcttcccttgctctacccacccatgctcagctcatggtaattggcatggctgtttcatatctattaggtcactagactgagcttaccactgggataatcaacaacagcagtgaaccctaaatcctgacgacactatcagcacttaagtagagctggggaatgaaactagaattcttttggggccagatcattaactcatatctagtgacaccccattttgcctctggaaaagttaaggttttgttgtgcaattagctttacagaatggagcatttctgttggtttactaaaactgttaagccaaaatagggcacaagtgcaagtcctggctccagaagttggctgtaccttcctttctgcagtacaaggtgaacatctgtaaagaagaatgcaatgtcccgggtgtgtttaaactgactgccttggcctcaaactaaaactgttaagccaaaacagggcacaagtgcaagtcctggttcccgaaattgactgcaccttcctttctgcagtatgaggtgaacatctgtaaagaggagtacagtgtccctggtgtgtttacactgactgccttgttttcaaggatcattagatttcaaagaaaaaaaaatcacaacaatatcctttgcatggaccagatgatgagaaactaaattgtaatttgggattcattcacaagaaaagtcctgaatggttttcccatggacaggatcttggaggttaggaataccaaatcctgtgcccagctcagtctcactgactagggaatgttgtctttagactacagaagtcgcaaccctcaccccaaaacatgaagtattcaaaccttttgaagggtgtgatgtttccaggtaatttggcttggcacaggaattgcatttatgcccaactttggctaagcgattttagtagtccagcaaaaatgctctgttctgtaaaggtaattgcaaaacaatatcttcatttctccagatggaaaatgggatatgaaaatccaccaaaggaaagaaatatcatttcccgcactgtggctctgcaatcttagaagggttccatgaatattatgtatgtgcagtaaacatttatgaccttatttaggtccaagcagcatgagggattttgtgctagtagttgttgatgagcactacaaatagggatcctttatatctgaggtatccatagtaactaagtagggcccatttccatcgtgcttatttgcttccaacctgccaaccatgcttagactctgagggctccaggattcctaattcataaaaaaaacaccccagagaggtgggtaagtgcttttcagaaaaagcaaacttaagcaagtgattttaagagatttgaagagtgctacatggcagccaagatgataattttttggcccaaatataaatttaattgagtagtgttataaagacaaaattacatagccagaaacagaattatgagcattaggaaaataatagtgttgtcttccatctccttgaaatcccctgttatgttactcactccactgttgactattttgtagatagcacacattcaccttgcatttggcagagaacaccagctttgctatgaatgctcacaatttttgtaatacagggaaatatttaacatactaggaaaaaaaggtttaaattcattaacattactattgtaatgttcatatactcctcttttcttaggacacactacaaatgattttatagtgtttccatttaacacacatagtagcttttcttctggattgtatgtgcagtgccattgaacagaagcataaaattgtcagtggcctacattttttagattatttaactatgattagaaatattttgatccattttttcacttcagctctttttcatattagtgcacacttgacccttgaacaatacaggtttgagctggacgggtccacttatatgcagatttctttcagtgaaagttacactgagtgcttctgcctctcctgcctcctcttccacctcttctccctcttctgcctctgttacccctgaaacagcaagaccaacccctcctcatcctcagcctcctcaacatgaagacagtaaagatgaaaacctttatgatgatccatttctacttaatgagtagtgaacaaattttctctcttgcttgtcttatttttttgtagtttacatgtagtttgtaaggatgcagtatataataatatcacatacaaaatatgtgttaatcgactgtgttatcagtaaggcttgcagtcaacagtaggctattagcagttaagttttgtggagtcaaaagttttgcgtggatttttgttggatttctgacttcacagggagtcagtgccccaacccctgcattgttgaagggtcaattgtatttttgtctgatttcatgagggtgaactttttatactatacttttacagatagaaatgaaagtacttagtaataattgaacatatgtacagtaaaaatattatagctgttgttttaaaataattgtattaaattgaaacttaagttagtcttcaggctttttaaggttttcaaatttgaactggaatgcaattcagaatgtgctagaataacatttctccatttctccagtgtcaagatgggaaggcatacattctaagcgtctgtatctccatctatttttctttttttttttttttttttgagacagagtctcgctctgtcacccaggctggagtgcagtggctcaatctcggctcactgcaaactccgtctcccaggttcacaccattctcctgcctcagcctcccgagtagctgggactacaggcacctgccaccacgcccggctaatttttttttttttggtatttttagtagaaacggggtttcatcatgttagccaggatggtgtcgatctcctgacctcgtgatctgcccatcttggcctcccaatgtgctgggattacaggcatgagccaccacgcctagccatccccatctatttttcactaatattcaagctagagttgctggctaaaatgatggagcatcagaatttgtgaactctgggaatcatagcaagtgtataactataattcctttgtgtctaaggagggtggacctctatattagagagaagatttacaaacgttggggaaaaaatggaaattgagactgactcctaaggaaacatctgttcactcactcagcaaacatttagcccactctgctaatgctaggcactgtgctagatatttggagagacactggagaaaacttaaggtccctagtcttgtggctcttacattctagagagggattataaatgacggcgtagttattaaaaaaatacagatgatgatttcaagccttataagagcaaagaagaaaagtgaaccaagttaatgtaatggagagtattggagtaggcgaggctgctttagatcagagagtctgggtggacttgatggaggaggtcatggatagccttgcagctggtagacctgtgggcaacattaacagcagataggacaagagggttaggggctaactgagcattcacctttgtcttctttttcccctcggttatgagtgtgacaaggcggaacatccaagggatatgttgcaggtgtcttaagagtcaggtaaaaggcaagatgattcattatatctgttctttttgtgatacccatgtaactacctataagcttcaaagtgaaataaacattacctcttgtaccttagcccgcttctcattcttcattacaaatttaagaaggcagttattaatgtgaatagtcattcttcttttcagcagtgccaactttaaaaaaaaaaatcactaacacttacctgagatgcagctgacatgtaccaagattgcttgccattgccctctcaacccatctgagtcaaatttttctttctgctgctgttttccttctgctgccatttttctttctgctgctgtcaagataggaacatgtgccttcccatcttgacactggtagagagagagattgagagattgaagggggagaaatcagttctgattttctagtttctaaacactgcagaagaacaaagtagagaagaaagaggagagtgtgtgaggaaagaaatggcaagaggtacatgagataacttagcagggagttaaataactagctcacataatgacaaaaaaacattgacactaaattgagggcctgccatttttgttaactggtatccctgaatgtggctaatggcacaagctacgtagaaacaggcccttgtcctgtttttgcaatgagcagaaatctagcccactgagacatcgagttcttttctaactttttgctctgttgagaacatctttgcttttggatacaaaggcagcatgaaaatctggaggccttctcaggaaggggaacttctaggaacttaatctgttagtgggaaagccaggaaccagcacacttggagtgtcatctgagcaggaggagttagaattggctggccagttttcccttaatgagtgtttattatgtttaagctacagaactaattactgtgaaaagacataaaggaatgagaagaccaaaaccgtatcctcatgatactgacaaatcagttggactgagcacacatgaatcaactgaagaacacttctgccaagttcaagttgtgtaaaagtggaggatatgagtcttgtggggacacagagttgaggcatgagctattagtcagagccgtaaggctgcctgcaggagaagaactttggatggagttttgaaggaagtgaggaaaagatctgaattaacgtattaacacataaagcttgtcatctgaacaggactataagcatctcgagggtaagaacgtgccttttctttcttacacattcccagaagacccacattcctcattgggctctctgtaacagtatttactaagcacttgaataactggacatgggcaccatgttgctaagttgattaaaggttggtcttccactctgccactggccacagcacaaagtgaaaacagatgtcacaagcaccttgtagatctgtcccttttttcttctgatgttcaccctccttttgagctctttctttctccaacattgcttacaaaataatctttatgcatctgagagggagcaaatattcagtaactttctgcagctgtcctcactaaagaggagaatctgttgaatgccactggaaatgtaaggatctcttgtgacagtaacatctcaaggggaaactagtggttaaattgttaattctttgagtctgaaacttttttcatttgcagtgcagataagtgcctgatcttgcagtatcacgtttctgacttctttgttctggcttcattttttttttcccaaaatgccattttcatttgttcttagagttcagaacatgtcaaagagcttctttaagcagtaggtggttttacagagcccacagagaaggaaaactaaatatcatcccggatgcagtccactacgatcgtggaggagtcagattactctccgggctttgctgtgtctgcttgtgaaacaggaaagggagaactgaggcaatgagtcacctcacttgggcccaaagcaccacctacgttgaatatggagaaaatgtgaagcaagagtttctttttatacataatcaccatttgtacataatcaccattttctccatggttcttatccaattcagtgcatcttaaaggatggtttgtggaatcatgacatagcagaaaaatccaggtactatcagtcttgcctgtttctacctaactctttcatttaaactctcactagaatctataggaactgttagcatcaattttaataagttgtcaactaagtgattagtggtatttattggttatttttgacaaaataatggaatcatcaaattttgaagttgagaagtaaagtaaaaatttgtgccaaaccccaaatgtagacaaggtcatattataaacattaatgctgtcccaaactgccaatgcattgcgtagaactgaggttagcaggttaccattgatttcctctacttatgctttaagaggttggcattggtaagccgctacactttcttggtcaatgaggcagaaacccctttgcaaaactctcaactgatgaaaagattagctagaatgactctaggaactgttttctaaggatctgactcattgattcctttttttggtagggttctctgggccaagttagttcgagtatttatcatttaaattaggaaattaccatcaccatcatcatgtacattcataaatcaaagcaagattagagaaggaatatggtggatcacagagcaactcagaaagacgacagcaacaactaggaaatgaaacaccatggttgtatttcaggaaccctacccagcagataggaattaccatagctcctaaaattccatctgggtggttgatggagcctcaattaatctgacaccatagcccatgctcccctcttgctacctgctgaagttagcagggaaaagtcaaagagggtgctgtcagtggggtcaattcttagggatcatagtgaaccaccctccattgcactgactctttcccacaaaatgggctagagatagcagctctccttatgtatttaagaaagaatggtcaaaaaatacaattcacattttattctggtatataccattttgacagtgtttcacaatgtaggtaatatgaatgggagtatttaaacacaatcctgtttaatattcttagccagtacttattaaatgcctaccaagcctggcattgttctagagacctcaaaatacacctttaaaaacatattttattgacagttgtataaatgaagaaaacaagtctcagaaaattaaagtgacttgcacagatacacaagctagaaagtaataaaactgaattttgaacccaggtttgtcagactctaaagtccatgattttctgctccatgtggccaacccagttagaaaggttataaaaaatcttaacagtttttcagcccttctcacacttagctttaggattaaaagtattggtcatgatttgcaaaaaaaaaaaaagtagtgcacaatattccagctatattcaataaacatttgttgaatacaacgtatgtatatacaggtcattgttacaggtctgtgtataagtaaacacaatatggtccttagctttaagacctttcagtctaggggtagatatgcatgtgcatacaacttctgtttatttttgaatttcaactatgtgtcaggtgttaggctgagcacattatgaacattgtcttgatttattatttaaccttgtacgagccttgtaaggtagtggttttcgaaatatttttgccaaaatgtaaatagtaaaaaacaatatgtgaagcctttattccaactaggtaaaataaggaaggctttacaaaggagatgaatgacacttcagctgagccctaaagaatgaataggattctaatagaacagctgggggcaggcgtggtggctcacacctgtaatcccagcactttgggaggccgaggcaggcagatcaccttaggtcaggagttcgagaccagcctggccaccatgcaaaagcccgtctctactaaaaatacaaaaattagccaggcgtggtggcacatgcctgtaatcccagctacttggaggctgaggcaggagaatcacttgaacccacgaggttgaggtttcagtgagccgagatcgtgccactgcactctagcctgggcagggggagactccatctaaaaacaaaacaaaacaaaacagctggaagatgacatccctgggacagggacttccatgtcatgtgaaaagtaggagtaaatcaatggaggcagggaaatgtagggtgtatttaggtaagagcagctagtttggattggatagtgtacattagagacataccatgggtgagggggtggatgtggacagtgaacctaaacgctttgtggtagcaggtcacaggggccgtgcatacatgcttaaggagattggatgttacaggaaatgggaagctattaaagatttctaagcaagagaatgacaggtcaaatccgacatgatttagaaaaaacgtaggctcagtcagaagccatagtctaatgaccaatgcatcataattacttgctacactaattttcttctttagaagtcagcttttaagatatgtgtttataatacagatttatacagttttacatggttgaaacaaagaataataatatttattatgtaagattcaaatttcagtatcaacaaataaagtattcctgggcccagccgcacctattggttcacgtattgtctatacctgctttcctactacagtggcagagctgagtacctgccacagagaccgtctgcccaacaaagcctgaattatttactctccaacccttaagagaagaaggttgctgactcctgctctattgtgtctttctggccctcttaatccatttatataggtttcttccttttgtgtgtgaatggaaaatgaatttaagttcattagtagaagcaagacacctttagcttggcctccaggtattatttgttttccttctcatgagaattttgaatgttctatatctagattctcgaggctaaagaataatgaagcagaaaatgttttctccattactatatccccttcctatggggattctgaaggtgcggttttccctctaggtgagagaactacattcctttcctaggcagattccattttagttcacactcaggctgtcagatgcacagaacaatgtcacatgggcttcttaagacctcttaaaaatcacttccagtttgacttctgcccatactttactctgttagttttcctcagaaaggcttggcaatagcagaataatctttgattaccaacaatatatttaattttcctatttgataggctgatgccgcagaaaataaccaattgccttctgtgctttgtagctttgtgctccactgcatcatcactttcttgggtttaggggtctgtgggcatagcaaaaggtgtgacagcctgtccttgttagactgaagccagtctgaagtggcagggaggcaacaggatgccagccaaatgaaacatatgctccagatctttcatccagtccggagcctagtgtgacttggcttctgcccccttcatccttcctagggtccccctacacaaaatcctctaaataaggttgccagtaacctcttaactgccaaatccaggggacacttctcagtccccgtcctgatgtctcttctgaaatatctgacacatcagccgtgcctccttatttcacacttgccttccttggatgcctgaaggtaaacctgtcctgtgtttcttctcttgtcaagaagttccttgcacccgggaggctcttctttctctacctgccctctgcacgtcgctcgtctccagggttatatctgaggtcctctatttttcattccatgtgttcattctgagttagctctgtggtatctgtgtttcagtcactgcctgcattgactgactgtattcgtagcttatctgagtgccatcatacacccggtcatccttgacttgtcagtctccattttcaacatttgcaaagttctgccatttattactcctaaaggtgcctggagctatatgttttgagttttcttttcctacattcccactgccacattctttgtacaagtctttatcatctctcacttaaactatttgcaccagcctcctactagttttcctgccgcctctacttttctttgtccagcttacctccattatcactgcaagtgttttcttcagaacagacactttatcactctcctgccaaacattttcaatgactaccattcacccaaggaagtctgaacttcttatgttgattatagcattgggcctagtttctaatcttgcctcctactacccaccagttgaaatcttcacttccttaggacagaaagacccgtttttctgaaacttccattaggtctttcacatctgtgctctggttggtatagtctttacctttacttccatttggaccaatctcaacacatctcccaagacccagttcaaatacggtgcccccgccaacctctcttgaaattatttccttcctgtttgcctcatgggaatttgcacacacctgaggtaaaggacttttacccgtctactataattatttgtttacatgtttttcatgcatgaaactatgtctcatctatctttgtattttcaatacagagcatagtgtgtgtcttataaaaagtatccaaagaatgaatgtgtccaagccatgtgtctgcacctgtaccatgagctctctaggttctgttgtctggtgtgttacaaataaataatgctttcagcaccaaatacggcagccatcagcagaaatggcttatttccttttctcaatatttttttcgtactgaatctaggctaagtgtagatggctatagatagtcattcatgaagtcaaatgcaccagtgggattggaggatagtatttattttagaaaaaaagaaagaaggaaaagaggagagatgtccagtgtcactattagtgaaccacatatattatactttaatttcccttataaatatgaaaagagcttggtagaaagtaagatatataaagcatgtctacatgtgttttatgatgtgtatacatatatgtatgtagatacatacatatatttaaatgtgaccattatcacattactctgttatattttattatattcatcctcacaaaattcattgttaaagacagggaactgaggatttgttttcaagtcttgcttgtggtatttgcccgtgcttgcacaagagtaacaataatggcagaatcatttattagatgactgaaaagagcaggcacacatggaggtttaacatatggtcgctgtccttatggaattcaaaaatcagacaccaaaaaaggtaggtaacaatatagggcagtttgaggtatgccaattaatggcccacagttagtgagattttgttttttatctctctatagcctactattgcactttgcacacactggataaacatctgctgaatgagtggacaataaaacagaagcaaatttgtactaatttttcaattatgttttcttccttgtatgcattattgttgacaccagcttgttgggaataagagtaagaatttatcctttacagtttcatagatctcatttatcacctacaagaaaagaaaacttatttttgttttataaacttaaaatgtaaattaataaatatataatataaataataaagctatataaataatagatatatgtaatacacagaatttaaagctatataaagtctactacttagttgaagactttgtcagtcttgctgagacacattgagtgaaaatatatataaaaacctttaatgatgtgaggtgaatactcaagaaattttaatcatcttcttttcagtggtaacgaattacgctcatacaacaaagcctaggtttccagcaggagggaaaccatttgaagatgtggtgccctttagaaattgtttagaatcttttcagaaggaggtgtagtgtgactccaggtgcctctctagggttgttgaagtgagtgcaggtgacctctatgtacttgttcttcaagctgctttataataagcagcttgctaccctgatttacccgcagaaccaccttaagacttggcaagatatcttttttaaaaaaataaagtaatggataatcatagttcaaactcatttgtttttctgtatgtatacatacaggtaaacattttcacaagtacgcttaaaaatagtagaagagtttaaagatttgccccaatgggctcatctctcccttttccagtttggtgctccatctcagaaaaagagagtcacattttgagacagatgtagctctttctacagatttttccagagcaagaaaattgggatctcacacatctgcagtacttattttatcttctcatctccctttattcaaccagaaaggttccccgcccccccagtaatacccttttagaattatcatgtagcttgatgctatggccataatgggttttgtcttgttttgtttaatcacagatgtaaaaataaaaagaaatgcttatatttattagagttaatacaagtaattgtcccaaagtagtcccaaattaatttttactcccctattctcatatgagaaaatatactgacagtggctcagtacctgcttgctttgcttgtcttactggcaataataccagatgtattttatttaattgaatagctgtgttcctgagtgagtaaatgatactattctaaggtgatctatttacatacactagagcttgcagtttatgacaactgttagtttattatttcaaagactatactgtgttgcaaagaaatattttattcagattttcatatattcagttttgtctgtttgtttgtttgttttgagacaaagtctttctctgttgcccaggctggagtgcagtggtgtgatctcagctcactgcaacctccacctcacgggttcaagccattctcctgcctcagcctcccaagtagttgggattgcgggcatatgccaccgtgcccggctatttttttttttttttttttttttttttttttttttttttttagtaaagacaaggtttcaccaagttggccaggctggccttgaactccttacttcaggtgatccgcctgactcggccttccaaggggctgggattataggcgtaagccactgtgcccggccttgtctggttttttaatagtaggcctacgtatgccattagtcaactttctgtgagtttgaactaccaacttggtggatgtttttctttttttatttgctttttttctttgaattatttttactatcattagagaatgtgcaaggttacttagtagagaatgagctcatctctgcttcttcagctatttttagaatctgattttttttaaaagtggttggaggaaagaaatgaaactgcattcaactagactgaacttggtcaccattatcatggggattggtgaggttttctctttgttgatgtcttcagttttcaacaaaattgcttctttggaagtttttgctttttctcctaaactggttatataggaatgtagtaggtacaggtcattccattatataaatctgtgtttataaatgatttacttagctgttccagcctgttagttaaatatgtatttaaggcctgttttttcaaaaaaaaaatgtatatatagaaaaaaaaatagaagctcacagaatggatactgagttgctgaaaattagtcatttgaatttaaatcttttcaggagtttttgcattaggaatttacaccatatactcactctgaaaccatggcataaaaagtataattagtcacatctattaaaacagtgaaagaaaatatttggtaattttctattagccaataagttactttgcataaggcaattgtgaatactctttctcttcctaatcttaatatgtacacaactatacattcaatatttctttcaagaaaaccaaatcctacaaccccagaaagagattctaatttggttgttctccatttctctttatatcatttataaagcacgcaaaacaatttctggcctctgatttttgaaaaccataaaatcatttcaccacttaagcccaaactttctaaatcaaatttttactctaagaacaaatactttcaccatttataaacctttcaaattaaggttttgagtagagctttccagacagcctccggaaaccataccccatagcaacacatgtccctaaagcacattatattatgtggtgctctaccatagatgcccagtatttgccacagaaggaacagaacttgtcttaccccatgagtaggccaattggtcagtggaggagtgacaggtgagcagtcagtgaggtgctggaggagggtggatgtggggggtgtgaaggtttaggagtagaaaaaactcacactcggggctctgggttgctgggtgctttctttgcagccctggtttgtgaagtgatttatgggccatacatcaccttcctggttggctttgttgacaccttgtcacattcttgcttgggcttgaggaattcattgttcttgtttgaactgataagaacaaaaacaaaaatgaagaaagaaaaaagaaaggttttctcactgagaccttgggaaaagctaagggggtggaatgttgacgtggagcggcaggctgcactttcccaagcaatgcagccctgcgtctgctggctgctgcagcagcagggaagctttgcctttaggagttctggcagaagctttatttgccctgtggaagtagtttcctggcttggagctgttcctttttgctagaatggtactgtgcagagaggccttaggaggggtcaaggagagaggttttcctttgagaactgggagacataatggctgagaggagattccaatgggaggtaaaatgaccccggtcactgggagaatgtaaaacacacggtgacttgatgtgagctggtctctccaaagttcatcccgctgtacagcatgcattttgggcatggtgccatgctgacctttcccctttaatgtgtagtgccccatgcttcacttagtattttggcagcctgcacacagaggctagcatttgagcccagtgctttgaagagagcaaaaaagtttcagaatgagaactcttcaagtcactggttatacatagggtattatctcccacgtcaatggagcaatggatgacctgcctggttttttttttaggcctcttcccttttgtctttgcttcaaaaaaaaaattaatagattaaattatttgtcatccaagagaagtaaacaggtcagatcctatgttccatatcatgggattgtaaacgctcatatttccttttgtgaaaattttttctttaagagcagccaagcatgaacatactgcattcactaatattctctgtcatcatgctactgttgattgaaaggagaagaacctacttgcaccccagccaagggtgaggtgtcctggggagtgttcacacttttgtgttatactgttaacaagttcatgtgtaatgtaataataaatcattttacctggaagcgccattcacacatccccactatgaaccccattttgaactggagccatagaaaactgtttttaagcttcttaaaatggttctctgcaacaacgtttcttgtagaatgaggatgcataaacttgttataacatacttgactttccaagtggtccctgtaaacaagggatgcttgaagaactgccaagctaggtagccagagattgggattgaagagctgacattgttctaacactgaatgcaaatggaaatgacctaatacatgtgtaatagtaaagctaataaacgtgtaactgtatagcaattgcaggattaaaataagaagcaaattttggaaagcgcacactttttcttttgggtcatctaccttgctatgaagtgatattttgaataacatttaaatatctaaatatgtgtattgccattaatattgacatcaaagtttcaacacatatctgttttaaaaaatctacaagcccagtttccccagtttctttataactctgatgagcctgctagttctgcctttgcttttttcccaacttggaatctactctggtttccagaattaggtttattgacagtgtttcactgctctctgctggagaagcccaaagccaagccaggcatctaaggctctaatgacttgcaaggaatgcaggtgagatggctcagctgataaactcccggcctctgaaattaaactcaacacaagacttattcatactagtcgaagatcacagtttacaagctatgctgtacaggctagaaatgggtttctcagagagtagtataggtaagatagaaagtgtaatactgcctaagctccaatttcttgcttcgaatgttgtcctttgtaaagatatcctatataatgttgcacagaaactgtgcagtttctcaagtcaattttcatccttccatttttgacacataggtataaacttaattctggtatgtacatctgagacagtaatcaaccattcccctgaaagaaaaaaaataaagacttttttttatttttgagacagtgtctagctctgtcgcccaggcgggagtgcagtggcatgatcacggctcactgctgccttgatttcccaggctctggtggtcctcccttctcagcctcccaagtagctgggactacaggcatgtgccaccataccagctattttttttttttttttggtagtgatggggcttcgccatgttgcccaggctggtctcgaattcctgggctcaagcaatccacccaccttggcccccgcaaagtgctgggattacaggtgtgagccaccatgcctggcaataaagcacttttaactaaaatatatcaaatttgaaacaaactatatataaagtttttttcttctaaacttcatatttagtaagtgcatggccagaaaaaagagaacaagagtatgtaccaagtaagcaaaagtgtgttatgacatttttttcctgaaacttttctaggtaggaataaacattaatttacatcttcatttgcatgaacacaaaactctactataatctagatgctatacttctcaaatttaaaacaaaagtacaaaaacaaaaacagtaaacactttaggtgaatgttgtgttaaatgtctatattgagcgtatatgtacacatatatttatgcatatgtggatgtgtgtttatacatatattctatgtatatatccttgggtgggaacagggtgcaaagatctaagcataacatatctccacagggatttatgttcttttcagtctggtatcttttaacttaaaaacaactcgatgaatagaaatcataaaagccatccttacaacagcattaaagtgctattctattctgcagcattccaagtgaattattgctgtgctgtcaaagaaaacaaaaacatttgagaaggactgtttattttacagtggttgaccaaaagtatgcaagtggttataaaaaaatgtagacagctaacgatgggaggtgccacttgcacattctgaaatccattcacaaacctttgacactaactcttgatcactggagataatattagaagcaaagcatttttcacggggaaaatcctagcactttgaaagcatttcaggtcaaagcaaataaataaaacctctatccctcatcctgtatcactggcatctcctcactcacagaacctaatggcatgattgttttttcccaagaagagcaagaaaactttgcaaaaatatttctctcagaggttatggcaatgaaggatttttgtgccatgaaacacgtgttgccctttgtatttaaagattaaaataaaaactgctgttgacaatgttaatagattctttcattaaacaaatatttcattttagagctatatgggaaattagagacctcaaacacagtccctgtatattaaagataacaaaatgtatacttagggaagataaatgacttgcttaaggtcacacagcaggtagcatggaaggatgagttagaagtactagttcagtgtttgtatttgtatgttttgcctcagaatcagacaatgtacagttaagacctcatcgatatctcccggtaaatgcttatttaatgtttaagaattttcactggtaaagagattcttattccaggagtctaggtcttggggtttaggtttcttttacttaaaaaaaaaattcctctgataagtgaggattcatttaactttctggtggatcattaggtacctttcaagaaatgagaataatcataactggctctatttatcttagcatgggttgaaagatatgaaaagttccttgatatgactggcacgattctatcccataaaaccactcgtaaatatcagttgaaataatgcctgtagggaaaattttcaaatgtcctttctgtcaatgcagaaatgccagtgcagcttgttttctgggtggcatgtaagttgtagacaggcaccacattttagacatattatggtggtgcggtgaattgacaggcagtttaccaccatttccatgtattagattatgtgtacctctggctatcctgacactttgcccccaaagtggagatagtgaaagagaaggagagagggagaagaactcctcgcatctgtgcccctacctcagcagctcctcctccttgtctctgagggtctccagagtttgagagtttggtgtcatgttggcccaagagactgttgtccttttgacagctcggctgtttgtatctccagaatgaaacataatcagatttttttcagatgtagcatctgccttccctccaacatccttgggttaatcacgtgcttgctggccaggatatgtaaataagacttggctaaaaaaaacccttaaaggattatgaagcaatcttgcttaatagtagcagaacaaaacaaaacaaaaaaccactccaacaaatcctcctgtgtgctaccaagtaatggaaagatccagttatgactggaactgtcctggcctgagtattgtcctggacccagagggagcgaaggagggagggagggagggagggagaaagagagagagagaggggagaaatatgagaggaggagagaaattgctgaaggagagcttcactcactgactccgcacacattccctcccagtggttgctaatgaagagcccgtgctggtgaaggaagcctgctgatcccggaactggccttgcgcgcaagtggtgggatgacagacacattcccttccttgaactgcactcttttcccttgcactcagaggtggcccgagagagccccggtaggtcccggagtatgtttccatgctgcagaaggcatggagagattccaattgcgggggttcctccgtagcctttgcagctgaacgtctccatctcctgtccctgggcggtcagtcgctggcatggctctgtggagttttacctcccagttgtctatcaccaaagctgtccaccttgtccggaggggaatgagcgtggaaacccctggcggctgtactgacaaaagcaaccttagtcaatgacagagctgggcaggcggcgaggtcttgcgggctggcctttctgctgctggtaggaggatcatgtgctgctatttcggaggctcctgccagttggcccctgcccaccttttctgttcatactgaagcagccaggaactgagagaaagaggaagcctcggctgtgctccgggctgcgctgccagggttgcgtctgtagcaggtccagcagcaaaaacaaaacagggcagagcccagggaggccccagccacagcagctgagtgtggaaacaaagcagcccgcccgccctgggaagctgccgcaggctgtggaagggaacttctagagaggctgcatcctctccaagccgggaaactgaggcctagaagacatgtgacgtatctgagcagtgaccaagccaggagtagaaatgtctcctgagggcctgtccccactgctgtttggttttaatcgctcagctcttaatagtgtaaccctggacaagtgacttactctccccagcctccatctcatctgtaaaatggggatgagaaaatacctctaagggttgttgtgacaattaaatgagaaagcataaacaaagcacttggcacaatgcctggccacttaatgggccctcagtaaatgttggctagttatgtgaaccagaacttgagatggaagtgaagcagaaacgatagggagttgttcaaaaatacctgatctgctagggaaatattttttaaaacaaggctgcttttcacaaggaggggtaggcacacttgaattaagatcagattgattatatgtttttgttcagctttgatgttgaattgtttaatcaaatggcagactctgccccgcttccaggaagagctcaactccaactaggaggaagcaggtaatgtgagccatggcatcttccccgtttagatttcctgactctttgtttatcttctttgtcaatgtgcgtctgaaccttcccaacagagtttaaaatgttcaacttcaaagctaaattctgatggaaaacacttcctaagaggctgaaggcttactctaggggtgaaagaagaggaaaggcgatggatcacaccacatttgtggaaaatgttaatgctatgtgatcttgcctccttagacccagatagatgcaaaggataaggaactcggtttatagcaacagatactccaaaagtgctttgcatcctgttctgacactaactggttgtgaatcacttgttaaagataaggataacaacaataccatttcttgagcccttactgggtgtctggtattgtgcaaagtactgtctatatattacctcagtttccacaacaaccttatgaaatatttcttccttttgtgatgaggaaagtgagacttagagagaagttaaataacttgttcaagatcactcagctaataaatgctcctatgcacttagtcactgtgctatgtcctgcttaccccttaatgttgaccttaatcctaacttgaatttaggttaatgtctatgcactgcttttttttcacctgcaaatcaagggctgtactaacagttttgctaaggccacttctttgaaaattgtaaatatttccagaaagaggcacagtttacaataaacattcttgctttccaaataaattctcccctattaaaatcaatgtaccagttgttattttcatacctatgcattgtttaagatagagagttcaggacacaattgaaaactgggaaaaataatctcgtggttcggtttgttagtttgagacgcagtctcactctgtcgcccaggctagagtacggtggcccaatctcagctcactgcaacctccaacctcccaggttcaagcaattctcttgcctcagcctcccgggtaactgggattacaggcgcgcaccaccacgcccagctaatttttgtgtttttagtagagatgagattttgccatgttggccaggttggtcttgaactcctgacctcaagtgatccacccacctcggcctcccaaagtgctgggattacaggtgtgagccaccgtatctggctctcatattttttatatacagattgaatatccctaatttgaaaacctgaaatctgaaatcttccaaaatccaaaactttttgagcagttacatgatatttgaatgaactgctcataagaacattttggatttcagatttccagattagagatgctgaagaggtaagtataagacaaatattccaaaatctgaagaaaatcagaaatgcaaaacagttctggtctcaagcatttcagacactcagcctgtatttgcatgctcatggctgttgggaaaaattaacatattcaccaaattgtgcctggtcaattgataatgactgatcaatattaatgcacaagtatatctacttttgctgtcaagggcaaaatttaaactttacttgcactagtctttatctctaaggaaacttgtacatttatgcatgtaatttggtatcctcaaggtaaaaagtccaaatagcattatttactaagtgaaatttctctattaagatttttcatatcctaatggaattatgcttctaaattctcaatatttattagtattgttgaaattttgtgaattagattcatctggattaatatgtactagaatcattacctgtatgaacttggacgcgtttcttaatctatctgggccttagttgcctcagctgcaaattgggaatgaaaatggtatcatcatattataatggttgttgagaatattaaatgagctaattatgtaaagtgcttcaaattgcgcctggcacatagtgctatatgtgttaattaattgtattaatcacttgtgacttccaattgattctattttaattgatattctataatataatttgcttccttcatctctcatgtatacaaattaaatttgtatagaaagtcttctcttctaagaaattttcattcttgtacttcaccctctctttagctctgtagtaagtagtttctgtttatttattccttagaactttatctagagaagcttttgatattaagctgtgacatataacagatgaaattacagtcattgaatttattttctctgaattacagattattttaggtagaatttatcttccttttttttctggtgcccaagtcttagagaaacatgttttcagccctgatcatgataaatagtgggttttttaaatgacatcacgagatacatatttctcagatacaaaggattgttgttatgttcttttggccagaagacactcgtcttcctgggaaatgtagccacaaaatgctgggttttagttttattaatatccttgtagattaaaaacaaaatgttttccctctaagtttttgttcttttccatttggcaaacccggtgatttgccacatgagccaatgtgtgtctcatttgcttattttcttgtgcactagcagccctggtgatagcatctggaatgtgtgcagtccctgggaacaaataacatgttggaaaatggtttacttggtggcagcaggatcgctcatgcacctgacagcacatgccacgtatctcaagccatttgcctttggtaaaagtagttttaagataggctgcctctccccaaatttttgtccaaataataacaacaatgataagaaaagatttttataaccaatgactttgagagtcagattttcaaaattattttaatatttgagctgatgatatcaactatgccatgaaattttgttttgttttgagggaaattactcagttaaatggggaggaacccttagttccgggaactgcccacccctttcctggaaaacacatgaataagccacccccttgtttagcatataatcaagaaataactttaggtatccttagtccagcagcccaagctgctgctctgcctatggagtagccattcttgtattcctttactttcctaataaacttactttcacttacaaaaaaattactaggttaaactgaatcaagaaaaagatcagactttgaaaacttggtttacatatatattatatatgttggtttattttcaccattcttaaaaactgttcattgactaaatgatacacagatttaagaggttaagagactgagtggaatttagaccagactgttcttaagctgctttcaagctcacatttcacttaagggtagggactccctgtcacccttagtccctgtttcctcctcgcggggagcttctttctttttctctcttttttttttttttgagaccgagtctccctctatcgcccaggctggagtgcagtggcgcaatctctgctcactgcaacctctacctcccaggttcaagcgattctcctgcctcagcctcctgagtagctgggactacaggcgtcctccccatgcccggctaatatttgtagttttggtagagatggagtttcaccatattggccaggctggtctcgaactcctgaccatgtgatctgcccgtctcggcctcccaaagtgctgggattacaggcatgagacacaacgcccggcggggagcttcttttgattcatcattcttgcagggaattactgagaaggacgtgagctaaaagacaacacagaggtgttcgaggaaggaggtgtgaatccaaccaggccagaccattgacttccagagaaatttccagacaaagcttctcaacccaccagccaagacccaacccacagcggtcactttcactctatcttatcttgaacatactcttgctttttcaaggcacagtctatagaattccacattttctgttttattcattgccttcctcagtttcccttaataagtaagcaagacttgaactacaggttatgaaattcttgggattaatgactgagctaatttagaaagaaatgcatgttccccatggctcaaaaatatagaaagccaattacctaactcctatctatttgacaatttaaatgatgcgttttctataaagagttcattacacaaacgctgactccccccctcataaaatggatgatattttagtgaggcgtttcaaagacaaaagagtttgatgacttggtttaaggccagttcaatgaaggcaatgaaaaccttatcttggctattctttttcaagctggcattccaatgagtcaccatatggaagaggattaaggaaaatattttatacttaggctaggcacagtgcttcatccctgtaatcccagcactttgggaggctgagatgggtcgatcacctgaggtcaggagttcaaaaccagcctggcaacatggcaaaaccccgtctctactaaaaatatgaaaattagcctggtgtggtggcgtgtaccataatcccagtactttgggaggctgaggccggtggatcacttgaggtcaggagttcgagaccagcctggccaacacagtgaaactccatctctactaaaaatatacaaaaattggctgggcatggtggtgcgagcctgtagtcccagcaactcaggaggctgaggcaggagaatcacttgaacccaggaggcagagattgcagtgagccgagatcacgcctttgcactccatctcaaaaagaaaaaaaatttacagttaggatttgtaaaattttaaaaatcttaaagaacaatagttaaatcttaccttctataattaaaataattaaatattaaggattctttggagttgcgtcattaggagctttacagtaagatatcttactagccaatattagcctgccacaggcaaattaaaaaaaaaaaaaagcaatgacaacaacatttgagtttgttaatctaattgccccttccttgccatcactccaaggcattaatgtgtcttttagatgattgcattaagttttctattagaatttcctctccatctctctcatacacacacactcacacacacagacacacacaaaccccctagccattggtgttcctgaggttatgaatcccctttccatagcggtttgggaacataggatatagtttatgagttagggaggcacaaatatgttcttaaaaggaaaccttcaaaccgactgagtgcagtggcacacacctgtaatcccagcactttaggaggccgaggcgggtggatcacttgaggtcaggagtttgagaccagcctggccaacacggtgaaaccctgtctctactaaaaatataaaagttagccgggcgcagtggtgtgcgcctatgatcccagctactcggaggctgaggcacgagaattgcttgaacccggtaggtggaggttgcagctagccaagatggcgccactgcactccagcctgggcggcagagtgagactcagtcccccccaaaaaaagaaagaaaagaaaagaaaccttagaataaaactacctttgactcatagactcattcatccaataggaatagagtgcccgtggtgtgctctttttttttttttttttttttttttttgagacagagtctcactctgtcgcccaggctggagtgcagtggcgcgatctctgctcactgcaagctccgcctcccgggttcatgccattctcctgcctcagcctcctgagtagctgggactacaggcgcccgccaccacgcccggctaactttttgtatttttagtagagacggggtttcaccgtgttagccaggatggtctcgacctcctgacctcgtgatccgcccgcctcggccttccaaagtgctgggattacaggtgtgagccacggcgcccggccccgtggtgtgctaactcttatgacaatgatgacatagggacccagggaccaccctcccgttagagatgcaccatgctcagcccgtctaacttcgagcctgctctttccaccaataatcagctgccttctgtgtccacactaggaggaaggatatatgcttgatatcttgttttattatactgttgaatttcatcatcaccctactcttacccacaaaaaatacccaaagtcttaaatgtttcttaaaagaaatattagttgtgcccattttaatctcctgaactttatgacccttgtccaatgttcaactagacatttaagatttctttcatttggcttttggtaagactcatttttggaattaatacaggatcactgtttgttctcctcaagtcccagaaaagaaaaagggactttttcctacaaatcaaacttcagcataccacgagctgccagtgttatttgctatttgttccttgtcttttccaacaaagtgaccttagcactgaatcaggaatgcttagatgtagatgtgcacagaggaccctttgtagtaaatatattgtaaatacatatctaataggtaaatatacgtgtatatgtatatatacccacagatttttaaaaagtgaatattctagagagtttccattccaagaatgctcattgaaaacacagtacacaaaaggccaacaaggaataggatagaatattccagctttgcagaatggtgagtgaattgggctttgactttaaagaggtatgtaggtgaggagttgctgacaaacctgtttgaaagtggtttatgtcatgggaaagtacgtatcagggctgttgcgaggattatcttctttctttctcacagcaactcagtgcggtagactctgttatcatcctcatttcactgatgaacaaaccaaggcacaatgaggtaaaggcatctgctgtaggactcaatagctgatgaatgaaagagccaggcagggcagactggcttcagaattgtactgttttgcttcctatttctccctacatcctagccccactcacatggaaatcactctgaaaaattcttctgtcttattccctaaagacagtccagccatcttcctcctaattcttacccacttgtatttcttctataattgctacaaaatggtcctatacaacaacaacatcgtcaactcacagagtagaaaaaaagcaaagaaccttacaaattcctctgggctaattttatcagcaaaacactcagcaaaatgagagttgcccaagtcctgaaaatcattatgccacaaagttagtggttaccaagttcagcccactatttaagtatagtcatttaaataggccactatttaaaacattgtgttatcctcatatactcaactcaatagtacagagaccatgttttatgtctctttgcacgtccagcccttagcacagcacctgaggcatattcctcaacaatttatgcttgttggatgaatgatggactgaataaattaataggtgttagcttttagttttttcaaaatcatgcttacttattcattaatatattcttgtgatttgatcaatgcaaagaagagcaagatcatcatctagcattatcctgaatactatttaatatatttctataacgttgcctaaggtatatatcttttgttttgttgttttggaagctatactacacaattgactcaagcaagctacatataccatgaaaatcagcattgttctccctcacaacccccatgcacacgtactcagctttcagatagacctgaactccatgaaagggaagtccttcttggattaagctgagattgagaggactattttaccgcttcttcagtatattctttttttttttttttgagatggagtctcactctgtcacccaggctgaagtgcaggggcgcgatcttggctcactgcaacctctgcctcccagtacaagcgattctcctgcctcagcctcctgagtagctgggatccctggtgtgcatcaccgtgcccggctttttttgcattttttgtagagacggggtttcactgtgtcaccatgttggccaggctgatctcgaactcctgacctcaagtgatctgcctgcctcggcctcccaaagtgctgggattataggcatgagccatagcgcccagccgacttcttcaatatattcgtatatgtgaattgagccttccatttcttcctttacctcctctttcatccattggaaccagttgactttttaatgtaaagtatagaaactcagccgctctgaccctgttttgattccaaacccttgtacctaccagaccatttaggaagactgggataaataagcattataactccagggagctttctgatttcatgatccatttctgtttcttaggggccagacagtgctaggcttacaggagactcaaaatctgtagttaaccacagcaataaatgaacacaaaggaaatgcagatgtaagtaggggataaactttgagtggttccatcagtagtgattcatgatgttgaactacaataatattttcctccacacactctcccagttcccattgtgacactggagcagcatttagggaagacagttaggcttgggggtgcgttctgtggtcatggctgtggaagattggtcctacggctgttaatctggctgacaaatgtttcatcaacatgcattgttgaaagtgacatgatgcacagtgctggttaagagtcgcgtaaataataaaatgcccaagatgggagaagagcagttttcctggcttctccaagtttgagctgcagaatcagaagcagtagaatagagagagaagagacaggacactagcttgggttccagccccaactctgctgccctgtgctgcgtggctgcagcaagtgacttatctaataactgtgggtctcagtttcctcactcatagtattaatgatcatttctcaggagtattaaataagagcatgagtttaaagagcccagtcccgtgcccagcacaacggaggctaccctccaaaggtcagtccctttttctgtgtgtttcatcctctcttggcagcctgtttgctgcatctctcagctgacttttgtcccttcctgctcacttagtcaattcagagattacagtttgtacaataatgcgctgccttgtcttctcgctggtgaatctggaccggagtgctctgcctctgcgccgacactcactctgatggtcttggctggaggacagaggctgctggcaaaaacctaagagggaacataccgtggtagcagcatgaaagaatttggcaaggaggtgctcgtcacatgattgtgattcatactgtactctcaaaatgtggcaggagggctaggagagacttttaatgccagcacacagagcagagacactcattttcaaacatcacattctttttatagtacaggcatgcctcacagggaaaatattgaacttggcctgccagcaccacgagagtcgtcccaactgtgattttattgcttgagtcactccctgaatcagatactggctgcacggaggaagtcttctattagggatgctttgaaattgtgtttttaattaattaacaccaactctggacaggtttttcatttactcctagctgactcttttttgtcttttctttttttgcctgaaacttgttagacatttttgtaaggtctcagttggatcgcttttaagtatcctggtgaaagagtcatctgtgttgggtgaccaaagcgaggggacccttcaaagtagagtttgtcatctccgagagaatctgatccatgggaatggggtcgtcaggaaaacggtccctaaaagtctggcatagcactttttgatgccttcagccgtcctcaatccattcatcctgttgttaaaacttaaaactagagctggccagctgttgagaaaagtcctcagttttatttcaaccaaatgatgctgcctcctggggctggaagggggctgacttcaagcacaattataaatgtgtagctctttcaagcggcggaaacctacaaaatggccttgattcacagggcccctctggctcaaagactctctgcttcccgtgtgtcataaatctgtatctgcatcaaaaagtgtaaagacggcagtgtatggaagtccctcttcctctgcgagtgtgtctatgacagatttatactgatggctacactgcaccccggtcacaggctcctattatagtcatgccccactgactcagcccccatttcctgtggaaggggagacaaggtcctgcatgaaggagggtgaaattacagctcaactctcgaattgctgttagtacaggaggacctttaagggctgcagcaagacccattttgttcatagcaacatctactgtctcctcaccccagtgtggtcacagctaaaacctaaggcatttagtttcatgacaagatatgccatgacagggtactccagaattcaacaaggccaaatggatacatgcgaaaagaacaaaccacctcatttgttataatttttgtttcttcaaagtggttttctttttcttcctgagggtacaagtttcaaatgtggaaattttttaaggtagcatttgaatccacctctctattagtatttgcaaatggatgcagaacaggactggtttttgaaaccacctccttgttagagatttttcatcctttgcaaacattgtagggtttcagaggtagcggctggtgagaaccctcttgtgtttgactgcagccttcgaggtttagagctgtcctgcatttcagggggtgaatggctactggtaaagaggtcaaaatgagctttattccaagagttaagcaatgaagttgcaaagtttaattggtgtaattttgggagataaggatggaaagggaaggatgttaggatagtttgaatcctctaagaggagaaaaggcaaaactgatatttgactttcccactgtatttagagtatagccttcatggggtagctgtttcttcttgtgtttggtatggctcagagcacttgaaaatgtcactggctgaagaagagtgcttgtgatgatattttttaattcactttttttgtagactttagtactataaagaaatgatacatagaggggagtaaaaacttgtctagctaacaattggtattataatggttttgaatgcacagttctgattaaattttatacatttcttccgttggccaacttatcgtgagcctggttgtatgcctctggtgtttgtatgatattcactgcatttttttctaacgtgttaaggattctattttaaatagaaaatcagattgcagtttgaaaaacttagttttaaaactctaccatctgctagatttgtggaagaggatctggtaaatgaaaattgtgtgtgtatgtgtgtggtttattttataggcactgcatatttctttgatgatctattttccaagctcattcttatcttttagaagatgtttcaaggatttatgcatctggcaagatttcagagaactctatagtggtggagatgtacactccatttatagggaatcctgaatcagggtcattgagagcatttattttgttttgcgcttaaatttatttctgctctggacatttctttcaaatggatcatttttacatggtcaaatctaagcattttattcataagaactctaataataaagctttttcagtccagacataggtggaaatttgcaaaatgcatcaggaaagtatggcaattgcttttcaagccatcttgtatttgagaaagtattgcattcattagtgtttgcaaaactacctttaatggtgcaaaagtaaagctgacctctcccttttggtgcacagatgtataaactttatggaagtacaccccaaggtagagacttattggagtaactcttagaaagggcaaagttggccataaacagtgatgcaataaccccacaattatgtatgctcaattatttggaagggaagtctgggagaagtgttttatatgattacatgggcaaataagaagtgagtgtggagaagcacggtccaaaggtttgcatttgttgtgtatatcccaaatagcaccctaatacagctttataatgtaaatccaccggtaccagtaaaacagcatttaaaacaaattgtaaaatgaacaacatttgcaaagcaataaagaaaccacctttgcaatcactttactacagttttgaaaaatgttagtgaatagctctccaaagatgcaagtaaataatattttattagatttcagcctaggagaaaggggaggaaaaccttcaactagaattacatgattattgctttgctcctccctcaacccagcaaacattaaaatggaacataaagcaagtctataacaagatttatgaggaaaggtattacacttaggggcacattgtgcagaaaagtcattaaaattgtttgggccttaagaaggggaaaaaaaaaaccttttgagaaaaatgagaaactcagatgtatcaaaatgccttccttatgattacctgaggctttaggtttttaaaagcctttgtacctaaaggttctgattcattctctattgtggcaactttttcctaccagacaaaactgaaagattttgtttctctaggaaacatacttaaagaagtatagtagacctggcattccttttgcatgctctggtagaccccggctcttgtataataaaaacaatataggcatgttatatttgccatatgttagttagggggtttcagcaaacaaatacctccttgtgcacagaagtagatgaaagcaaagcttactgatgtctactatgccttaacttaccttctttgtcctacatagtctgcctagcagacttctttctggttggttgtatgcatatttggataatggtgatagctcagcatattctttatgctttgttccgctctgaggacagctagtacactcgattcagtattatatgctttcctatttccttgcctgatgcttctgtgttatgctaaatctcagtttattctgtcagtaaagttgaggagagtgagtgaggagtgcgtttgcatgtgtgtgttttcttatctgtaaagttttaactttggcttactgtttaaccaggaaactcagcaggacaaaggagatctaaataaaactatattcctgttgagaatctccaaggttatgcaatactataaaatggtggtttgagtagaagttctgtagttcatccttatcagactaatggttttggggtttttgaaaaggaatgtttcaaggaggtctttgaaaaccattttcttcaaatgttcattgcatctgagatcccatttttgtccctttatttgctccagaataccgcccaactgccaacaaagaagggcttgtgctcccaggaattttctgcattcctctctggagtaggcatttttctcagctacaaaggccctttggcgaattccctctaatcattggatttgccctgggctctgataggtgccattcatggacttggtctgctgtttgatggggctgaggcattaatgggatcttttcatgataaacaaaactgggtaacattaccagagggatcacaaagctgctgttgtagggggagtgtggtgctttctctctctttctctttctctctctctgctttttccttcttcctcctcttctccctgttctttttatgaacgcacatttgtgtgcgtgtgcagcatggccatttctagaagcagatcttctgacctttgctgctactcgtaagtcaatggccaatggcaaggcctttgttgaacataagatgattctatatactgatctgatctacagtagcttcacagcctgcggggaggtctgtgttttcttaattgattaaacgttggaagaatactgcatgaagaatctgattttgagatctttcttacatgctggcatttaattactgaaagtatctggtagttgagatgaatgagtctgggggaataaatacttaacacaagaattcaacttcatgtggctgctgtggtggtatatccctggctgtgttatcaatgccagactgaatggggtaactcgtcactgttgttgtatcctatttgcttctcaaaagaatgcaaaaatggttagttgaaacctgattcctgcaatagtgaagaagtgaaattagaattattttaggtgatgaacactatttttttaaagtttttatttttgtgggtatgtaggtgtgcatatttgtggtgtatgtgagagattttgatgcgggcatacaatgcttaataatcacatcagggtaaatgaggtattcatcacctcaagcatttatcctttgtgttgcaaacaattcagttacactcttagttattttttaatgtacacttaaattattattgaccatagtcaccctgtggcataacactgtttttttgatgaaaagaaactgacagtacaaactagagaacttgtgatcatattaacggcattatttttaagtttctgagaaaattaaggaaaaagtttcttattttaaatggaaatctctgatgtaatttggaaataaatagtacattaggcatcctgatagaggtaattctacttacttgccatgcattttcttatgttccatctgaatactggggcttaggcaaaaggacaaaaaggagtggtcagggagagcacagagtgagcaagcatgcagagcagcgatttaaaagtcaaaaggaatgttaggttaagggaggatgggtgaaaagcaatgcttattatttgtcctaaagcaagaagaaaggccgggcgtggtggctcacgcctgtaatcccagcactgtgggaggccaaggcaggcagatcacctgaggtcaggtgtttgagaccaccctggccaacgtggtaaaaccctgtctctactaaaattacaaaaattgactgggcatggtggcacgcccctgttgtaatcccagctacttgagaggctgaggcaggagaaatcacttgaacccgggatgtggaggttgcggtgagctgagatcgcgccattgcactccagcctggatgacaagagcaaaactccatctcaaaaaaaaaaaaaaaagttaaatgattcatccatcggaagggatagcacagtgccctcgtgtttccaccagccactgatgctaattcttcattttaattttgccttgacttcctggctaagtgtatgtattttaatatgagtttcagcctccaactaaataacaaacaggacaccaggcttctgtctagccaaggtgtcgtgatgctgtttaacagcccccaaatccctacctcaatacattttaaaatatccaggtgctgtaagtcggatgggaaaaagtttgaggagagaaagtcattaccttcggtagagcagcactttattcattttttttttcaggttttgctttttgattaatgctttttgttatcatctgttcagtataacatattgtaaatcataaactcagggttcagatctttcagagacttttgcaacttgaaaggtggagcttcccagcctcaaggaaatctgcagtggctagtgtttcccacagggccccattacccagtcctggaaaggtgctaacgaggcatctttttttttcccagtgaagaaaacatcatgcattttaaaatatcggtgttatctgatattcacatgtttcaaacatatggttatagtacatattcaacagcccttaagggcttaaatatcctttgtatgtactataatcctggtggtagccactatacaatgagcacctactatgtccagcgcatgattcacattatccttaatcctcctagcctccctgccaaatcatgttacgattattcccattttaaagatgaggaggccgggcgcagtggctcacgcctttaatcccagcactttgggaggccgaggcaggcaggtcacaaggtcaggagatcgagaccatcctggataacacagtgaaactccgtctctactaaaaatacaaaaaattagccgggcgtggtggcgggcgcctgtaatcccagctactcgagaggctgaggcaggagaatggcatgaacccgggaggctgagcttgcagtaagcggagatcgtgccacggcactccagcctgggcaacagagcgagactccgtctcaaaaaaaaaaaaaaaaaaaaaaaaaaaaagatgaggaaactggggcttagggaggttctggtgttaaaagacaatggagtcaatttccaacgatgcctagcaagtggcactgactgtgttcatcctattttgccttctggtcagtttataactcgtgcttccgaacagatgaaaacttaaaagtttagttgaatatccaaatgtttccaaatatccttatatttcatagcttgtagtttatgacacatttgggagcaagtcctttccaatgtttatttattctctatagtacctacatttaacttttttctcccataatgacttccgatcctacttctccctgattcagtattcactccattacttcactggctctcttccttattatctgtcacaggacacacgcactttggaaaaatctgccttgtgatatgataattgcaggatgttttctgaattgcagaaggctggagtagagggggatgagggtttgaatcaagtttatctctggatgagaggaattttggcctgggaaaggaactggaaacgttctgaccagctttccgaatgctggttaaggaaaagcctaactcactctagactgtgctctgcattctagacattttatcatggtctgcacccttcaggatcttatattctgaggaagaaagtgattatttcccaggttgtgttatttttatgaagataattgaagctcttttatctctggatagttttcattttaatttatagatatcccactgcatcttaggaaagctgatatttttagttccaaactactggatcacattttacctgctggcacttttgctacctgagtagtttcctgacacttggggtttttctactattcaagttagacactaaggcaactatgcagggaatttaagcaaataataaaatcaaaagaggagggaaacctttcgtctcaatcatctgaatattttgtacttttaaaatctttacggatagggtaatattttaatacttataacgacttcattattttagattatcttgtatatgtaatttacattactcttctaactgctgtaagcaaattaggtcatgtttactctgtagtcagtgaaaacgatttgttcgaattgaggtctccttggattatttcagtcatagctacatctctattagagagaaaggccactaattatcagcctctctgcattctctaggagggccttaatgcactctaaatttgtacatgaagattttgttaagaaaatactagatcttacatgactaaatggcacgctactattccaaggagcttgtttttagttttacttctcccctggactccttttcagggtgttttcaagcaaggtagaatctgttcctaggtcacagcatagctgaatgccagagagcagaacttaaccagacctaaatcttgaacctggttcaggtagaaaccagacaagtgtcattaagttttcctcttagtagccacagcaagctcacagcagcctctagccaaggaccaagtatatcaaaggagactgaccagcactgtggactgcagtgaatgcatagagcggggtatggagaccacagggacaattttattttttcttgttctctaaaagaccactaggaacaaaatgagcccaatttttgtagtacaagcgctggtaattactgaacactcactcaattcggttaataaagctaaatatacccaaacaggccattgttttgaagggagattttgtggtgtgctggaggcacgttggagccaactgttacatttttagaaagtttgagagctggttgttaaacatagcccttactaaaaattaacatatataaatgtataattaaataaattatgtttaaaaacaggcaatgtgtaaagctcatcatttccaagttattcttctggactttactattatttatgctcttgatgttatttatgtttgttgtatctatgtggagaaatactccacatattatgtgtggtatgccacctcccatttctttccagctctgtgtttagtgatgacacgttggcagctgaaattgaccatggtaggagcatttacaccacagaaattggcaaatgctacaagcaggacttgacaggttgttttgattattaactagactttaaaaaattattgagaacattttaataatgcaggttaaacaataatttcggcagcctttacattataaatagcataaaacatttaaggaaatattctttggatattcaaaaactatcatccggtttaacaaagaagtcactcacattattgatgaatgagtaaacctttgacttcactgtttcactttggttttacttattgatataaagaaaaatatcaaccaatgttcatgttgaaactgcacttatttgttaatgacatgagctgtttctttgctgaaatgaatagtcaccaagcgtttatttgttgtctgattttgtgacactgttgttggtgatagaattacaaaaactgatactgaattttgcaagaaatagcaagtgaaacaaattacaggtgtatggaatttgaaaacagagtattacatattttattatcacttgtcaattatttactaaacattccttaaatcactaattttataatacacttatgaatatgtatatatgcacacattgttttttctcccagagatcctgacgttaaacatttactagataatggaagacaatggatgccttatgacatgaatctataaatcccccacaattttctgttgagtcctatttttagatccttgttattcgaaggacacaagcagaacttttcaaacaaaataaaacacacacacacaaacctaagaaacacgatctccaccaacttaatattctgaagtatgtgaaaacgaagtgttttatgtgagaaccataggaatgtttttcaaatataataaaaatggatggtgttgattaacttactttgtaaagactttccttagtttattctctgagaaacgactatgtagcaaactttgtcctgggctctgcaccaatataaggaggacttggttcctgtttcccaggttgagcttaaatgtttgctgtaatatggatcatcctacttttaagagttttttttttctttccaaataaatagctaaagagccattttcagtttcttaagagaactgacgtgaatttgtgaagaccgttgatcatcttaatttgtcttccatagatagtaataaacaaacaatatcgaacacctgttatgtgctacattctataccaggcacattcctcaaaactaatcttttgaaaatctctgtgagctcaattataatatcttcattttacacaaaaatgagacattatactggtaataaatgatgaagatgagatttgagttcaggtttttctgactcaaaaattctctgtcttttctgaaaaaatgttttaccccaagagcccttgaaaaagaaaacaaccaaaaattatattcctttaaattactggacacacactgagcctggggaaatgctttcatcaagtgtgagaataaaactaagtgacagctggatggccagatccattttctgcaatagatagcagagtctgagaaaacagctgcccagaaatgaggaaatggaacagacagtatgttttggtatctttttacattcagaagaaagtagagaactatattctgatgtcattagtcatctctgatacaaccaaatttttgacctgctgatactacaggatttaattgtgaaactcacggtgtggcctaagataattccaacttcctcactctcctcttgtcccatacaaaatatcaatgtactaattagtacttaccagtactaattcaaaattttatatctaaattttgtagagtgagatagttatataaaccaagtagtagtattagaaagaaaataaagcaagctgaagtaggatctaaaagaagaaagagaatacattattcgtatatattggtctaaatgttgccctagtttgtttgtttgtttgttttggtttgtttgtttttttaaagaaacaagcaccaggatatgagatgtcactgggaataccatttcccttcagctgctttatatttcattgtctcttggtttagaatgtgtttatatacacataaatatattctccaccaaatatacaatttggaactaatggctttgctgattgaaaagactgaaacttgtgtcacttcactaaagcatttcctaaaaacaaatgccataaagttaaatgtatatatggccaatgtatgctagaaaataaagggacatgtaggattttaaatcaattgatttttcagccatcagtttgagtaacataaattgcagactattaggaaactttggagaaatgcataggctcacagtaaaaggatctgagtggggaaaaaattaccttctagggaaagccaaaaagactgtagtcacaagagcagaatgaacatactgagacatcgccggggaggtgggggcagagcaagggtctctggtaaacaggagccactgtgagaaggatccaaggtaaaaggttcgagaaatcacagtgagtatttttttttaggttaaatgttagcaaaatgcttctgacaggcgtgtcaaacactgtatccgtggacctacagaggctgtttgtgttccaagagtagtgcttcttcattctgaggaagaatagggatttgatcacagaatttctgaactcagagttatgccacgtcttttggctttttgattggtgagaagtaaggcttctgtgaataactagcagataacagataacatccatttttgttgctggaatgaaataagacccaacactggcaaatttacattcatgataacggcctagagccacttgatttcctagtggagataaagaggtaatgttttatttgggggaagtggggttatatttgtcagtatatagtagtaaataacaaaaccaaacacatcgcgtagcgatccatgagcagtaatgataatatcttgaatttgtacagtaatttgtaaagcactagttaatcagagagaactttaaatcattagcttcattttccagaggccctgggccagggacgtctgacagatctgttcaacgtcatagaattaactcatgggttgagaggctgggcctagaatctgggcatactgcttccacccagtgtgttccttggctcgttgagtgaccaaagcaccgcagtcacccagtctacctctagattatagactcatcaaacaattgaagctgcagagcaattcatttttaaatgacttctaatatgaagcactacacaattatcagtatgcccttaccacatagaactgggacctatcttgtttttccacagtagaaagcattcagaatcaagacagtgcaagccaccttctccagttccttagcaattgttctttaactgatttttttgctgcaactttacaactaaagaattactgttttataaatgaataaaacaaggtgcaagagaatggttctgatatgcacaactggttgatttgatgattctgaatgatgtgtttattaattgattcaaataattgtttttgacattttgaggattaaatttctggctagtttgatgatactaattacttattttaaaactcttaaacatcctacatatatataactctacagccaagtcagcttttggttaggtaaattatagagtgaaactgtatagagtgaaaatttttttcactttgggaggccgaggtgggcagatcacctgaggtcaggagttcaaaagcagcctggccaacatggtgaaaccccatctctactaaaaatacaaaatttagctgggcatggtggtgggtgcctgtaatcccagctacttgggaggctgaggcacgagaattgcttgaacctgagaggcagaggttgcagtgagtcaagatcgcgccactgcactccagcctggacaacagagcaagactccatctcaaaaaaaaaaaagtttattttaattgcagataaatagaaagtcatttatatcagtctttgaaatgcatgtcctaatttttatttcttagaggtgtggctttctgattattttgggagtaggttataatgaattgactttatcacacacacacacacacacacacataatagaaaataaggataaatactaaaatgggcatttttctgtataattaacaatattgatatagtcagttaaaccaaatgaaattgccgtttttgtaggtaaaaaaattgaatattgtctatttctcatgctttattctgcttaattttgtttacgtgtttatcaagcttcttgtatgggattccattgtattttgaaaccaagctctcttccagaagaaaaagaaaatggaaaaaaaaattaccaatattcaaatattttgattgttcattattacagttttataggttgaggaatagaaagaaaaagcagaagacaaataaaatacctcatgtccaaacctgtgtgtggacactaactccacagcacagacatgtcatcactcaactccacttcttctgagaatagcgacacagtgtgcatgacaatgcctgccctgtatatgcacagtactctttgcacgcttctacttacataaggaatatttttctttaaaaaatactttccttaaaaacacatatattcttaaactaatacattctctttagaaattttagatgactcataaaagctgaaggaataaaataaaattgttgaatcttactactcagaagaaatcagagttaatattttagtgtaaattttttatctatgaagtaaacaattttaaaagctaaatatagagtctcatttagaaaatatgtattataccttgtgtaattttgtattctttacacttcacatgatattgtttcccaagtcattaaatattcttctaagtaaccagattagatcagcaatagttcacttaaaacagcgaacaagctgcattaaaaaccagccagagccttaccaaagagctgatgctatgaataccaatcatagcttagttgctgttccatatgttaatttaatttgacagagtaagagtctttgaagtcctaattctcttttgcatccaataaaccagtttttatagtgcgtgaacttttagacatcagcctgcagctaaactcatgtcgggaagttgccatgaggtcacacataacaatggcttggaggggcgatcctttggaagtcttgtgggagaggtgaggggactgtcaggggtcacttggggggtcagtgcctccgatgatagcatcttatgggcatacagatttgttgccattttatgtgagctcttgaaggttgatttctacagaaatgggtccacagtagcccagcaacattcattaataagtgtgtaggtacatctttgtgtttattcatgggctctgtagctttagaaggaaaaagctaagcacaagtgtcttgctagtatgttgtttcacttcccatacttcagcaagaaggtgactctctagtcttccctatcatcagcatttagaatccgggtggtgagttagttcaactcatagaatactcttggggatatttttgtttgatgctgattagggctggtggtacccactagaagggtagagggggaaagaaacagggcattagagaagaagatcataaagaaaaaggttaaaaataacaaattatgctaaacattaagttctgtagagtaaggattttaagtttttttattattctttgtttagattgtacgttctttgagggcagaaaccatgcttataagatattacaagtctagaagctgatgttattgtctaatagttattctggaggttcaacgtcaaatatagtgtcctaattgctacaaacattaaagatcaagaccctgtggaaatgggtttcttttccaattactgatcacctccagtgtgccaggacctgtgcaaggctagcatttgactccaaaggtgtatgggcattccctgtacctgaaaacgagtgggagccaagcatgtgaactgttaacttcaattaaaaggggttgctgggtgcggtggctcacacctgtaatcccagcactttgggaggccgaggcaggcggatcacgaggtcaggagttcgagaccagcctggccaacatggtgaaaacccatctctactaaaaacaaacaaacaaaaaatacaaaaatgagccaggtgtggtgatgcatgcctgtaatcccagctactcaggaagctgaggcaggagaatagcttgaaccagggaggcagaggttgcagcgaaccaagatcatgccactacactccagcctggacaacagagtgagagattccgtctcaaaaaaaaaaaaaaaaaaaaggtggggggtaaagtgctctgatagtcatatgctgagagttctgggcctctcagcgtttgtgcaaagttaggggatcactcaacaatcaattaactagcataaaagagcaattcagagaggagtctatgcccctctttggagggacctaggaggcctattctttggggagttcttcatcaatgacagcgatttgagaatagggaaccgaaagatagggtggccacttacaaggcacacaagccaacgtttagggaaattggtgattaacaggaaattattggacaagtgcttaatttttcaagtaaggatgtttctaggtaacaatcctgttgtggccgcatggttctgggaagtggtagacatgggattaagcagctgcactggatagtaatgatgtaattgggtttccaacataatttccagtccttctactgcttctgggtggtttcaacgactgtgtgacctaagtttcattttggcagtccatttcagctgtaccattgcttttcaaccattacaaaggtagcttgactctctttttacacttaattactcaaatctttgtcctttaaataaaattgagatatccgtagagtctgccaattaagcatttagaggaaaccacacactctttgtggagaaaagaaggccaaattagacaatcaagtgtaccaagaatttgcctaaatttggtataattttgttgaagattaatttattttcatggtgagttatggtattgcatgaaaagcacactttactttacttgtacctgactgtcaaacagccattacatgcgaagggcagcctgtatacaggctgggtttccccttcctgcttgggaacaggtacggggaactgttggcatgagttgttctccttagctcggcatatctcacacacatattgtagttctattctccagtctgtctgttctactcagtgtgatttcttactcatacattccaacatctctagatttttcctaatctcttcaaagtctcattcagttgtcttccagatatttcccttcacatcctttcttttttttcctttgcctttctctttgttattaccctttctacattttcaaaatgagtttcatatgtctccagttgttgctgggaagtagaattagatggtcctctcttcgttcatccacagccattttagtgcacagtgttaaaattatttgtttatgcatctatttcttccttgaaggaactttcatccttaatgtcttccttggcatctaatggggacttaatagatgcctatgtttttaaccattgtaattttagtaagaacgtttattctgctttcctgatagtcaattcacaaacagacttttgcaacccaactcccatatagactgaggagtttctgcaatgtggtcaactacagcaaaaggctttttttgttacaaaactctaatcttcatctactttggcccgacctgaattccactataattacctttacaacatatatcctaccatcatcttaaaaaggcttacttctgaacacatccgctggcagaagatttgttttgctttcttttctaggaaattgtagcttagcaaactatgagactgtctgactttaatttttcttactttctaactgttgatctaatttttttaaagtaaatagattacctttaatttgcttattatgctcaataatcacacattagcaatgtaataattttaataacagaaagtacatctaaatctctactgtttgtatgtaagtcccatacctgggagccacaatactttcaaaagtgcacatcaaagtaattgttttgtctggcgccagcacaaatttctgctgggaactgccccatttaatataaattatattacctgtggaatttaaaaggatataaggtgtagtgtgccctgcaggcaggaaatttaaactatggattgccttcttttttttttaatctctgatttattcctgtaatgtggaatatttagcatccctaatttccatttaatctttttacaggcatattttgaatttttcagtcatagggaagacaaagttagaaatgctattattctctcaggctaacttgagaatgaaaaatatctaaagctaagggtgaagtgggaaagagatgtcattatctgaaggagtctatttagaaaccaaccaaccaacaaagaaaaaaaagggatgatgaagaaaaacagggaactttgacctaatttaaccaaaaaccatcaagcctcaaacctgatgtctttgcctcttttttgcctatatagatgtgaatgtaggagtagcacatccacgggcatgaatatggagatataacctcatctctgtaaatccattgaacatagttttataccctgcttagaggaccaagatgttacattttaagcctgtaggagtaaacacatgcaaacccagctgttcaggtggagacctctggcttccacattcacaccctcggtgacctatttggctcacgtagtcctctcttaggagatggctgcatgcacatcgtcttggatgttgaatgtacagaatactttcactaggaccagtaaaaagggcaaataaagctaacagcacaaaagaggatatattgaaaagaggtagagaggaaggaaggagagagagcatacactagagaagaaaactagaggagctaaagaccaaagcaatgaagacgaggctcctgtccacctcccctctttgtgttccaggtggttcttacactcatttttactcagccacagctgaaaacatgctcctttctctgcccttagtcaggggaagaggcctctgctcagtctcttaattcagtcattgcctaaccattctcatgaaacaggtccccatcaccaagagcagataccttctccaggtctttttcttttttgttcaataatccaagtattctctcaaagactaatattgcagtcatgaacaatagtcactgctgaccgaggtactgcattaaatcttttatatctcacttaaaaatctttacaccgtactcactcctcacacctaccacatagattctgttgtcccaatgttatagattattgagtaagatgttctgtatctttagccatgaatatgaacgcatgtagttgataattctacataagattttgctgtttttcctttgctcctgcatgcatttctctctgttcggtgtctgtggtccctgagttttcatgacatcttctggtaggaacttggggtactaggtcctcagacactttttacagttttctcctttttttctttttaaaacatcttattagttcttggagtactgtccaactgaaactgaaatgcacatatccatagttttcttttggtttcttatatgtgtccttttgacttataaaaaaaagggggctaaataccctttgttccaagcgttgactgaattcaaaggcgcaaattcaactcaagtttttgaactgtatagaccagttagtagtagcaattagtagtcactgaatgccagtggttaagagaggtggtgtttagcttccttccaccccattctctattcacctttatcctttcagcactagagcccccacagattctgcagcaatgggcaagatctttgagaggaacaatattaagaaataagccttcagatatgcagaggacattttctaagcttaaaagctgatatcgaacaatagaactatttatttcaaaacgacactccatgtatccaactcaattggtatactttgatgacttacattagcatttaaagtacaagcaaattttagaagatgcctctagactcaagtgttggaggtagggagcagctggtctttgttgttagaaaaacagatattcaaagtttgggataacagatgaaccatctctaccacttgactttaaagttagtttttagataagaagatagcttaataatgggctggttgttgagaggatcagccttctaaaaaccttaatatgctttcagtcttccctggaaacaggtgatagggtaattagcatccacatcctctactcaacagagcagcttctctgctggcacattgcttggcaggactccagggaaagctgtgtgatgacagcaagattaagatccaggaagcaaagccgggtcatatgctctaagttgtccattccttctattctcttagcatgttcgattccacaaacacggcttattccaaaagccaatcctcctaatgagcattcggtcattagaattttcatcaataccaaacggaattacatttggggccccttttggtctttcttgtcatacctgagatgatgagatcctttattctctaagtgccccttatgcacacacagaaccagagcatccgtgtagaaataagaacttaccatggtaaatgatcagtattgttgaatctccaagatgtggggttcaccacatttaactgtatgtttattaacaattccattctaaaaattatgttacaagcatggccaaacagaaatgaaactatgatagtggcatctctatactaaaagtctactctctatggatctggccatatctacacttatagataatacgttgtatggaagttctagtgtcagagcttcaggctggtgatccctgatttagatactgtattaactatatctttccactagtctttctgtttatgttctctttacaatccccaaacacccaatagtttgcaacccttaccatacttcacagaatgattcttcaggtaaatgataaatattaaatttttaaatttatgcatattattttggtaagctaatcaaattttttatgttaaagtgaacttgatatatttttatattctgtcatttatttctccattaagtgcacagctttaaaaattttcagtgctgcaaaaataggccaaaaagtgtgacctcatctattttaaatttaaataaatgaatgaatatgcaaatgaaagaaagaatgtcccctgggagcactcttcatggtgggcctcagcaaaataaagaacaaaagcttctagaccttgcttcctgctcctgctctgtctagaacccttctgaaaatcatttcctccaatctgtagagtgtcaggggagtcttagatacttgggtcctttgcattgtcctgttcatgctgaattatcagttttatttagcagttataagtgattcacattgaagttaaaggaacaacctgaggaggtattgttcacagacagccaacactcagaatgtgattgaaagcataggttttgattctggaaagaatcctggatttggaatctattcctggatttaacgtcatgccatagctccatcagctatttactggatgagtccctcttcctctctggcccacagttttcacaagtctaaaatgtggattctcataggatgatcatgccaaatggggcattttagtttctaaaatgagaacgttattcatctatataaatataaagttaaaatagaaactgttttagggttgacaaaaactctcaaagcagtcctttagcacttctgtgcccctgctctgaggcaggaccactcttaaattcttccattcagataaaaaatctctattgtttgaaaacaccttcagaggagatgtggtaggaatttgcttcacaagcacagttacactagacgttattaaaacaaaaaggttttaattaattacttataatcatgagtctcttgttttctgtgtagttctccacacaacagttcttctgttcctccattccttccaccattttgtgctattttttccttctgccattttgtaccattctgcggcagtttgcctctccttccttttctctggtcaactccttcagtggtcttccccattttaaacaaacttcacttctccgcttttctccggggtcagtcatcttgacttctgcacaggaagaagatcccccagtcttcctcagccactgagtccaataagtgcaatccttctggtaaggaaacttgccttcttgttgcagttgaagcccattttctaatcttatttcttcagagcccatttcaaaacagctggttaccatcctttaggttagtccttcctagacagtacttcaaaaacattatatcacttttcagtcatttttatcaagcatgagttatagaacttcctttatccttttctcataaggtgtattattcagccttttaataagcagcagggtgtaattgaaagaatatggactgtgtagttagacctaggtttgaatctgggccgtgttactcactagctgtttgaccccactcagagctcatgacttctctgaacgtaagttccctcatctgtcaggtggggttcatgggacctgtctctcagggtccccatcacagctgatgtgtgtagtgttcctgatgtgtcaccagtgctctaagaagtgttggttacccttgctcttccctttcgttatactctcctctacatcagttcactatttcctggcacttatggagcctagggttgaacacaatgttgagaatttgaaataattgtctttattcatccccctgcaacatgctttttaaaaaatgttttggagaggatgtggagaaacaggaacacttttacactgttggtgggactataaactagttcaaccattgtggaagtcagtgtggcgattcctcagggatctagaactagaaataccatttgacccagccatcccattactggctatatacccaaatgactatgaatcatgctgctataaagacacatgcacacgtatgtttattgcggcattattcacaatagcaaagacttggaaccaacccaaatgtccaacaatgttagactggattaagaaaatgtggcacatatacaccatggaatactatgcagccataaaaaatgatgagttcacgtcctttgtagggacaaggatgaaattggaaatcatcattctcagtaaactatcgcaagaacaaaaaaccaaacaccgcatattctcactcataggtgggaattgaacaatgagatcacatggacacaggaaggggaatatcacactctggggactgttgtggggtggggggaggggggagggatagcattgggagagatacctaatgctagatgacgagttagtgggtgcagcgcaccagcacggcacatgtatacatatgtaactaacctgcacaatgtgcacatgtaccctaaaacttaaagtataattaaaaaaaaatgttttggttgtttgttgttgttattgttgttgtttttgagacggagtcttgtttttgttgctcaggctggagtgcagtggtacaatctcggctcattgcaacctccacctcccaggttcaagcaattctcctgcctcaggctcctgagtagttgggattacaggcacccaccaccacacccagctaatttttgtatttttagtagagacagggtttcaccatgttggccaggctggtctcgaactcctgacctcaggtgagccacccaccttggcctctcaaagtgctgggaatacaggcgtgagccatcgtgcctggtctaaaaaatgtctattagtgttccatcactagatctcttctgaggtattcatgccatatgccccatcctgatgtcatatccacaggacaatctactaccaagaaccagctccaagaagaaaacatctctgggaaacagtaccaaaaggagtcactgaattgtcattggaggagtccaggatagctcttcatgttattttcaccttgaggaattgtccattacatctatgagccttatgtgtggctttctccgatatagaaacctatcaggtgtcttttagatcatttcaaaacactggcttattctttcttatgtttccaactgaagtctgcatcccaagatgtagtttcactgctaccccatatggcacccttgtacgaatttgaaaaaagtactcactctaggcacatgcagagccatgcctgcggggacagcttagagagtagagggtgggctgaactccagttactctcgtacagggatccacctttttgcagaaatcacagtgtggctatggtgtggtttgatttcataaaacagatgcttaaaaagtattcactgtctctgtctcttcagtgccatgtaatatcacatgactttcctttctcattccattggtattttcctgtgtcttttatcctctgtgcagtttgtcagtaacatttcattcccagcttcagatgggctgccatgacttctgccagttccagctatttctttggatgcacctttgaatacctaccttgacttacatttttttgttttgtggagttactctttgggtttaaattttggacatttgggtattaacccaaatagattttgcttaaaatgtccacattctattaacagattcttagtaatagcaaattggcaaaatcaagatagttaattcatattaacgttgcttccccctcttctctaccacgcctctagagatgacttaactgagcatccaaatgacctaacccagggtactggagggaaagggggaatgggtgaccatcagtcttaaataatctacacactaataaccttcctaggaggtgagagtccagtcgttctaagaggagtaccgtgctgtcatccttgccagaaaagaagatccttttatactaggcccacaactttgaacaagtcccccacagaacagtaagggagtgcagtggaccattacattttccagggctcaaccaaattggttctggtgatcaatgaagctgcaagtctgaggcagctggttccatgttcagtaactgataggtattcttacattcatctcaaggaggtagaagaatactttaatataaaaaagtgtgtaaaaagggatgaagattaagaagtggaaaacttgaagataagccagaggcaaaatttcctgacagcatgatgtactggactgcagataggtcttttgatggatatgcttgaaattccattgttacatttatcttgtctgcatttttctgcatttatttctaatgtgtctgctaggccagtacctctctgggaacataatataaaaacaactattaagtaaatagaaaagcttaaacaatacgcatataactccagcttgaagcattttttaatgctttataaatcactagaaaacacgtgacaggaactattcctgatcagtcttaggatgtgcaggatgccccaagaagcttttcctgtttactacttttttgagtgtatgaatatatgttttttgactttgagatagttaatatccagaagagttctttggctatggaaatagccttgaaggcttgggtctgggaaaataatagagagaaagagttactagggcttagtagaagaattgagggaaggatgcagggaaaagcggacaataaatagaaagaggaagctggtgaaggtagactttggcagctggggcagcggcacttgggccgcttatgtgaggtagcccgcagaggcacctttgggtggagagagaataaaatctggttttgacacgtttgttttagatggcaatgaaatgtctagcctatatattttgtagacactgagaaataagggactgaaaagaggaagaggtgtcagggctgaagatggaaatctggggctcatctgagtataggtggtaattgaatccttatggctgcactaagggaataagtagagaaggaaaagatgggctaggagcccctggctgaaccccaggggcactaagtggtaatgcatggagggagggggagaagttaaaagaaggaagaaaaagcagacagaaatatctgaggagtcccagggcctaaggtccctgccactgaggccgtgagaatgttgagaaggcagcacagatccctggaacgggattgccgctaagaagttaagtaagaagccatggtgtttgacagcttccataaaagcaaatgacaaaagctaggactgcagagaggtgaaaccagggcctaatctggatctggtctggattgtttcctccatgctctctagcacagagctttataagacagtgttggtttaacgaatgagggagggaatgagggaatgactgaatcaagcaagtaagcagatatagaaacatgggcgttttcataaagcagagtactcaacagtgcctgtgagcatcactgacaggccaaacacataaaacaggcagaagggagaaaaggaattgagaaaaagaaggacaaggaagagacagaagggggaaggaaagagcagtaagaactgaaaaaggctggagtttcctggagtgtgcagttgtggagccctagatctgtgggtttggcccttactttgctcgtatctctagttgtttctttgacattcatcttgtgtctgtgatgaaactttaagtttcttagtaaagacaagaactactattgtgtatctctttagtacctaatacaattctacaagcatttactttattcttgataacaggtggagagaaagaaagcaggttttcagtaatttataaaagtgaagaattatctagaaatgtagtcagtgaaaacatccagttttgataagtcaaactaaaacatccattcttcactcagagtaggcttttaaacttggattttctaagtaatttactcaaagccctctctctcaaagaccctcttgtgaaatgcccttgtgaagtgcttgtgaaatggccttttgagttagctccacaaaatgtccttcctaatcttagcaaaatgaagaaatgggtcaaaatgatttgaaatatgcttctctgtctcttccttcacctctttttggtttcattttcgtaagagtacctgtcagcatttgcagaagaattaaaggcagtgtcgttctggagggaaatcacatgttcctttaattttgtgatggaaggacttataaagagaagtggagcttggttagaaaggggagatgtgcacataggaaatgtaagcagggctggtgagaaaacttggtggtggcgtttaattaattttgaaactgggaaatagttctacagttaatctgtaagtttttttatgttgaatgcttggaaaatttcaacttttttattttcagacactttgtatgcagtgatgacataaataagaaaaatggccttgaaaacatcaaaaatgtaattttcaccttcttatgctttaaaaacacctgaatgcacttttctcaaacttttaagaaaagaaacaaaactcagattttggtaaagatcaagatgaatggtgttgacaaatttcaggaggctggagagtctgaaaatagtcttatggatgacatctgtatgtaactttttaatgctctaccacagatgctcccataagggcaacagagaaatagctggaaaaggtaacaatgttacttattttattaaatacgtaagaattgtttgcatccatttcctggcagtatttcctatttttaggagtgaggtgaatgatgttgtagagctggagataccagtgggctgactacaattttcaaagcaccttgagatgtaaaaaaatgtttctgtaggagggaaggggtacggttctgataaatctctcagcaggatgaaaaagaaaagggaggtctagacagtcttgtttcatctaatagaattttcccacagaagatgggcaaacatcagataagaacatttatcagacctcacacattttacagccatatccctttgggaacattgcgcagcatagacttgctaagtcctgaaaatggaagacagaaagcactataaaaaatatggactggcgccctgaaaaaccagtctttattactcaccctaacatatacatttggcattttggtgtacttgttaaatgatacataaaaccgtatcactaatgaaaatacagcagtagtccatgagctcttggctcaaaagaaagcaaaagtaaattaagcaaaatatctactttaaaaaaaaaatggtagtagtcccattggacccactttcctattctgctcttgcctgattttcataacagtgggtgaatgcagagatgctttagtagtaagtgcaggtgatgccagggcagatttttgccaatgaaataagaatttaagaaaaatgttaaattcatgtaatgttatttcaaaggctaatccaataattcttaaacatttatgtaaatctgccattttctcactctggaagacagataaagagaaccacgtgagaagatatagcatgttctattacttgccattaaattgataagaattacaatgtctgtgaatccatcaataccactgaaggacatgcagtggaatcaaataggtggcagaatagctatatgaatcacataatataacaaatcttttcaccagatggtgttcagatttgctgtttatttgtggcttatttaatattatcctgcttttcctcaatccacaaaggattcaaagcttcttacaaagaacaccttgggcctcaggcaaccagtttttaatgacgaaagatggactctgaagtccatgacatttagtaatttgtcacttttcttgtgcacaaagttgaattctggctccgggaagctgatgtttgggagaaaatcatttagttgtggatgaagtgagccaatacatagctggtagtcccaatatgacttgtttgtttcctaatttgagtttacatagtaactcttttaaagaaacaaaaccattttttagtggtgggggagttctttgtgaaaatagccgtgaagtgagagatgagtccggggtagaagctggaaaaggagttaacttgcagtctgaggatgtgcacaggaaacgcttgcctctagatagtaatacagtttcaggagagatctccaaacctgagtgaactatttcctggattcttaagtttagagactgtgaatctgggggcttgccaagtcctcaaaaacatcaagggcctactaaaatataatagaaaatctagaataaaaaaagagaaaaagacaaggaacatgtagatttgtttagaatgcgtattttaggtgcaattctcctattaccaactgatatggtttgcctgtgtccccacccaaatgtcaactcgaattgtatctcccagaattcccatgtgttaggggagggactcagcaggaggtaactgaatcatgggggccagtctttcccatgctattctcgtgatagtgaataagtctcacaagatctgatgggtttatcaggggtttccacttttgcttcttcctcattttctcttgccactgccatgtaagaagtgccgttcgcctcccgctatgattctggggcctcccaagccatgtggaactgtaagtccaattaaacctctttttcttcccagtctcaggtatgtctttatcagcagcgtgaaaacagactaactaatacagtaaattggtaccaggagagtggggcattgctgaaaagctacctgaaaatgtggaagcgactttggaactgggcaacaagcagagattggaacagtttgaagggctcacaagaagacaggaaaatgtgggaatgtttggaacttcctagagacttgttgaatagctttgcccaaagtgctgatagtgatatggacaataaaatccaggttgaggtgttctcagatggagatgaggaccttgttgggaactggcacaaaggtgacttttgttatatttttagcaaagagactggtggcattttgccactgccctagagatttgtggaactttgaacttgagagagatgatttagagtatcttgcagaagaaatttctaagcagcaaagcattcaagaggtgacttgggtactgttaaaggcattcagtttttgtttttgtttttgttttttgagacggagtcttgctctgtcacccaggctggagtgcagtggcaggatctcggctcactgcaagctccgcctcccgggttcacgccattctcctgcctcagcctgggactacaggtgcccgtcaccatgcctggctaatttttttatttttagtagagacggggtttcaccatgttagccacgatggtctcgatctcctgacctcatgacccgcccgccttggcctcccaaagtgctgggattacaggcgtgagccactgcgcccggcaggcattaagttttataagggaagcagagcataaaagtttggaagatttgcagcctgactatgtgatagaaaagaaaaaaatctcattttctgaggagaaattcaagccagctgcagaaatttgcataagtagcaaggagcctaatgttaatccccaagaccatgggggaaatgtctccagaccatgtcagagaccttcacggcagcccctcccatcacaggcctggagatccaggagaaaaagtggttttgtgggccaggcccagggtccccatgctgtgtgcagcctacggacttggtgccctgtgtcccagcagctccagctgtggctgcaaggaaccaacgtacagcttgggctgtggctttggcgagtggaaaacccaagccttggcagcttccaagtggtgttgaatctgtgggtgcacggaagtcaagaattgaggtttgccaacctccacctagatttcagaagatgtatgaaaacacctggatgcccaggcagaagtttgctgcaggggaatggctctcgtgaagaacctctggtagggccatggggaagggaaatgtggggttggagcccccacacagagtcccaactgggacactgcctagtggagctgtgagaagagggtcaccatcccccaggccccagaatggtagatctactgacagctttcactatgtgtctggaaaagccacagacactcaacaccagcccatgaaagcagctgggagggaggctgtacccagcaaagccacaggggcggagctgcctaagaccgtaggaaccaacctcttacatcagtatgacctggatgtgagacctggagtcaaaggagatcgctttggagctttaaaatgtgactgccccacaggatttcggacttccatgggccctgtaacccctttattttggccaatttctcccatttggaatggctgtatttacccaatacctgtacccccattgtatctaggaagtaactagcttgcttttaattttacaggctcatacacagaagggacttgccttgtctcagattagactttggactgtgaatttttgggttaatgctgaaatgagctaagactttgggggactgttgggaaggcatgattggttttgaaatgtgtagatatgagatttggaggggccaggggcagtatgatatggtttggctgtgtccccacccaatgtcaactcaaattgtagctcctagaatttccatgtgttgtgagaaggacccaggggagataattgaatcatgggggccggtctttcctgtgctattctcatgatagtgaataagtcttatgagatctgataggtttttcaggagtttccgcttttgcctcttcctcattttctcttgccaccaccatgtaagaagtgtctttcgcctaccaccatgattctgaggcctccccagccatgtggaactgtaagtccaactaaacatttttcttcccagtcttgggtatgtctttatcagcagcatgaaaatggactaatacaccaaccttgggaaacttcattgcctgaccatttccctagtttcttcaattggaaacgaggggaagctgctcatccccaccaattgttgtgccccaaagaagggcagcgtggtcctcctgctaatttagttggtaaacttgggcccaatcaagtaaaaaaaagaagaaaaaaaaatccctatggctattcttaaagaagacccctcaagaaataaaagaacatggttctgggtcctttcccactcccaaaggagagcagctccatttttatgatttatataaaatgatgttctgaagactgggggttaggggagagaatgaggaagtggaatgtttctttgatgaaggaacactcaccacccactaggggcttccctgtgttacattcagactattgtcagttcctgggctttcagggactaagctggtacagtagtgagctccccttgccagctacagcactggaccagtccaacaaaatatattttgaggctgaagatcaaacaacttagtgaataatggaagctcctgtaggctcctgtaccctgtgggaacctagaagagtatggtaggacagcaacataagagccattttctggcttcaaatgggagctctagggctctgattggagatgccagactttatcacccgtaagaaagtcattctcgccgggtgcggcagctcatgcctgtaatcccagcactttgggaggcagaggcgagtggatcacctggggtcgggagctcgagaccagcctgaccgacatggagaaaccccgtctctactaaaaaatacaaaattagctgggtgtggtggcacatgcctgtaatcccagctactcgggggctgaggtaagagaatcgcttgcacctggcggggcggaggttgcagtgagccaagagcacgccattgcactccagcctgggcaacaagagcaaaaccccatctcaaaaaaacaaaacaaaacaaaagaacaaacaaaaaaaccaggaaagtcattctctgacccacccccagcccaccttgggaaggatactatttaatagtgacttaaattcctcttagggtagggaaggtccatcttgtcttggcttattcagggcagtggaagctttacccacttcctactcttcttcatgttattgaagcccagttaaaatgaaccaacttagaatataaaattattttaatatttcttcatctgacttctaatcccattgttctttttgctgtatctgaagatagtcccaacttctcaaatatgttattaatttctgggctgtaaaatgaatatggaagagggactcaaattttgtaaatgctgtggggttacaaatcaccaattgtcctctgcctctgtgttgcctcagcctaccgcaagacctccctacacacacacacacacagacacacacatccctgaagtcactctaaatatcagtaattatgaagttggccaggcacagtggctcacgcctgtaatcccagcactttgggagactgaggcaggtggatggcttgaggtcaagagatcgagaccatcctggccaacatggtgaaaacccatctctactaaaaacgcaaaaattagctgggcgttgtggggcgtgcctgtagtcccacctactcaggaggctgagacaggagaatcacttgaacccaggaggcaccggttgcagtgagccgagatcctgccactgcactccagcctggcagtagagcaagactccgtctccaaaaaaacaaaaaaagtaattgtgaagtctttggcaacttcctgaggccttccaactctctcccagcctttcagaacaggtcttcctattttcttccatccctcttctgccgttctgtcatatttctagagtggggctggcaataaaactatcagagaagagagaaaccatatgttctgaggtaaaatttaacagaataaagaaatttccagcccttgaaaatgcccagaagcttccaagcagaccctccttaaaagtttccatctactgtcttttattaaaccctggtattcctcaaatgtgaaattcctttctgaattgttaaaatatttttataaataaaaaaactcaattaattttgagtagctcaaaagtatcttttctacaatttctaaagtaaagatgctacattttaggttataagtttttgccaccaggtgtgactctaactattcttcatatcttttgttcgctcaaacgtgtcccaaatttgaaaaaaattgacttttggacaatttctaataagcatttgggtggtcctgagcaggaggaacttctagtttgtgaagtagctaaggaaaacatcttaggcaatttttagttccaagaacttagcctgaccaagtaacctgacttgcagcttaggcgtttaattaggagcaatttggacaccagagttccgattctgctcttggtgccatctttttctttggggaagtgttctgcttacagcctatattttgtgaacatcgtttcctgtatatctttgtgtctaatacggcacttcaaacatagtaggcatttggaaattgctccctgaactgaattaaatgcaaggttaattcatggttgtacatgatcagagttggagtaaaaaatgaaataaaatgaaaagcactatcaattaatcaggttaagtcatgtcaagcgatcattaagttttcgatgatcttgcagatctttgagagaatgcggatctcgggcattttcagttgtgtgcactgacacgtgaatgtgtgtgtgccctcacataagttcttacatagcagaaggaaggaagttgtgaaaggggagaaaatagagctattgactgcagagccataaagctgtttttagaatgactgcttctgttgtattggggaacgcttcctttgagagggggtatattatgcatcctctttccattaagtctatttttggaagaaattacagaagataatatattaccagctcccagggatctcttatcaacatagcctctgttctcataacacacctgcttagagcaaaataaattattctgtcctcaggaatgccaaccccagacaatcaaaatcttcactaaatccctgtatttattagggaagctcggatttttgaaaagtgttaactccgcccctaaaagcagtaagcgagagataacaacagtggagtcttgtggttgagcattcaatcagcttcaacaggggcaaagtctaggaattgttttcaaaacagtgtggggcttcctactcagggggaggatttatctgcatttggcaattactccagttaccttggaacaagaaatttacttctcagtagttttgcaaattaagtgtttaacttcgtctctatagaattaatgcctcggaggtggggagagggaggcagaggagaggctttcaaggccagttcacaagtttgacacttaaagtgatagtagcaagtttttctctaactgcaagagtgtgaagttctgtttccacctaattgcagtttgcatcctgcaagtgtattgatttagacattaaaacaacttaaatgtttagcagtaaaaagttgtttaatcattaaaccactaccattttctttcgccctttaaacctgctttcaatcagcaaatgctgatttggatgctggtttacagtctcattaaccatgaagatcacaaaggaaaggttgtggcagcagtgggaagctctgaagcaccctcattgtcacaggaaacattcagtgagacattcagctgtctcacaacacacacagctctgagagaggtttgggtgacagaaatgcagcctccagttccagaagcagcacgctgttcattccaggaaaggaaaaaaaaagtgcttttctgcgtgaccatgttgatcactgttaccatgcagtaatcaggggtctttttgccacttaagtgtaatgggaggagggtatatcattggagactcctaggtgaatggcgtggatgttactcttttgcaaagcaaggaggagttgcagtgtttcatggccttctttcaacacacgggagttttatcactcattttaaacgcacaacttaacaccattttcaaactgagttccagccctggattgtttttttacaaaatggcccctttcccctcatagtgggatggccatgggtgcccattaattgctacacttataggaactgaatttattcccttcatggtagaaaaaccaagcctattttctgaaacttaatcctgtgagctaccatccacggccataccaggctccaggaagggatcacaactttctgaagagatgaattgctgctttaacaaaggctacgtgtgccttttgattccatattctgcctccactagatgtttggttttgctgccaaatataaaaaccacactggaaaagacagttcttcacttttaagtggctgtgtgatagaaaattggtaattagttcagttttgaggaagacagggacaaactcttctttacgttttataaaatcacaaattatcacagtgatctccatttgagatggagaaatggaaacctagcaagttccagagacttgcccaagatcttgtagctaattattagaagcaggaaatgggttagaaaccagaaccctgatttacagctaattgtattttcggctatccaaatatctttactggattaatacaaacttctcttgtcctcaggtaatacaaatacctgtcctcatagaaaataaaggcttattggtctgtctctttctctctgtctctctctctctttgtatctgtgtgtgtgtgtgtgtgtgtatatatattttttatatatgtatgtatatataaaatatgtatgtatatatgtatgtatatacatacatatttctgtcacccaaaatatgtatgtgagtatatatatatatatatgtatgtatgtatatatgtgtatatattatatattttataaagatatatattcaatcatacattgcttaacaataggggtacattctgagaaatgcatctttaggcaatttcattgttgtgttagcatcaaagagtgtatttacacaaacctagatagtacagcctactgcacatctaggctaaatggtgcatcccattgctcctaagctacaaacctgtacagcatgttactgtactgaaactgtaggcaattgtaacacaatagtaagtatttgtgtatcaaaacatatctaaacatagaaaaggtacagtaaaaatacagcataaaagattttaaaatggtacacctgtatagggcacttaccatggatggaaattgccagactggaagttgtggttgctctgggtgagtcagtgagtgagtggtgagtgaatgtgacagcctagaacattactgtacactatgcagactttgtaaacacagtacacttgggctacactaaatttataaaaaatatttttctttcttcaataataaattaaccttagcttactgtaacttttttactttataacctttaaatttttttaacttttttactctttgtaataaaacttcacttaaaacacaaacacattatgtagctgtacagaaatatttttctttatatctttataagcttttctctattttgaaaattttaattttttttaattttcaaactttttggctaacaactaagacatagcacacacatttgcctaggcacacatagggtgtggatgatcaaaatgtcagtaggcaataggaatttttcaactccattataatcttctgggaccaccaccatatatgcagttcattgttgagtgaaacgtcattatgtggtgcatggctgtatttatatccgtataaagattacacatatataaaggatgcaaagacaaagagtacatatatatttatatatgtagtgtactgtatatatgcatgtatgtatgtatgtatgtatgtatcttactttgggatttccttttttctaaccttcttaccattttaagaattggtctatgcacagcaaacttttagaatcgcaattaaaatattcagagaagtggccaagtttttgtataggtgtttggatactgtgcagacaagttctacatttctctgttctcaaaactccttcctacataaatactgaggactgttctctggccaaagtttgtcaaaccatttctctgagtaacaagacttcctcatgttttccatactctatagttcagtgttgcagccttcccatacttgatttttaaagcggagttttgttttgtttgttcttagtgcattatgactataaaatgtaaaaacctttcctctttgaagataaaaggaagtaatcctaattttaaacacttacttgttttaaaaaattgaaaaaaaagtatcgacttgatatgtctaaagagacctatgtatatatgtattagatatttatatacatacatatgtatgtatatatgtaatatatatcatatatatattttagaaatctgcaaatttaaaaagggagtgtttagattgcagaagacctatccctaaaccccgaatcccagaattcttaagctagaagggcacttgagaggtgatctcatctataaagagatgtatatttaaggagctaatttacacaggtagatgacaaaaccttacaccaactcttcaagcacaggaagcaccttacacgaaacactttggtgaatgctcatttctactcaattttaaactaaattcaactgaaaatacctcattttaaagaggatattcagttgactcactggggaaaaacaattggataaactggttgtttgcccttaccgagataaaatcactgataagttgaatgcatttttgtaatgtgtcaagacagatggctttaatagtcacacatattaagtatgggatatgtggcgaggaatagaggtttttatatacagaagtaagaactgtagaggggggaaaccatgaaagatagaaaaagatgagaagaaagaggacagagatgatacactcaagaaaagctgcctatttcagagtagaatatattgtaagccccagtatagttgaatgcttacaagaggagaagcttttagcaactcctttgtttcttaatgtatatattatatctgaacagaatgcttctttcctgtgagctagacagtaggaagtaatctatcttcaaccttgtttggtgtgtaaataaaactttagaaagggtctattgaactttggacaggcaagctccatgagctctccctcactctttgaggcaggttaaagggtacggccatgaccaccaccttaatccttcagggactatttacaaaagattgaaaaatgtgcccagggcccgtacctgcccctctgtggaactagcccaactcaagtgggctggcaggcaagcctggctttcatggggacagaagagagagtttgcggggagcttggcatttttcaacacatgctttttggcttctcctactgaatttgtaatttccatgatatttggtgggaaaatggacaccggcctcttttgctttttgtctgctgctttgcagctattgggattctgcgccttgggataatgaagcaggctgtcatttcctccccctaaataatgcattacaaagtggaaatgcaaatttcctgtgcaagctctaagtagcaggtggtatttccttaatatattgtttttgacctttggggaaattggtattacgagctgactttggaaaattaaaatagcatcaaggtcctacattttaaataaaacaatcgatatcttaatttttaaaatcagactagattacgataccaggaaaagacatacatattttgcttttatgtgttaaagttttgtaattcagggaggacaagaaaagggatatggtgcagctgaactttctaattcactaagacaggaaaaaaggaaggaaaaaatgtatatttttaagtttcaatttaaacctttgctgttaactaaatgctttgatatgatcagtcatacaaagagttaaattaagcatggagctgttcagatggcaaatctgcgttgagctgaaggtaaaagacatctgtatttttcattcatttgctcagcagcactaaatttcaagcttgttttttgttcagcatcaaagaaaaggttgttttatggttattggattttttttaacccacatatttcatgaaagggactcaagtcactgggtctttatattcttttaagttatttttctgcccacagccattctgcaagccatcttgttgaagagggaaaacataatttcattctttttctcttcctttgaagaaaaaaatttaagagatttaaataccattcacattttggaacttccttctttaccccctcccgaaaccatcatctcacaactatgtaaagcaatcaaatgttgaaagacttaagagattttcacacacataaatatcctttatatacttataactgctctacttatcaagggcaacaagaatggaacccaggagctaagtttatagatgtttgtgtgtgtgtgtgtgtgtgtgtgtgtgtgtgtgtgtgtttgtgtgcgtatcaatatatccagatgtgtccaaatgtacacggtatttttagcatacaaattgctgattaggcatctatgtccctttctcctctaaaacctctaagtgcatggatctattagtggatgggcgccagaacgacacagtcaatgcaggactgaaatatttaccaaacccaagaaatgaaggtttgtttgaatagtttaaacttgacaggaggctgagacaagaggatcacttaagcctaggagttcgaggctacaggcagctctatgatcatgcccctgcactccagcctgggcgatagagcaagaccctgtctctcaaaaaaataaaataaatttgagtagtgtaagctatgtaaacttggataatccggttaccttcattctttaatttttccatagcatatatttggcttcaatgtccaggttttcgagcacgagaaatctgcattttcattctaagaagtataaaacaagatagttatacttcatgtaaggttcacattaattgtcattgcacctcttcttcccagaaggaagagggaagtgagagctggagtcaaaactgggtactgtaaatgctcatctaatcttggaatctcaggggatattaattttccagatagttgagttattgccttcaaattttaacttcaaattttgttaatgtggttgtatatgcaaattcagccaatgtgcatgatatgtgtgtctcaaactacatttatgaattcactgtaattttatgtttctcttgataatgtttgattgttaacataagcatcactagacttgtcaagtggcaaagatcatattctttcattctttcttcctttctcatttcttgaatgctggctatatgccaggaactatgtacccaccctggtgcttggtgtatagaaggcactcaatgaatgtatgttgaataaatgaaaaaaataaatgaataaacaagttcaatggatagttaaaaggatagtttcaattctataaaccttaatttgggtgtaggaccagtcacagtaccatgacagatagagctatttggtgataaatagtgtggaatgtatttaccaccaggcagtaatgccctgtccctccttgaatagtactacagatatgagagtgcttttttaaatttttaatcattggccactttctctagaaattggagggaaactgtgcagcaacaggactctctgggcattgtgacaggtctactgtctacaaaatttgtgttcaaggcaaaatctaaagcagccatctttcaaaaggatgtcctcactttataaaaaacaattattgcaatgactatagccaatgaggttgttcttgccactgccattcaaaacatcagtgattttggcatcttgggcacataccacagacaccaacttgttttttctttcccacacctctgtcctatatatgctaagtttattcttgggctgtgacagaggagcattccttatcactttgagaagttcagctaggatatttaggggatgaactgcattcttacgaattctttatcatgattacactcctatctagtataatttgaagataaagtagggcctttggaggtagactagcataggtttgaaatgtttccttcattcattatcagctgccaagagtaacctggggacgattccgtgcttcgtaaacatggtctcttcatatacatgctgatatacaggaaagacctttgcagaactccatgaaagtttgttttttattattgtactaaaaattacatatacctgaccagacacaaaactaagctgtaagttttctttaaacctccttaatattttgtcctttaagcataagcgatgttgcaaagcacccctttaatttatcctgtgtaaacaatcactatagtctgcaaaatagattgcatttcttatgaaatccactttgtaataacattttgtatacagaatgatgcattcagtgaatgaggtaattaatgctaaaggataaaaagattatttaaaaaatttaccaaactataccttgcttcctcagtagctatgcataggtaagtctgttattctgaaattatggttgactgaaagaataaatataaaagatagtgggaggtatccatcaaaaatgtctttatctttttaaacactggtatgcactctataaggagtaagcaacagtgacaatttttccctaatcactaaatgattattaaccatttgtaagaagagttaacctgtccttaatttgtttgaacccatagggccatgaacaaacaccataatagagtgaagaaagcaatgccaacgtagaccaattttatcactaatatagaactgccctgggacagagtatgcccagatatgagttctcagaaaaagccacagaactcttctgtaaactcctatatcaactatatcctaccttctcttctgcctcagcttgcagtagcagaaaaagtttacatgtgtttgtatattcactgaacagtagccctcaaagaatagggaattctcacatcttttcaaaaagagccacttaaagaaaatacattctaagtgctttaattcagatttaaatggctacattgcgagatattattccatataattggagtaattgtgaatttatacagattttcaacagtggcactgtgcaaccattgataaaatacaggggctggggggataaaaccagtattgcctggatccagtgacattttcccatgctcactttttccagttgtgtagcaatgaccatattctctaataacatcagcatacttttatgctttggtctttttccttttcattaggagaatactggaattcatgctgtagaatggttccttttataccccagcccacttgttcaacgacattcctgtgattttactatctaatatgttgtggctataaccagagaatgcaaaatctgtcttcctgagagccttggcctctatgttttctaccaaatcatacctccattttctctataaaggctgttggtacacccacaaatgtcatctgtttgtgatgagcagaactgaggcacttttgttctgatgcttacatttgttcacatgaatagaagttcctcacttgaaagtgatttgcacataggttgaggaactgtgaatgaaatcactcaacctagaggctggcattcttcatgctgctggctgttgatttcttcatcttctccctgaagaccctgcatgagtggtgagtatccataaaggcaccaggagacccagacacctctgtggcagccaagcaggtgttaccctgcaggacttaagagggatcttaagagcaagagaaggaaggagtgacttctctcaccagtggtcagagcagaaggtgcagagcagcaagttgcaggtgctggcagtgatggcttctgaactgaagagcaaccaaaccctcccatgtaaccctgtcaccacagctcaaagggaggttttcttgccccccagtagaagggaactgacagcgcctgtatggctttgcatcctgaagatactgtagttgttgcgtctgttggggaagcatcaagaaaattagattgttccaacattcaagctcttccatattagctttgtgttccatttgatgtcaaacaataggttgaaaaattagcttaattctaagcttatatgtatatagggaattttatcaattattagcaccattataacttgttaaacagtgaacttatagttgaatgtgatctattagatggctgcttaacatttgctcgagaataatctattagtcatctaagcacaaagcagctatttgaaaatttgttgagtaaatgacatctctttgacagaaatatctgcataattgcagtgtgttatacatgctcgttatagcctaactacacgtctgtttgaatttgggtttttctttttttttttctgtctgcataacacacatgcagacatcatagtgtgaatacttactgttatgatcttggagaaaagtgtatctgtcaactctttaacagcctaagcatactaaaggtagtttgtaagcaacacataactttgaacatggaaaaattaagtttgcttttaatgaaattctaattttgtaacttgctgagagttatttttagagagtggtaactgttgaagaaaaagaagctttttttttctttcaaatcctgaaatgtaattggtagtcattaattaaattttataaaatagatgttcctttcaaaagcaatctcaaacaatagtacattttaaagtctggatctctttcccagcagcccagggtgttttgaagataggagaacaagggaagtactttaagctgtaaagtcttgcagggtagcagttaagtgcttaaggcactgcattcttgatgcagcgtcctgttacagtaatattatgaaaaaaagctacagggaattctcatacatgtctaatacatatagctttaatgttcacatggctggacccattcacaaatggaatctgtgggtcagatgtagtttgcaagccactattattaagctgttttccttttactattaagtaatgttgttccttgttaatattatgaatgcgtgtgttctttgctctctctgtaaatcttttgttccattcattttttttttttttggccttacaagaatgtggggggaggatatccctatccacaaatcaagtactttaaatagccaggctagagctgaatgaaggaaatcagtctagataacatctttgtgaaatgtatgcctatgaactctgcgtcacacaatacaaaggaaattgccattgtcctgcacaagttaggtgaacaaagcacataaaaaatcctgttctggttgccatacatattcctgtgcagctgaaactagaattccaaacgccacagaaacggccaggcttaagtgactaacttgcaaatcagagagtgcaggttttacattgataatacagagagacctgtaatcattcatcacagtggtactacatttattgatactgagcactgcaaatcataaacaataaggattacatgaccactgctgctacggtgactactactgccatcaccgccaccctccctagtgctattgaataatgcttattaagttctttcagccagcaactgtgctatgtactttagtgtcattcatcatatttaatcaccccagcaacccaatgaggaatccactttatagaattaaggaaattgaagtttaaattgctaccaggtcacacagcttacgcatacctggtctcatacttgatctcagaggtctttctggccccaaagccctgttcttcccccactatcttgaacttcctttccctgtatgtgaagggaatggaactcaccaggtaccaagatgtcacctcctaacccttacaaagcccagtgagttatttggaggagaatttttcccaaggccaaaaagctgcccgtgtaatactccaaagtaacttccatatcctggaaagagcaactacaatcaaagatagcaccttacaaacatccttcttttatttaaaaaaattaatttttttttaaaagctaccaccaccaacagttcttcccaagatcagagatacctgcacatctggcaataagcccagacataccaaactgtgtattatctagagccagggacttgaataccactgcatctgcagagagacaagcatctcatttcaatagacaacttgttcctagagtgggatactcccctgctgaactgacagggagccggaagagcggcattgaacaaagagaatagttatgactgggcagcagacggccccaagcacaaccccaggttctgctcttcttcaacttaaccaagcagaactgcagttgactcccattaaaagtcagtagacatttagtcggcttccagaatgtgggcagaagctcatgttagttatttactacccatctctggaattccttttggacatgaccaatgagttacagctggtctttaggcagtatggcacactcattaactagctgtcaggaacagctacaccctttggtccacaaatctggatttgccagaggaaaattccaaacagaccaggaaagcaaaaaccactgacaccatctccataataactgtaaaactgaaacatacacgttctacaaagagggctgttcttctacctcctcaggaacaatttgacaaaggcaaacactttatgcactagccctggacaaacaatgcaaagaaaaatcttgtgcagctgatttcagggtcaagagggcgcttcttaccaaccctcaaagacaaaccagcacagagaatagtaaaatgtgcaaagccaaaccagttgctactctctatccattccccaatttcctttgttcacagaaagtgaccctctccatggccctggggtaaatctgatttgttcatggtggtgatgctggtcccattccccttgcaaagcaggtctggcctgttaaaaagggccatgaaatctgcagggactgtcggaagagactctcctgctggaccttgacatttctggaagtgccactatgaatggacactgcaaatggctgtacccattttttgactctgaaggaaatagactgagaataaatgtcaactggaagagcagaaagaaagaatctgaagctccgacatttcttgacctactgaatttaccaactttaaatgtgcatcatctccaggctttttgttatgttaagtaaataatatccttattattaaatcagtttgagttggggttcactgttatacccaaaagcatacagtaggaattatctttggtgggctatttgagactcatcagaattctttatctacagtcttacaaattggttggatttccattacctccttacatacactgatcagcaggaaatacagggagatcaaattatatttaatatgtcttttaaaatacactcattttcttctatccacttttggaactccaaaaaagtaactctctcatgctaacaactcccttattagagaaaagaattgtaggtgtgtaagcattgttttcccatgacaacgtttttttttaattatttatttatttagagacagggtctcactttgtcacccaggctggagtgcagtggcacgattacagctcatggcagcctcgacctccccaggctcaggtgatcctactacctcagcctcctgagtagttgagactactactatcaaatgggtagcatgtaccatcacacccggctgatttttgtacttttttttagagatagagtttgccatgttgcccatgccggcctcgaactcctaggttcaagccatcctctcacctcatcctcccaagcaagtcactgggccccccaaatctaagagtcatgtccaggaatcagcatttctaacaagcactcttttatgagatatatggaaggtatgactcagcgcttgaggaagaagagctacaagaggaagaggacttcttccaggcaatgagaggcttagaaattagttggaaaccttttttgaatatttacttcttccagaagactagaaacatagtagggactgagtgagtcaggtagatggccaatttccctgctttgggaagattctccctgaaattttccattggtgttatgctctgctcaatgtttgtaaacacagcttctctgatactggagcatgaagcagtgtgtcggtagctttgactagtaatgtgtcttaatgtaaatatgtataaatattatatgtacacacacacatgcacacatacaagctttttttttttctttttgagaccgagtctcgctctgtcacccaggctagagcacagtggcgtgatctcggctcactgcaacctccacttcccagagtcaagctattcttttgcctcagcctcctgagcagctgtgaatacaggcacccaccaccacacctggctaatttttgtacttttagtagagatggggtttcaccatgttggccaggctggtcttgaactcctgacctcaggtgatccccctgccttggcctcccaaagtgctgggattataggtgtgagacaccacgcccggccacatacaagctttaaatgaagtcttttaaatgacttcctctgtatttatgtatcataagtaaaaaataatgtcatggatggtaacattctacagaaatgaacacatgcacgggagcaccagccagggaacacagagaccatactggacaagggattaaaggcaagagacgtggagatttcttcagtagaaagccatgtggatgggaaggggagagatgtgattatgtagatgggcctacatcattatgggaaagactcgtatggcatctgtatggggaacaagcatttttattcttctccatattttggtcacagacaataacacataatacatgagattgtaaagtccagaggtacaggaactgtgcctgtatattttctatatcatagataccacagaatttatagctaacatttgtaacataatcaaatattatagcaggtgataaacaagagagaaaaaaaaacaaaaataagtcattaacatttatcacggatattttagccttcatagccttaactgaatttcttttctatagagttttcaagaggaataatagaaataaaagattaaagaaagtatagatagatagatatagctataaataagaatagcaggataggatttctacttttatagaaatctagtgagaaacaagatgctctttatatttctaaaacatcttgaactttttgatgagaaaacttttttcagagcaaagctgttactataaaaatagtattctagtgctgatttgtcctttaaatatattagaaacattcttttgaactaagatcttttaaattgttatattaaaatgcagtttttctccttatttggtcatttttcttcttagtgaaatcatagtccaaggaagctagatttttattatgtttttaaaaacagatgctatttttatagataaaagaggatggttgcctataacactgattttcttcgtaaaaaaaataagaagcacagaatatgctgaataattgcccaaaatacttttctggggcagtgtagaatagtgagaagggaaaaagatgtggagctatacaacctgggtgggtgttatagtttcattatatgctggccttgcaatgttttgcaagtcaattactgtcttttggatttagcttctgcatgcatgaatctgaatggctatacttctgtacatggttgttgtaagggttaaaatcagtcagtgcacttttaaatcacgttacaaactatgtgtcactgttatgtgacacatacaaattatgcattatcatcatatgatcgatatcaacaaaatgaaaactcgtgtcatctcatcttgaaatgaaagaatgtttgattccatgaatgtgatcgtgaagccgagttcagagagacatttctggaatattctatacaatgctaaacaaagataagcagtttttaagttaacggaatgctgaacccagaatcatccattttagggaagttgagctgagtaaggtagttcaagacagttgcctgaagctccacttaggtttgagatggagtagattcggaagacaagacgaatgaagtatttgattttctaaaaaagggaatggagacattttaatttacagcttctgaggaaaggtcatcaatccagagaagaccgtgaaggaaggtccaggaagaaggtatcctctggaaaggccagggtgtcagggccactgtggaagtgtgggcatgtagcagaaagaactcacttcacaactgtttaaaaacgttaaggatataagctaatgttcgggaatagttaatgtttctcggagtgaatattaagcttcctccaagaaaaacaactcaactcctaaagtcagccctaaactagtgccaagaaaatagtgctaaattaggcttctaggagagatatgactcagttaagtatcatagagcactcaacccataaactatccatttgtagtccttgagaacataagagattacaaataaatgtactgactctttccttaaggaaaagaaatgcctaaaatcatgattcagctttttaaattcagtttccatgtgtaactgttatagctgctgggaaatacttgatagtcaaatcattttgtaaaaccatttccaaatgtttagtctaagattgggcaaatgttcttggaaccaaataaattttctgagtattgattctaaatctctttagtcagaatgaaagtactaagaactgttttaaaaatcatatttttctgtaagcttatgggcaagcatacaagaaaagatatacatgttacatgtcaaattgtgtgtatctagttcaagtcctgatccgatttcatataatctctatctgaataattggccaaatgtcaagaagatgcatatcttaaagggactttcaagtatattgccaacgtgattggagtattaacaacaaatttggatattaattcttggtaatctccaatagcatctaatttcatttccattatttcatagatgcctccttttcatctaatattgagcattaattagtctttatttggctggagttaacattagctaaagtttgaacttaggctatagcatctgtgcatacatgtttgatttgtgaaaacccagcagcatggcagttcaaatatttattcattttcctgtgctggctcttaagcacatgtgcatatgcaaagtgacctagctttgtgaatggtcatacacagagaaaaagaaatacatatagaataaataatttgggccttaaaaaatatgtatatatgtgtgtgtgtgtatacatatatatgtatagcgttccttttttgaaaacttgtagcataaggaaataggactgaaacattcattattttctatgaagtaacattaatctcacaattttcactccactttttgactaagggtggatttttcccctaaaatcttagagaatcataaaaaatgagatgaaaagtcaacttctgagactgtgtattcctttaccccacctgtgtgcgactgtttacttcagactgctttatgttcctcagagcacaaccatctcctgtaaaacaaaaatgcctattaaactgctataactcgggagcacaccggagcatccccttaacactaaccatggtttgacaacactatccccaaaccacatcttttgctttctaatttgttaagcttaactgtaatctttaactttccaaagtgaaggcaaagaaattttcttaatgtatttctttgtgatagggaaaaagtgatacttttcttctacttcgtcttcaaatttcttctggaattttttttcagtgaccttatctctactttttcattttccctattataaagaaaatagtcatctcttctttcatacatttatcttttccatatttgatgagcacgcctccccgcacttaagaaaacattgtaggaaaaaaatattaatctaaaattgtacattgtactctaatatctgtttttcatttgtctcccccattagactctaggcttcttgaaagatttcttctttgttttctacacccagttcctgcctgtcatatagttcaaatatcaattagtattcgatgagccaatgaaccacttcatcaggtcagaatccagaaggatacattttgaaactaatcatgacactgtgatttttaaagggcttcccattgatcttttcactccattccaaaggtgtctgaaaggcaccagagggaaggcaaaaactccaaagtatcagccccccagtctgttctcatgagagctgctatggctcattgccacacatacgcagtctgatgttaatcaacactaactagagcagcttgtggctattctcatccttgagcagatgaaacaaggccagcagcagtgagggcactttgctataataatccaataaatacttttgaaatgatgcttacttttgtcttttgcattaaagtctaagcgcaaagccaagtagaatagaaaataaagaacacttcccctcttccacaataccaagcagaaattccagagattttgccaaaactcccccatagatttatcgcttcttaggagactttgtacagagaactacaaaatctcctttgcaccataagggccagatgttactgttgaattgtaaccacccatagctacatgtgtacacacatttcacagtcatctctaaatgcacacaggaggcacaatgaatggaagttaagacctaacctaggctttttctaggttcagagaaaaccctgactagctactcctggtagatggtttctcctctttaccaaagcctcccatcactagggggcaggttcattcccaacttaggaagcactaaaacagaaaagctttcaaccccagaaaagtggtacctagaggtgtgatttgtatagctagctgtagctgagtctcatcctcacaatgttgcatcaacatttgatctgaaataaatccttcaaacttcagatatatcatattcctatctaattatcaaaatacattccttaggtacattaaaactttttgatcacttactattgtagaatacctcaaactgaactcccctatatctgatcaatacctgagttgaccattaattttaaatttaattcaaagtgacagttttcattctagaccttccttggatagccacagagatgtgttatgtacaaattatttcagtcatccagtttcaatgaagaggtagagttcaggtggatttggagtgggtatgagaatctagccagatggccacaaagacagtcctggtgctctggaagaacaaccacagcataagcaagaaactggaacaccacacctggtataggccaatccctcttttcaccacaatctggcagtctttggtaaaataagtgtaaggggaaggatccaggctggagaggagtgagcagaaaaattgagtacaggatctcagaaggtacaaaaagctacgcagaaggtacaaaaatctgttgcctaatacagcctaatgacaagtcacaaaaattaccttactgaattagaaagaccttatcttgattgtatgggattaaaccatatgaaattgctgataattgattggttctgacctacaaaaatgccagttcagctagctcaacctgatagtatgagtcacacggggtgaatgctatgaagacgctctgcctccacctatcctggtgatacaggtctgcaggagggtttgcatctagaaatcagagatttttgttttttaagagtcagagtcttgctatgttgcccatattggaatgcagtgactactcacaggtgcgatcatagcacactgcagcctcgaacttctggactcgagtcctcttgcctcagtctcccaagtagctgggactaaaagcatgtgccaacatgcttagccctaagatttttttttttttacttaacctcccctggagctccagtttttcgttgaggggcctcaggggcatcctgggagggcagagatggattggagtggaggccacgtgaatgagtctcagaaataccattttgtctgctttctgttgtagggttccacataagatctaacataaaaggtgtgggggaggttcttatgctttaaaaaaaaaaaaaatgattcaaagcctccaaagcctgaagttcattttttgaaaagtgacccaaacacaaatcttgacattctggaatattgaagttttaaaactaaatccggagggccatgaacaagtatgtcgatcacataatttcgtgaaaggcaaattcttgataatggtcatcctccttcagccaggtaaatgtcaaattcaaagaaaatatattcaggacagcactgtgaaatttctgaggataagagcatatttcacagcacataaatgaaagtggatctcggtgaatgttctatacagagagaaaggttgtgttttgaacctttaaataactttggacaaagggtgaagaaggatattgttcacaccacaagtcaaaagccactcccatcaatgtgcccaaccacacaagtcgaggctgctgctggccttgatggttcatggccatttggagtgtttgcagagagattggatgattacttgtctagaatttgagctgtgtctacttattcaatattttggaacattttttctataaataaccggtcaattttgtctagaaatcagtgaagtgattaagtaataggtctatgtatttattgaaatgttgtctatatggtagggatatattcatctgtcagttcaggcagataaaactggctacacttgtgtggatacaaacatgatcataaacctcactagttcaatgagctggcttacatctaaaggactcttttggaagttgaaaaacaaatatcttttgcgtaaacatttttaatatgacaccatatttaacttaaaattttaaataacagatgatcctgtgagatgctattttgtgaggtgtgaaaggcccccaaaatgtaactctcattgaggaatttttatagaaattagggtttttacattctttattagtaaatagctagaagatctgtcttatactatattgctatgagaatggaaaacaatctacatgaaaaaagattatgctatggcacagaagtacctattggttgaacaatggtcatatgattttaaaacaaaatcatatgattttaaaacaaagtgggcaaaatcacctactactgcctggcaagaagcaaaggatctaattatattaaaattctgctgcttacattaaacccagagactcatctgcacagacagccatgtgaagggcttctttctttctaaggtcaacttgagaccctttacataataatcatgtttgctttaccatacattgtgcctaatttttttttaaaaattaagtttgtaagctcaattcaagcctctttttatttaatgtttagattagtactaaaatgaactactaatgtctgggtcctttgttagcaaggattttctttcaatacctaccagaaggagtggcttagctgtctgagtatcagctttaaaatacctagacttcctggaaccatagattgtattcttaggagggctgaggaacttcttaattattctgaaataggtggaatggcagaccatttcctacacaagtgtctctctacaaaatcttaaaaatccaaatactctgtggattttaaaaattcagtaactttttttcttccatttggagaaatgttcatttgctgtatgacctcagaaatccaaaaatatgtcctttccttttgcttatcttctacagtttcttagcatgttgtaccctaagctatttgtatatactttaacaatgatatttatttgcttaagcattatactttcaattgtggctgagctagtccattctaagggctagactgcagagaactactcactgaaatccatgtggttagaaagagcccttttaagcttcacgtggtatgttcaactcatggggtctttgaattctcaccacttttttttttttttgaggcagagtcttgctccgtcacccaggcgggagtgcaatggtgtgatcatagcttactgcagccataacctcctaggctcaagcaatcctcccacctcagtctcccgagtagctgggagtacaggcatgcgccactatacctggctaattatttttaatagagatgaagtcttgctaggttgcccaagctggtctcgaactcgtgagctcaaacaatcctctcaaagtgctgagattaccggcatgagccaccacacccggccacagtttcgttttaacatctgttaatccaaaaaatttcttcaaagtcctttggtgattttgtcaatgctgctattgatgttttgttctgggaggaagctctctttcaccccattgtattttagaagtttcaatgcaaccatggaatgaggattttcattacaagctttttgaaaggtgcaatagtctcaacataatgaactcaaaatctcagtgcattgaagggtttgcatgccaagttgaccaagtgcctaaactgtataaactccctatgtgcacacttagaattggatcatcagatttgtctaaacaacttgaaaggctttgctatctgttcactgaacagtcattatgatgtacacacctttaagagggactcagcccctccacaactgataatgaaggaagaatctccaagtgaggtgaggcagctggactttgcaggtctgactcttgtcccctgcgattcacttttcatcagcaacctggaggaatcagaactaggccctgctgaacaatctggagatgaaaatcaaagccgggaagtacagcttctcctggattggatctcgatttgacttttttcttttttctttttttcaaggaacagactgggtttcttcagagcattatatcagggattaagagaatcagtagactcgggttgttttggttttagaaaaagatctcagacgattatttaaattccctatgccttggtttccctgtgagaaaatgaaaacagtaaggcctggaccctcccagtaacaaaggggcagatgttaaaaatataaaggattctagctttcatataggaaatgcatgtgcaaaatattactcatttattaaggtgcatgaaaatttactgttaacaacacagaagactaatatgtatcattgatgttattcaggtcttataaaactctagtggccagtcgtgtttttaatgccaagaaccccgaggagcaactggtttctaagaatcaacacttagttctgagccgagagatgccccaaggaagataagagacttacagtttgtttggcgtccaaaaagctttccagacagcagtttgtttcctttccctttttatgaatggtggtagtattatgcttcagtctgcgttttctaccaaagccattcataaaaataaaaacaaaacaaaataacaacaacaaaaactttctcggcacagtctggagccattgggtgccagaggctgggaaaacatcctggcagccataaccccaaccaacattgaaagtattcaagggtctgtttgtttggtggtctgaaaagtatgaagtgctgtgtctgagggtagctggtagaagttccgtgacacggactaggccgggagccagggctggcagagattcagacattgtctttcccctcattgaagtgtcaggacctaattcatggaaaattgggtgagctggcagctctttcagaggatttcattgagctgcagtgtgcaggagtcacatgaatgcgggagcctctgccaaaaaaggagggggatttctgagcagtaggaaccagtcagcctgcaagaatgtatgtggatttgaaacggtttgggagtaaacatgtgtacaggtgtaatcaacagggaaaaatgggaggaagatgagtgctctcttcttccaaatgaccctttggaaatgaatcctctattagcccacgcttttgtgtcctaagaggcaagaagtcctcatcgttcttggttcgattttccctggagaaaacatcatctcaaaacttgggcttttgtgatgacgtcatctttactgtgatttaaagtcaaatggaagaacgtcttttcctttgagcaaaagtaccttgccatttattttatttttattctgtccatctaaaaaaaaaaagctctaatgatttttatatggaatttttaatgtaccagcaataaaccactgtaccactgagaggaactctgagaggaaggggctctcagaatgaatgaacaggggctagtgaatagtgaacgtatcctaagtgctgttatttgggagaactggtgcaagaaagcatgtcgctatccacatcagagtacctcaggtgtactcacaaatctcagcgatgtgtagatagaataatacatgcctatattcagacatgagagtgaggactggaagcaaataatccatcgaaaagctcaggcttcaaatccatcttttataatgccaaagaaataagaagtattctctaatactcgattggaaagttaggcaggcagaaaaacattccctcggatgtttcactcaaaagaggagagttttgctctacacatacaatagatacagatataacacaatataacacaatattcttcccatgataccacgaagaaactgaacaaactcacagaattatttgcaaatcataagggacttgaatgcaaaacattaaaagaactcttacaactttgttatgaagagatagcaaattttttttaaatgggcaaaggatttaaataaacatttcttcccaggagacatataaatggccaataagcacatgaaaagatgctcaacatcattagttgtgagagaagttcaaattgaaacagcaatgatgtttaacttcacatccacttggatgtctacaagcaaaaagacaggcaataacaagcattggcatgtatacggagcaattggaactccagattcattgctggtgggacggactgcaaaatggtacagctgctttagaaagctgtctggcagctcctcaaaaagtgaaacaaagaattacaatatgaaccagcgattccactcccaggtacatacccaagaatgaaaacatgttcgcacgaaaacgtgtatataaatgttcatagtagcattattcataatagccaaagggtggaaacaccccagatgtccaccaactaatgaatggataggtaaaatgtggtatacccatacaagggaaaattatttagcatgaaaaggaatgaactgctgatgctaccacatggatgaccctagaaaaccctaggccagtgaaagaagccacacacaaaagactctacatatatagtatgattccacttacatgaaatgtcaggataggtaaattcatagagacagaaagtagattcatggtcacttaggcatgggaggtggctagggacgtggagggtagtggggagtaaccactaatgggtacaagatttcttttagaggagatgaaagtgttctaaattagactgtggtgatggttgcacaaccctctgaatatactaaaatatactttaaatgagtgaattatgtggtatgtaaattatgtctcagtgaaggtgttttaaaaaaataaaatattaacaaattaggtaccttcactcctcagttttgtgatatataggctaaaaacaaagtgaatcaaacagttaagtttctttcaagctagttggcttgtatgccagaatttaattgggaattggaattgttttcactgagataacctatgttgtatttccttaatatagagagatcatgaatagacatttttgttttttttgagatagggtgttgctctgtcacccaggctggagtgcagtggcatgatcacggctcactgcagccttgacctttcttggcccaggtgatccttccatttaggcctctgagtagctgggactacagttgcaacgccaccacaccctgttaatttttgtatgtttgtagagagagggtttcaccatgttgcccagcctggtctacaactcctgggctcaagccatccgtccgcctctgcctcccaaagcgctgggattataagcgtgagccaccatgcctggccaagtataaacacttttaacattggatataccagttgaactttatactttcctctttcctttgcagacaagtatctgtatttaaaatatgtacacctaattttttctataatgtatattttcttttaaaatatatctttttcttttcctccttagccacaacaagttgttcagaagaagcctgctcaggtaagacatagtcattaatttttttctcccaattaatataaaaagtgaaatatgtactgaaaaatgtccccaaactaaaccttatttcgcattttcttacttttggttatcgtcctgcagtattcctgaaaatgtgttgtagccttcaaagttaggaatatatagtctgcaatcgtaccatgaaaacctcccaaaatgtaaggtcttaagtgtacaaagcaaatataaattcttttaaaaataaaactattttattacattgcctcatatgtaaaacaaatatttaatcttatcctatattttaccaattcttaaacatcaaattttgtccttccaactgactgtctatattctgttgacaccagacttatatttaatgattcatgactggaaacatatttcttcattgaacaatttcataatatttgatgatcccaaaacactccaaagaatgctagaatacttggaaattaagttatactaacgtgcagactgatgcattcttagatcttatttaaataactgaatcacagtctctgaagtttttggcaacatcaaattggaaaatagctctacgtctcttgccccatattcctggagcaccttgtcctcactataatctgtacatagaaacattaaaaaaacatatttattgaggaagcatatcttgaagaaaacaaaactgaagtataaattaaccaggattgctaataatgtgagccagtattaaagtataagaacgtcctgctgttctcttcccttctgtatgtaaatagtcattggagatccaggtggtatcatgctgaacctgctaaaataagtagtaagcagtgtcatgagctatcaaattaagtagaactctttcatgtaattttaagtatccatgaaatttttttccctagaagtctttacaaatctaccttgcatcctgttttcttaggtcaatgttgccttgcctgggaaggaccacccgggcaatcttatatatctactgttctctaaaaatgccacttagaagagaattgaaacttccaaacacatgaaaggatccaaggaaagtgtcttcaaacaattacatatgagctttaagtggaataaaaacagagttaccatgaaaaaaatcattttcattgctgctcccatacctaaaagctaagagtgggagaggggtgctaaaaaaaacccagtgtttgtgcgtctttaagcaatatttaaaaatatatacatataaacaaaaacttgacattttcattaggagaacccaaatatatttagcctctcatcctttaactgtacaaaaatcaagagaaagtaaattgataattctgtgcatttgagtcaaaggatgaggcagagttcacatttgcatcacaggctgtgaactatagattaatcactttatgtggtttgttaatattgattcagcccttgtgcttagtgtcatagggaagatgagtcaaacaaagaaaaacagtcactgcatctgagaaatgtatttatatgtatatgcctgtgtcctatccagtggtatgctggaaccagcccttgtgagcaaatagtgaacatctcttctgaattctgtgttcagtgatgtcaagtaggtagcttgaaatccactatggtgggagtatttacaccatggaaagtgacaaatactacaaatcaggacttttttttttcctgaggagcaagtagttaaacatttacctccccagcatggccccacccttcagcgattctgtttatttggtctggagatccatcatattttttatgaactccctaagtgagtttaatatgcaactagagatgaagacactccatgaaaacacatgagaagatgtctgaacatttgttgagcaaatgaccacagaatgtcaatgtgtatgggacacacgggggatacagatgaatgagtggaatgcctcaggttatcaaggggatgataagactggaattttcttgttttgtttgattttgttgttgttgagttgcagaagggaaaactgaaacataaattaagggaaagaaattacagatgagatgaatggcatatagaaaggtagagaggcaagaacaaatacatcataggtggagattattaatatggctagaactgattgcaagttggacattaatacatcaagaaataatataagtgaaatcacagttgtttttcccaagagaattcagaatctcaaagaagccacaagtggattgagttgatcttcaaggatcaatctggctatcttacagaccctgttccagatttgccctttataggagagttcagactcagaattataaaaaagaacatgagctcattgggctacctaatttatattgtgtaatgacacagtgatgaattatataaacatgaaaactacgtgaaagttcgtggaggataatgtaaattttacactacattcaaaagaatctcttccttttccatctgtttctttcaaaataccctcccagatggctttcccatgaggcaatctggattaactcagcctcatatccttccttcaacagcactttgaggggttacattcagaatcgcttttgaggtggtaaaaattttagcacaactaaatattttacatctaaagaaaagggctcagcagtgtgtaaacagacctacgtttttctttctggccccatcactgggctaattaatttctctttgctctatttatccatctaggaaatgggataataataatgccttttcccttactcccaagaacattacaagagatgcataattatataaattccaggtagcattattacattctgacttatttttgactgttaagtttttcatttccagagatttatagtctcaaaaattctagaatcctgatttattccaaagtacttcctctttgacgtcaagtgttttcattgaatgttttttaaggcaggaattttttagctggaggaaattttctagtaattgctccatcctactgttagggctaaagcattcagaatcatcttcctagcatttatgtcacacgtatacagaattacaaaggctctgtggtgaagtatcctcatactgcccaatgctgaagtctcctcagaacttcaagaatggcccttgttgaacctggggtacaaagcagcagagtttattctgaggagacaaattcagaattatgataaatctcagcacctgcatacgcacttgtgtttgtgtatacaagtacatgcatctagagagaaatgaaaagtgaaggaccaccctgttgcaggggtttgtgtttgcgaaatccaccaggtgtcatcagctgcaaacatcaagtgtgtcccataatcctaatgggagagttaatagtctcttaaaaatctaaaggggaaaatctgtaatatgtacgttaacttttttctaaaattccaaaaccaatgaaaacagcttacaaaataactctactatatttccacttcaagtgataaacaataaattgaaatcagctaattacaaataaatagaaatgaggctgggtgcagtggctcacacctgtaatcccaacactttgggaggtcaggagttcgagaccagcctggccaacatggtgaagccccatctctactaaatacacaaaaattagccgggcgtggcggcggccatctataatcccagctactcgggaggctgaggcaggagaatcacttgaacctggttggcgggggagggttgccgtgagcagagattgtgccactgcaccccagcctgggtgacagcgagactccatctcaaaagaaagaaagaaagaaatagaaagcagctcgttttttagcaatttgagcagttgaattctcagtcatatgaattacattcttcagtaggaaatggtggtaggtttttctttttctttttttaaaaaaagaaacaccataaaagtaccagattattattattattagagggtgctttgttactcaagtttttactttgataaaaataagtgtctctccaactgagatgtctaaaaaagtttcgctagtttatcaggtatttgatcgtttattgctatttcccttttaaggctttaatctgagacttgaagggactccctaaatgtaattcagacatttttctctcacctttcttctacccaaagggaaaacaggtttttaaaatcctaacagctctccaccctttcaatccactttccccattgttgtacagccctggcaaacgatgcctctggcaattaggacaggtataaacctgctccttttcaatttcccaatgagagaattgcaaagttttcagtttctaaaagactggaaacaaagctttctgtttcaaaaaaagagtttttacttgcaagtaacatcttctgtgggtggtgtgcacccgggcaaagaaatctcagtaagccttgattatcacgggatttcttccccctcaaaataaaatgttgaatgtttttacagagacttcaagggcagttttaaggatgtttatatttcagacaacctaaacattgtttggagcaaaatgagagatttcattttgggacaagcaagttgatgaattgcagtcagcatctcgttctcaaagaaggcatttttactgggggcttttagtctagacatacaaagagggaaggaggaaaggggaaagcattctcactctaacactcgtcttttacatggtaccttggccagtgcagtaaatagttcataataaatcagacttacaaatactcactcgtctactcactcaaggagcataatgatttatactgcctaagtcacaaagattaccgatgtatttattttcttgcttatgcactttcaagctagtaaaacatcttgtgggccagtaaatgtttagtaccaactggcaaaacatgaagaatcatatcaaaggttgccctaagttgcacggttttgttgtataggaaatactttttgacttaacctctgacctctgacatcaccaaggtcaagggaaaaggagagagcaaagtagaaaccaaggtttaacccttaataaagtagctcaaggacatagaagcacagggaaattggagggcagaggaagcgtatcaaaatgattattaactgtaaacagatgaagtaattagcttagctaacagttgtaatacaggaatattggcaggatgaagtcagcggttcttggcaggaaatgttttatagagatgacaacttctaacagaagtgaaagaacatcaatcaatttagggcaacttataaaactccaaaaagcaaaatttagtgtttctggacttgacaaatttgctgtgagagttttttttttaagtatgactgtttctgtgtggggaagtctgtggattaggctcaaaacaaaatggcagtggctgcctgcatttcctcttcatattgcagaattttcctctacattttgatgtgtactggataaaaaccaattgtttactcaatatataatctttcttcttactctccaaacttgctgacccaaattaatgtggaacaaatagcaactggctttaaaacctggtctttctaagaaaatccttaatggttgcatagaaatatgttgcattgcctcagacacttacattcaggaaatgtttgctggacactcagatgtctacagagaaattgttaacttactgttattgatatttttataatcttactcaaaagtcataactcaggataatgaaaaatgtttggtgcaataatgattaaaatccacaaatattctgttccctggccgcaaatacaacacctatgcaaaattttacacatctacaaaacaaagggaaaaggtttttcctagtctatgccattaataagcacatctggaatataacccttaagcagtctttaatcataatttaaagctactttgcataaaaataagaacattccacaacagctgtggaaacattgaaataaattttcttcttctgggccgggcacggtggctcatgcctgttatcccagcactttgggaggcccaggcagaagtattccttgagcccaggagtttgagaccagcctgagcaacatagtgagaccccatctctatttaaaaaaaaaaaaaattaccttcttttgaatactttgtttatgcaaaaatccttttgctttctttagctatttttttaaatgcagtgttcctgcagtaagaattgaacctggcatggaaaactgatcaaaccggtagtcctcagaaatcatcactcctgaaacttgcaattagtttatacctaaaatgatttccctatttgaaaaatgtgcctaccatttccagattttaaaaaaatggccctttatcccagaaaggagaaattcattgtatcccagagaccagcattacttctgttgcagtattttcagtgatggaactctgttgaggctacagacaagaaaagcaggagagcattttaggaatctaagattttttattttactttcctctggggaccttctttaatagtttttttctttcttaagaacctatccttgaatcataggtaaagaaataatcacagaatgagtaactgacattaataatcacagcttcacactatagtcttactggatttttacgtttttcagggtttccccaagtggtggtcacatttcttacacaactctgcagtgtagatagacatgtatagtcattactgggctgacacggtgggactgagacctgctagtgccgtggttggcatctatgattagtgaggtccaagatcaaccttctttacattaaacatgccctagcaagaccttcaacccaactttattaagctgatgctaacgcacacaaagaagtcctaacaattctatgtttttatatacataatgcaaaaataaagacaagatcaggtacaattgctgtcaatatctcaacttattgtctccttttgaaaaacataattcccgcctagcatttccaccagaatcccttgctcttgccaggttatattgtttatatatgttccatttaacatgttttttaaaaatctgctgtagagttttcctagttggaggaaataatcactttccattaagttaaacagtcccgataaattttaaatgaaaatatctgacagagaaatagaaaaactcagccttgtggtcttgccggtcacttagctacagatggaacttgaaaaactggttcctggtcattgctgctgaagagagccctttatttctgttgtgacaggactgactcaagatactcatgaacgtggaaaactcctaaatgtgtcattctgagttcctgagaagttgaacatacacagatgacaaaaaagaatgccatttagccataactaccctttctagattaccaagtatttgtaggtttattggcaagatagcttaaattacgtatgtatttctggcctgcaacatcatgtaatagaagagttgcagaattctttgcagttaagaaaaaaaaaaaaagataaggacttattaaagctgacatggactgtgatttttgcactccgtaccacacacaaaggagggcatcgtggtgacaccacccctgtgtttgtatttcttggttccatttagaattcactggcctcttctactgcagacctgctgtttagtctgcatctggaaattaaacccagagcttcagctcttagcattaaatattgaactttcttccagcacacaccctcatccatgcctgtatagtaagtctgattaaactcaagacattttaaaattccatcagccttaggagttaagtttggatattgggctgtcttcctcctcctttttaatctattagaagaagtgtacccaaaggtatatataccacatgcatcatgttgaaccaaattaaaagaacagtgatatgtgcaaactatatttctgggttttagtggagtttttttccaaacttagctaaaacaatgagttacatttatcaaattccttttttcatgaacaaaagaaaaactaaggcaaagtaagtgcacttttccagtagttataataaaaatatagttttccaactctgcccacccctgttccccactcatcagttttctgccaagaaacctcacatgtttcggcccggtacctcacttgtctttgtaaagtagctgcatgatggctgggagcttttcggtgtttagaggccttagtggctggtgctcataaaaatgtcaccgtgcacttgcactttgaaaagtcctttcatctgaacattcctgaagccccattccaacaggtaagccttcttgaccaaagagtggctgtttagccttcccaccctgccactagaccctaatgagatgtgtgcaactcttggctacagttttcatctccttattacttcaaggctcctcttgggagctacacaagctcaaaggtcctttgaccattaggtgacaaatgagaagcaattttttaaaaacatgtcaaggtaaaagctattgtctataacacacggccatgtctttttttctttttttttctttttatttgagacggagtcttgctctgtcgcccaggctggagtgcagtggcaccatctcggctcactgcaagctctgcttcctgggttcacagcattctcctgccgcagcctcccaagtagctgggacttcaggtgcccgccaccacgcctggctaattttttgtatttttagtagagatggggtttcaccgtgttagccaggatggtctcgatctcctgacctcgtgatccgcctgcctaggcctcccaaagtgctgggattacaggcgtaagccaccatacctggccccatccatgtcttttaagttattaaagatgatcgaagctcaggggtccctaccaactcctcagttacagaaacaggactctttggggatgtcggagccagctgcttattctccatgtcacctgtttctgttccctctttgcaccacagaagcaccctgtgttaagtctggccgaaccatgacacttaggagagctgagaatgggttttccaacctcattcctgacagggaggatttttcttctcttcattgaatgcacacttgtcgtacagaatccgcacatgtaaccaaagaccaagtcactgggaaggtgagagctgaggtttgcagaggtgggaaaagccacctgccccaccacatcaaccctttgggaaccattccttcctttgaagggtggccagccagggctatgccaagaagagagagctctccactaactagacatttgagaaaaccatcattctgagcatgtgagagccacattgcctccaaacctttaatgaagtgagacttccaccctctgacatcctagtcatgttcccagtactaactgatagttactagtagaattctaaggtcagcagaaagatacattaataaaacaactatccacattgtcttatccacattgtcttaaggacagttaaggaaacaatatgacctaccaccattttcatctgaattgtgtctaaagggttggaattcaggagtttcagcagctcacatcaagcaaagtttctgggaatgttttgaaaagctgatcacattccatctagtacaaggtctttgttaagttcatggcctgaaaattctgtttccttccggatttgaaagtaccttggtttccggatagtatagaaaaatcaaacagttagaaattgaataattacagcacaatccaggaggtttgccagcttgactgagttctatcaattttttaaccgtaagaaggaataaaatatacttgctggcttttatgccgtggtctgtttcagagtagtcacctaagtccacacctcatgtcagaatgagaagtgaatcatctggggacaaacgaggtgtgtatctgcctaacagcttagtgactttctggaatttaaatattaagtgaaaggacagggtcacagggcagctgatctttggctcgtctctctttcgtctgcccatggctttgatcatgctacatcctcctttgtggccagggctccacagagaatctcagggtcatggcctgttgcctagtcaagaggtataaacctgctgcttaaatatgtgaagcccacagtttgggggttgggagttaaaggggaggtagcctcatacgttccacttttcccacaaaacccaaagcagactaaacaaaaccggtgtgaaatctcatgacttgatgctgccgtggttatatttttcaagctgtaatccattcatttgtatgtgtgtttattcccaggatttacagctcgctcagtcttcggggggaaagagaatatttgaaaccttttgcaaagggtttgaagtatgcagtggcctgtgattaaagcccaggatagagtgtgtgtgtgtgtgtgtgtatgtgtgtgtgtgtgcattcatgtgaatgtgtgagtgcccattcttgtggggtttttttctcccatttgctgcttttacgcaaaagcatcacacatggtagcatttaggagccccttcacagctgaagtgtttcaaacactaatgaatggaagtttggtcatataatgcagacaagctttaaggcatgctttactgaatggtgtactgtagtgacctgggaaaggaagagaggtataaattgtgtcggttagccacccagacaaaatgaagccatgtggaaaatcaaatctattaaagtatgaagactgttataagctgttttaagctggccattcttaaaggggctcggtctgctgcaggagtaaatgtttacctcttcccccagatctttttcacatgccgtcttatgagacaatgtgcagcatttgataaaaatcatcctctcactaacgacgcttttatcggaaatgtttattgtctccgctttaccacccatgtcctgaaaggtactgcacatttgttaaataagcaaaaggaaagagaactttgcggctcaagccggctcgcagaaaccccaacaaattccagagccataaggaatcagaaaaaggaaaagggaaggaggagttagatttatatgaagagggggccttgcaaaaacatatatattagattttctctgcttggctagcccaccatcaaatgtttggtcgatgcggattagtattgagattgagcagttaacgccgaacttgggtcactgtctcaaaatgtgctttaataaatacaagggggaggaaatggatttgggaaggctcgttgtcagctctgcccctgctctcacactgcctctgcacagtggtgtaggggtcacacacaggtgttggcaccagtaccaacccgacccaaatcctggtcccacacaccctgtaattttgggcacattacttgtctgtgccttggttttctcagatgtaaaacaggaatattaacagaaggtgcctaagcatctggtaagcactctaaaaataccagctattattaccagtatctggagggtgggttcatttataccttaagaaaggatccccctaactctatttttcttgtgtgccggtttttaaaactgatgaatggcatgctgtcgggaaaaatttatccattcctactttttttctaattggtgagtaagcgtgcattgccctgacattctctggacagcaaacaattgaatttgctgaccagccgccatgatgtcaagccttaagtcaacagtggctaatgaccgctctgggaaaaaacaacaccttgattcctcaattacggtttaagaagccctgggaatgagggctcgccagtcatcgtcatcctcttttgaggcaagcataatgtgctgtggaaacaggttacctctgcactgttggcaagagcagcccacacagtataacgattgagcgtcatggctgtgccctttgtgtgttccaggaggaaactgaagagacatcctcacaagagtctgccgaagaggactagggggcgccaacgttcgatttctacctcagcagcagttggatcttttgaagggagaagacactgcagtgaccacttattctgtattgccatggtctttccactttcatctggggtggggtggggtggggtgggggaggggggggtggggtggggagaaatcacataaccttaaaaaggactatattaatcaccttctttgtaatcccttcacagtcccaggtttagtgaaaaactgctgtaaacacaggggacacagcttaacaatgcaacttttaattactgttttcttttttcttaacctactaatagtttgttgatctgataagcaagagtgggcgggtgagaaaaaccgaattgggtttagtcaatcactgcactgcatgcaaacaagaaacgtgtcacacttgtgacgtcgggcattcatataggaagaacgcggtgtgtaacactgtgtacacctcaaataccaccccaacccactccctgtagtgaatcctctgtttagaacaccaaagataaggactagatactactttctctttttcgtataatcttgtagacacttacttgatgatttttaactttttatttctaaatgagacgaaatgctgatgtatcctttcattcagctaacaaactagaaaaggttatgttcatttttcaaaaagggaagtaagcaaacaaatattgccaactcttctatttatggatatcacacatatcagcaggagtaataaatttactcacagcacttgttttcaggacaacacttcattttcaggaaatctacttcctacagagccaaaatgccatttagcaataaataacacttgtcagcctcagagcatttaaggaaactagacaagtaaaattatcctctttgtaatttaatgaaaaggtacaacagaataatgcatgatgaactcacctaattatgaggtgggaggagcgaaatctaaatttcttttgctatagttatacatcaatttaaaaagcaaaaaaaaaaaaggggggggcaatctctctctgtgtctttctctctctctcttcctctccctctctcttttcattgtgtatcagtttccatgaaagacctgaataccacttacctcaaattaagcatatgtgttacttcaagtaatacgttttgacataagatggttgaccaaggtgcttttcttcggcttgagttcaccatctcttcattcaaactgcacttttagccagagatgcaatatatccccactactcaatactacctctgaatgttacaacgaatttacagtctagtacttattacatgctgctatacacaagcaatgcaagaaaaaaacttactgggtaggtgattctaatcatctgcagttctttttgtacacttaattacagttaaagaagcaatctccttactgtgtttcagcatgactatgtatttttctatgtttttttaattaaaaatttttaaaatacttgtttcagcttctctgctagatttctacattaacttgaaaattttttaaccaagtcgctcctaggttcttaaggataattttcctcaatcacactacacatcacacaagatttgactgtaatatttaaatattaccctccaagtctgtacctcaaatgaattctttaaggagatggactaattgacttgcaaagacctacctccagacttcaaaaggaatgaacttgttacttgcagcattcatttgttttttcaatgtttgaaatagttcaaactgcagctaaccctagtcaaaactatttttgtaaaagacatttgatagaaaggaacacgtttttacatacttttgcaaaataagtaaataataaataaaataaaagccaaccttcaaagaaacttgaagctttgtaggtgagatgcaacaagccctgcttttgcataatgcaatcaaaaatatgtgtttttaagattagttgaatataagaaaatgcttgacaaatattttcatgtattttacacaaatgtgatttttgtaatatgtctcaaccagatttattttaaacgcttcttatgtagagtttttatgcctttctctcctagtgagtgtgctgactttttaacatggtattatcaactgggccaggaggtagtttctcatgacggcttttgtcagtatggcttttagtactgaagccaaatgaaactcaaaaccatctctcttccagctgcttcagggaggtagtttcaaaggccacatacctctctgagactggcagatcgctcactgttgtgaatcaccaaaggagctatggagagaattaaaactcaacattactgttaactgtgcgttaaataagcaaataaacagtggctcataaaaataaaagtcgcattccatatctttggatgggccttttagaaacctcattggccagctcataaaatggaagcaattgctcatgttggccaaacatggtgcaccgagtgatttccatctctggtaaagttacacttttatttcctgtatgttgtacaatcaaaacacactactacctcttaagtcccagtatacctcatttttcatactgaaaaaaaaagcttgtggccaatggaacagtaagaacatcataaaatttttatatatatagtttatttttgtgggagataaattttataggactgttctttgctgttgttggtcgcagctacataagactggacatttaacttttctaccatttctgcaagttaggtatgtttgcaggagaaaagtatcaagacgtttaactgcagttgactttctccctgttcctttgagtgtcttctaactttattctttgttctttatgtagaattgctgtctatgattgtactttgaatcgcttgcttgttgaaaatatttctctagtgtattatcactgtctgttctgcacaataaacataacagcctctgtgatccccatgtgttttgattcctgctctttgttacagttccattaaatgagtaataaagtttggtcaaaacagatcaaggagggagacactcacaagtcattttgttgcaccccttgcacacatcttggcacacatgtacataaagtgtgttttacatatcatactccttcaatcaactgccctgagctcgcctttcagattttgacatttaattctacagagacaatcttagaagaaacatgaagaacaagctgtagctccaaactacagaatttttacttcaggctagcacctacaaagtttgtaagggaagtaactaatgcactagtcgtctttgaagtaacattggaaagagatccggaagattgatgaataagaaatgaaagccacgaagagtctcctagataggagccttttaactctaaaaactactagcagagtcagaatgattctaccaagttcaaggtcaacttgacacttaagttgctaattatgaataaatctaggatttttaaaaagctaaaactttcggtttttactatcaccgttgttactcaaattttcttcatttagcttcttagaaggagaaatttgtttctaggaaaagcttgccaattttaagacatctactgtcaggaaatttgttaaacgtattatttcattcctaaattcattcacttattctcacagccaatattctgtgagtaccttactgagttgtcctgaaaagtggttgcatcctgaagcccctgccaataccaaggacaaatcacaggccctctcacaaaaagcctttatggtcaccatcagagagggagaatgagtttcaaccaatgtagcatttcacatgggagcgtggggagggtatgtatcttttaatgggctgaggatgctcaactctctggtgaattcaggaatagtaaatggtttaggagtctaggcagaaataaaaatagaatttaggaatgaataccatccagctaggaggcatatgaggcaaactccaactgtaacaaaacttcagagaagtgaaacataagaagcccaagaccagcacagtggcgcactcctatagtttcagctactcaggaggctaaagcaggagggtcacttgagtccaggagttggaggctgcagtacactgtgatcacacctctgaatagccactgcacttcagtctgagcaacacagcaaaactctgtttctcaaattaaaaataaaaagcccaagggcagagagaagacggcagatttgatgctcttcttttcaagttagttttatttctgtgaaatgactttttattgagcaagactaatttctagagttaggtaaggtcattcttgagcaagtactcttcagatctaggaattctggcctaaaagtggacgaaaagttgaaaagaatcaaaatttttttgaaatacataattcagatagacaacaaccggaggggggagtcaaaaggcaacaacaggggtctacacccctggtctgagttcagccgtctgtaaaacttggcaatttttcttctgaagtaggagggaaatggctgcagatatgaccctctctcctcc

SEQ ID NO: 256 - DNA, 28772 bp, Homo sapiens
  source 1..28772: mol_type = genomic DNA
cttcactcctgagccagcgagaccacgaacccaccagaagaaagaaactccgaacacatctgaacatcacaagggacagactccagacgcgccaccttaagagctgttaacactcaccgcgagagtccacggcttcattcttgaagtcagtgagaccaagaaccctccaattccggacccattactgcacgcccgcctgggctctgtctctaaaaataaaaaaattatacttttataaactctttccttgaagggttaaatgcatatgaggaagcggcacatggacttccttggcgcttcccccaccctccctttctaccttgtgtccataccaaattttgtgatttatcactaagtacaaattattagttaagtgctataaagattcttttgaaataccttttgggaaggatatagaatttattttaagagcataaaactagacaactggtgtttctttattgcttgctttggaactcatattcctattggagttcccaattaggcagtttgcgaatgaaaatttctaaatcttgggctaaagcctgttttggtaacaactttagtccttatttgaattacattagtaggcatgtgtacaacctgtaacttctgagatatttggtccttgagacttctagcggcattaaaaatatgacaggttctaggctctcggtacttacacacttttctctcttttttttttttttttttgacaaggctgctaagagaacactgcaatctttgggtagttcacccgttttctttactgtgcaaggttcataaaggcaggcactatgtctgtcatgtttgtcactatatctcccatgccaaccacagtgtgtacttcacataatgagcatttcaaaggcaacatttggtaaagagatatgaatgaaggtcttacactgaagcagtggggaacagtagaaccagcctaagcattagatctgggttcaaattccagttttgctcattatctatgtgatctacagcaagttgcttgacaaactttaatttttacttttttgtaaaatgggaataatacctattatataaggattataagaatctataatcatttattaaaactaaggagtgtttagtgttttcttcgtaatgtgtttcaaaatatgggctttaaaaattgagtgaaatacaattcctgtccttaataaatttccacatacgatagtaagacaaataaaaaaatactacggaaattttatgggttttcaaggtcgggagtgatgatgtgtttgagggaattaggaaaggaggtggcatatgaaaaagtccttaagggatatttaggatctcagcagttaaaatgggtaggcatatccaaggtaaacaaagagaacataagcagggaggtaaaaaggtactgagtgtgactgaagaagggccagttactcctggctgaactgtaaggttcgcacaggaaagtagagatacgtcagaaatgtgtggtggggccatattagtggtgacaggttctttctttaatccagtagacaatgagaaacgctgatttgggtctatggcataataggaagtagtatgccacatactgcatgtgggagttctgcaggacagattgggaagtgcatgcgtgtaagactgggaagaccagttaggagaggctattgcactgttttaagtaagacataataaagccctgcaccaggcggagagcagaaggaacgcacagaagacgcaggagaggcacatttcagagagaatccagtatgcaatggatgtcgcacacaagagagagagacgcaggtgaccggagccatttacactaatgggtaaatctcgggaaagcgctggtttcggctaccggccagttacaggtttgaggtgcccgtcgccgccaccttccctttttttatattcctctttttctcatggccgcctccgcttccctccatctctcccgcgctagtaactgagctttcagtcatcgacctgaccctgcgttttccctcacgctccgattctgcttcctatcactgcctcctactgtactatcacagccaggacgagcacgggtcaggcactgaggctgtgggacactccacccgcctggtcccctatcgcctccgcctaggcagctgccatgcgtgcgcccccacagctctaggaccaataggcaggccctagtgctgggactcgaacggctattggttggccgagccgtggtgagagatggtgcggtgcctgttcttggccctgcagagagctgtgggcggttgttaaggcgaccgttcgtgacgtagcgccgtcaggccgagcagcccccaggcgattggctagacaatcgaacgatcctctcttattggtcgaaggctcgtccagctccgagcgtgcgtaaggtgagggctccttccgctccgcgactgcgttaactggagccaggctgagcgtcggcgccggggttcggtggcctctagtgagatctggaggtgaggcgggcggtgaccgagaagaggggcaggggcggcggggagcggggcggagatgggtgggagcggggtttgggctgtgttggtggcaattctggagcttccctcggccctgggaagtggctaccggcagctcctgcggacctggagggggctgcggttgcgctttgtcggtgtggcagctcggacccgcggggactgcaaggaatgtccttgaggcccggcaggccgagcggcggccggcatcagtgccggagtaacccggggtcccggggtgggcttgagaggcgggcggcggtctggcctcttcgtgactgcggtcatcatcggtggacccgcggggcgtagctgcgttcatcgtccctgttcagtcagagtaggcagtgctggctgcacggtcacgaaaatcggggcggaaagggtgtcaggcagggtgacctcggaggcccctggattcgagaaatgctaggggtctatggggctgtcgggccggcagctcgcagggcagacgggagaagcgcctgcatcccgggatccgggcattcacgcccaggaactgctgttcgttagcacctttcttttaggtgacgggaaagatctctgtaaatactgctgactaacttagaaccatgaaagaaccgtggattggtgtagatgtgtctggttatttacaggagaacggcttgagaggatgcggagcccaacgtggggattcgcacaatgactcaaaagattcttctccctctttttttttttttttttttggtaaggggtgtagtctccttggtgctgatattcttttaggaaaaatgtaccttggagatacaaatatagaacagttaatttctgcagtaggaggaggtcgatgtactccattcttaagtagtcgtttgaaatatttcaggatttgaggatattccttcttagacatggtcctgcagagtcgtaggaagcatttgtttctgggctatactaaatgtgcatgatttcggcgtcccacaaggtagagaatgtactttttgtttacttatgaatttattttcctctccatgcagtgaaaggcattttgcaatttagagataatctagcaaagacctggacagtactttggggataggctggattttgcaggcctgctttgttgtagtgttcttccagaacttatgataaacttggtggccaaaacaaatgggaattagtaacatgaaggttaaacaaaattgcacataggttacagcattaacatgaaaattgtcgggtatgtgggataaccatttcaagataagagtgtgagtatgcgtgcatgcacacactctttgtattcctttatggtctagtttctagactatagatagccacattatggaattacatggtctacttaggttgacccatgtgaaattgccagtatttaaaattcaactaacctacaaaaatagcagtttcatatgattccatttaacacttatctttgtcagagaactttggagctctagcttcataagtgaatgaagagaatagatatgacttaaaaaacaacatgtaatagaatgtgagctaattgggtatagaatccagatttcctgattgccagtgcaagattcgtttttttttttttttttttccttctttctggaataccagcttgagcagcagaatgctagatcttgttgggattgaaaatgactgccatataagacgcagttcttggcttcaaagagacaaaatgtacacatttattaatttgagaacactgtgagatagtatataatcaaatactggaatgtgtaatgcaggcggagtgctgagtaggaggaagtaagatgccaaaacatccttttctgcagttggccatggtaggtggcttctgtagcagattggattgacatttaagaattatccattcttttaaagaatctgtaaaagtttgcagcatactttttagtctgaataagtaaggcataccttgcctatttgtttctttaagtaaaattaatttttggccgggcgcggtggctcacgcctgtaatcccagcactttgggaggccgaggcgggcggatcacgaggtcaggagatcgagaccatcccggctaaaacggtgaaaccccgtctctactaaaaatacaaaaaattagccgggcgtagtggcgggcgcctgtagtcccagctacttgggaggctgaggcaggagaatggcgtgaacccgggaggcggagcttgcagtgagccgagatcccgccactgcactccagcctgggcgacagagcgagactccgtctcaaaaaaaaaaaaaaaaaaaaattaatttttattgcagcattgcataaatactgtcaacttaatttgcaggagctatcctgtagcctgcttgtgacatttgcaactgctgatgaaggtggacgattgaattctatggcatgtaaatgctttgcgtaatcacagggcaacggggaggatgttcctgagaaatgagattgtttataattatggttacttttgacacaccctcataagattgctcagtttgtttccaaataggtggagttctctgtgtttaggggcggctgacagaatcatgtgtaatttttttccttgaatattgcaaagatgactttacacctaggaaaaaaagtcccagaattacaatgccaccataaaatcttttgagggaaaacataatgtgtctaatgtataattatgggtttatgatgttaaaccaatttgttcacaagttagtgttccttctgggttgcagctaagattttaactcaaatgaattaactttttaaaacaatgaatctgattgacataatgaggaataatctgagctgaagagtttttttttcagggaaagagggttagaaataattttgacctaattttgaaacatgtagttaatttactttctggaactttgatgctaattgatcctttagaacagttggtagagttgtgttttaaatgtaggaaagaaattatgtgatagaataccatgatgaaaatctagccttttagtgagtgagtcttttgtttataattaagtagagttcaaatctaagatttgattaaagatttccaatacttaaaagtccaagtacctgctaatttaatagaaagtattttgttgctgttgttcattttccaggatagttccaagttgactgtctctaatctgaagatctgaaatccgaaatgctccaaaatctgaaatttcttgagcaccaacctgacactcaaagaaaatgctcattgcagcatttggagtttggattttggattagggatgctaagctaataaatgtaatgcagatattacaaaattcaaaaacatccaaaatctgaaacgcttctggtcccaagcattttggataaaggatactcagcctgtatgtaaaatgtttctccttcccgtaccccattaataagttccctgaatgctctgcatttagccttaaactagagggcatgggttacatccatatctaggtgccttaaaaaaaagtcgtctttaggtctgtttcaagatgtgtcataaaatacatgctactatagcttaagaatttaagccagcatttgttgagcaatgctgtatatgagtgcaaggtgctggagggtaaattgatgaataagactcagggtggaaggttgaaaaagcatgagtaaacacaggcaggtacatgccacatttatattcctttaggtactgccagctttttaaaactgtgacccacagtaggaaatacacgttaatttaaaagccagacacacacttatataggtatagtttcttgaaacatagttttaagaaataatacctacccatactacctggcttacccaacagctattttttataatattgttttctattttattttatttaaaaatgtttgttcttaacgacaaaattgatgtcatgatgtaattgatgcagttgttgtggatcaacagtttgaaaactgtttagctagtggtgtggtatgtctgaaatgtagagaacatggagtgatgcagtgagagatgacacttggtatttgctttggttccttaaagctgctctttttttttttttttggtctttcccctaaccctttataaatagattaatgctttctttcacttacttgattgcctttttatagtctgtcttcaacagatgaatcacttttatttattactaaatgtgagattcatttgaattcttgctagagtggcagttaatgagctttttaaatctttttggttgatttttgcaggttactaatatgccttatcacaggcattgattttagtgaaagaagtaagacttgcaggtttatttgtggagaccaatggtaatagaagatttgttttcaaaatcagaatgtcataattattatttagcaaacaggaaatttagtcatggtagtcagtaaatcaaaatcttctatatgttcttttgggaatttttttgaatgctatatacagatacttcagccagtcatcctcttctagtactgttccagcttttgattagttgtgaaagtttggagcttttcacatctaatgcttttccattggtcttctagcactattgttgatgaatctgctagaagaaaagcagccaccacagcaaaattcttaaccctgttttattaatgtagaaacatctatcagaaaagactttttttctgttgacagcaatgttaggaaggtttattaaacatccttttgctagtgacattatgccatatgttctatggaatgaaaaagtacaagaggtccctgcccttgaggatcttatcaactaacatgatttatagcaggacactcaataagtggattcttgggtgtttaccttttgtgtaatcagaatgtagatgatgaagaagatacttaacatgcattttatatctaggtaattagaaaatgtgaatagctgtttctcacttgtgttttctgcttgattgctcttctacttgcaaggcttaggtaataaggtcgagatacttatctggtttgatcttaaatgtttgaattcatataatttttaagaaatggctgctttaaagttggttgccagtaagtaataaaggatttattgtttgagtgaagaagaaataacatagttctcttaattttataattattttccagaattataaggaacagtatcaaatagtcatatgtatgggacactgtgcatacaaagcagggtttatagcacacttttccttaaaatcttttcctaaaaatacaatgagctgtatactaagtgttcacccttgatattccttccaggatccaaggattctgtagctacaatgttgtcaagactttttcgaatgcatggcctctttgtggcctcccatccctgggaagtcatagtggggacagtgacactgaccatctgcatgatgtccatgaacatgtttactggtaacaataagatctgtggttggaattatgaatgtccaaagtttgaagaggttagtgaagttaatttgatactgactaaagtaaattacattttcaatttttgaagagcccttaagcccctatagggagcacataatttttaaaagttagagtaaaatatttattttagtattttggaacttacctcaaatttctgcttacatggaatgcactggaaatgctcttattttgctttgtctttacaaatgaatgtaattgactttatttgagaaatacatcttttataagtgactaatagtcaaaaatgattgtgggccgggtatagtgactcatgcctgtaatcccagcactttgggaggccaaagcaggagaattgtttgagcctaggagttcaagaccagcctgggcaacctggacaacatagtaagacccagtctttaaaaaaaaattaaaggccgggcacggtggctcatgtctgtaatcccagcactttgggaggccaaggcgggtggatcacgaggtcgggagatcgagaccatcctggctaacatggtgaaacccgtgtctctactaaaaaatacaaaaaaattagccaggcatggtggcgggctcctgtagtcccagctactcggaaggctgaggcaggagaatggcgtgaacccaggaggcagagcttgcagcgagccgagatcgcgccactgcactccagcctgtgtgacagagcgagattccatctcaaaaaaaattaaaaaattagctgggtgtggtagcatgtacctgtagtcctgctactcgggaggccatggcaggaggatcccttgaacctggaggttgaggctgcagtgaactgtgattgcaccactgtactctagcctgggtaacagcatgttaccctgtctcaaaaaaaaaaaaattgtggtgatgtattggcttaccacagtggtttgattaaaagttggatttaatttttgatttgtaggtttgatatttttattggacttgtattgtgcttacatttatgttctcatgactatataaatgaattacacatgcaaaataaaaattcttagttttgattacttattttaaaagtcaaagctaatggaatttccttttctttctctcctattaggatgttttgagcagtgacattataattctgacaataacacgatgcatagccatcctgtatatttacttccagttccagaatttacgtcaacttggatcaaaatatattttgggtaatagttttacatatttaacttctggtgtcatcagatttttgatttgctgtggaaataaacctgttcattcaaatcatgtatttggaaatatgtgtattgctgaaagtgtgctgcatgcattgaatagtttccttattattggcaattagacattctgaaatttgagaccttaataatttggagtaaactagtattatctcagaatgctgtgtgacactgttattatttgtgtagtaaaggataaagtttttttagtattgaacttttgtcattttaggtattgctggccttttcacaattttctcaagttttgtattcagtacagttgtcattcacttcttagacaaagaattgacaggcttgaagtaagtatttaaaacctaaatatactttctgtcaaaatacattttaaaaaacttttcttccccatgctgtaaaggtacattttcaaaagttaagaaaataaggggaaatttttttgtataattttactattagctaattttaataactattaacattttggcatatatccttttctactgtttttatacttaaagaaaatatctgatatcatatatattgttttataatttctttatgcttaataatagtttatcaacatctttccatgtcccttttttttttttttgagatggagtttcgctcttgtcacccaggctggagtgtaatggcacgatcctggctcactgcaacctccacttcccgggttcaagcagttctcctgcctcagcctcctgagtagctgggattacaggcacctgccaccatgcccatttaatttgtgtatttttggtagagactgtgtttcgccatgttggtcaggctggtgtcaaactcctgacctcaagtgatccgcctgccttggcctcccaaagtgctgggattataggcgtgagccactgtgcccggcctccatgtccttaatgttaaactaaattgtttgtaatggctatatgtattctcttctgtctaaacgtcttgtagtttattaatcatctaatgttggactgttaggttatgtaattttttttattaataacaacactgtgatgaatgtctttgtaacgaaatttttgttcatatttgtaatcattttcttaagatacattcctagaagtgagacagtggttttgctttttttagagctttgcttttttttttttaagagctttttagtgctattattgccaatttagtttacagaaagtttgtttagtttatccttccacaggtagtgatcaatgaaaatttttatatattccactttttttccctaatggtaatccaaggagatattttttactaaggatgatactttgatacaaaattatcaaaaggtgtttaaatgtaaatatacttacattttaacattaaaaatatttttaacaaatattttgagcaactactatgtttagctttgaggatgccaaagaaatatagggtatacttttttgtctgcagaaaggtacacatactacaggatcatacagtatggagggggaaaggttttgttctaaaaagaatttttttaaaatcatactttttcccgttaaatttatctgatcattttgttcttttccagtgaagctttgccctttttcctacttttgattgacctttccagagcaagcacattagcaaagtttgccctcagttccaactcacaggtaagtattatttataagataggaatgtgaatagtattccttttttcagtttacattaataggaaggattaatagcgtttcttcatagcacaagatttaagaattgcccaaagttttaagtttaattctcaagtcccaagactggtctccataagtgccccaggaacagtcccctgtatctaacaactcaattatgattctgtagctactggaatttggaattgcccccatttttctttttgaaagttttcagaacttatggtaataataatttttgggtaaataagagtattttcctagtgaaacacatcagagagcagaacaagatctaatggaagagaaacccagggtagattgattgattgattgatttgagatgtagtctcactctgtcacccaggctggagtgcagtggcgagatcttggctcaccacaaccttcgcctcctggtttcgagggattcttctgcctcagccacctgagtagctgggattacacatgtgcaccaccatccccggctaatttttgtgttttcagtagagacggagttttgccatgttggccagactggtctttaatttctgacctcaagtgatccacccgcctcagcctcccaaagtggtgggattataggtgtgagccactgcacctggccagatttatttttaaaccccttaaattaacactggcattatttcctattttaagtttcatcttaatgttcattagtcactttgaagaacctaaccattttaacaatattatatcagagtatcttgagtataaaatagcacacaattctgccctgattatttgttgatgaaagtgtgtgatcatttgaacatattaacaaggaaataagtttggttttattaatactaatatgatctcataaaatttgcaactaagcttctgtcatggtaggtaaaaatatagaatgttgtaggatttaattatgtgtgatttaaatgacagagttaatgcactacctcaaaggaatattcctaacaaatatcttattcagtggaaagggaatcagggcactatatgttcttttttaaaaatttggctgggcgcagtggctcacacctgtaattccagcacttcgggaggccgaggtgggcagatcacctgaggtcaggagctccagaccagcctggccaacctggtgaaacccagtctctactaaaaatacaaaaattagctgggcatggtggcgggtgcctgtaatcccagctactcgggaggctgaggcaggagaattgcttgaacccaggaggcagaggttgcagtgaaccaagatcacaccattgcacattgcactccagcctgggaaacaaagtgagactacatctcaaaaaaaaattttttaaaatcctttatattacaatcatactttgtatcttgaatacctgttagttttatcatattgtatattttactctttgaatagtaatttgatattaatataagccataggatgctctaacatttaaaaaagttgttctgtcccttgccttcattgatatgtttgatctgttttaggatgaagtaagggaaaatattgctcgtggaatggcaattttaggtcctacgtttaccctcgatgctcttgttgaatgtcttgtgattggagttggtaccatgtcaggtttgtaagcaatttttgccatattttaaaataggtatgtcgctaaagaggaaaaagaacatcttggatttgtattatttattgttaaattctgacttttaaattactcttaaaattttttattatattagtgtgtgggtatatctggcctgtttgctttggtggaaacttagcagcaggttactgatttatttttcactcctgccatcctctctttgtgttccactttgtgatatttttattcatttgatttcttttgtttgtttttttaaccaacattgcattccaaggttggtctggaaaacactttccagcccctgctgttacttagactcaattggtgacttggttctttgtgttttaattatcatgtagggagaaaagagtcaggaattggacagatctgagtaagattcacctaataaggtgattggaaatatttaatccgatagtaagcagtacatctcagcaagtacccagcattagcttcaacacatgtttcttcattcttaattggatagtagagaattagatattaatatcaaacataggacttcattatgtagaataaaaattacagactggcatggaaatttgccagaaggaatatattacgctgtgtgaaggtctcctaatcattaggattatattttatggctttcttataaagaccatacttggttaactactgtgtatttcctggtaccttagagccctcaatgagatgcctcattctttcagaagtaaattatctaacttttaagggggtaaattattgtcattagtttaggcctcttcagtagatagtatattaaaaatgtaatattgcttctaactttctgagagcaaattattatttatttattttattcaacaaagattttatttagcaaataaaatattttttaattttaaaaatttacttactttaaaatttacttttgggagtacaattttatgagttttgacaatgacatagtcttgtaaccaccactacactcaagaaaaaatgttgatcaggtgaaaatgtacttgtttgattttattcaagcaaaagaatatatgagaaggggattcgccaggaagtaatagttgggccatgaaaccatgggattattcattgaaataataatgatgtggaaagcagctgggcgatgagttttgtcatgatatggtcagagaagtagacaaaggaagtgattagatttgtggttggagaagacagtgagacatttacagctatacagaaatggtataattagagatttgggttacggtaaaaaaggacagatttaacacatattaacttggaagtaaccctttgaaaaagccagtacaaaaagaagaaagtcttagcttcttggatgtctgtggattggtgctgtttctttgtgtgtagagagacttatctggggacacagtaaggaagaatgcctggagagcatatggcaacaacatgagtgaatattgtgcagagagaaatagtagatagtcaagtcatgaaagcattggtcaagtatggttttaatggcctcaagtttgaaaagattatattcagctactatttaaaatgtagtttgatttataatgcttttgttattgtgattttgtagtctcttgaatttccacatttgagggtaatcgtggaattaaaaaaatacaatatatgcttgttctagtcagtcaaatgatatcttaaaatttaggtaataaaatacaactttgagtttttgtgagcagtttttataggacaatttaaatttatgtttcaaagcattgggaattaaaaaaatacaatatatgcttgttctagtcagtcaaattatatcttaaaatgtaggtaataaaataaaactttgagtttttgtgagcagtttttataggacaattcaaatttgtgtttcaaagcattgttatgtttgagcgacatcagaaatatgttttatattatactcaagtttatttgtaaagtgagggagaaggatttggtggtcatctaaggtctcttctagcctctataattctgttttctatttgagatcaccaaatgataccttaaacagttgtagtacaatatgtttgttaatttttagtcttaagttggcattttgtattatatcattttccaaacagatcaatgaaataaccaaaattataagaacttcagtaggcatcatagaggttatattgaaattagagtttgttggtacacaaaaaatattattttgaccttatatcaggactggcataactggcaggatattctacttatataaaaaatccttggttaattggcaaattgcttttctcctaacaagtgggattagatcaatagtgtcactggggttttgctctgttagagtagcctgtcctctccttatttaataataaggcactactgcttgacaaaaaggaattggaaacacatatgttttatcaattgtgtattaaacactaccattctgcctggcattgtgatatggggacatgagagaaggcaagagctttgctcttgagggacttagagttctgttgttattcctgctgtttcctaaggcttggcatcacctctaagttgctaattctatttccagtaagtggcaaggagcttaatgtactaatattttcatgttttgtccacctgcaggaagacaaatatatccttgtgatatatgcagcataaaaaataacgtagactttactagttgtatctttaatttttctctaaccaggggtacgtcagcttgaaattatgtgctgctttggctgcatgtcagttcttgccaactacttcgtgttcatgactttcttcccagcttgtgtgtccttggtattagaggtaagaccaattcttacatatggcactagtagaagagtaagatttctgcttacacagtttacctaaacagaatcaataccttctaatgtcacactgacttaatttgtagctttctcgggaaagccgcgagggtcgtccaatttggcagctcagccattttgcccgagttttagaagaagaagaaaataagccgaatcctgtaactcagagggtcaagatgattatggtaatgacatggttttcttcttcttttagtatcctcagttccaatctcattatttttaagatttctttttttctacaattttggcccattcaatgatattgcacccccttcttcctttttttcttaatgtgttcatttctttgaggctcctggtctttattagcccctctctcctaaacagactttttaagttcccccaccttatctctcgttgaaagcctgttctttggggtgttttcagtagttcagtggggtcactactttagttagttgcatagcaagcttggggctttttttttttcatggtaaggggaagctatgagagataatgtctggctgtccagttgctagggataagaaatttaagttctattgatatgcagaggatacattactttaaaaattttatttcagtctctaggcttggttcttgttcatgctcacagtcgctggatagctgatccttctcctcaaaacagtacagcagatacttctaaggtttcattaggactggatgaaaatgtgtccaagagaattgaaccaagtgtttccctctggcagttttatctctctaagtaagttaattgaaatctactttgtgatatattaatcataacactctatgctaatgtaagtttagattgtgtcctttacatttctgaataagattttaatttgctttcttttatttagaatgatcagcatggatattgaacaagttattaccctaagtttagctctccttctggctgtcaagtacatcttctttgaacaaacagagacagaatctacactctcattaaaaaaccctatcacatctcctgtagtgacacaaaagaaagtcccagacaattgttgtagacgtgaacctatgctggtcagaaataaccagaaatgtgattcagtagaggaagagacagggataaaccgagaaagaaaaggtaacttgttattctcttcgctttcaatccttcattgctttgtcaaaaagtagtctgttttcaaaattatgtgccgtgttgtgagatttcttttgatttcttgaacagttgaggttataaaacccttagtggctgaaacagataccccaaacagagctacatttgtggttggtaactcctccttactcgatacttcatcagtactggtgacacaggaacctgaaattgaacttcccagggaacctcggcctaatgaagaatgtctacagatacttgggaatgcagaggtgaggatgataacataaactccaatgtggcatttttcattacaaaggagctttttcaaggaagaaaaatctagtatctgctgaacactacagctaagttctgggcacggtgtaacatgactaacagatactatcttctttctttatttcacacaaccttgagaggtaggtacaattatctatttttcagatgagaacattgaggctccaatatgtttaatttcccaaagtagtacctctaggaaatgataaagctgatagcagggtccaagattttctgactccagagtcaaaactctttctagtttattactgtttatcatagagatgagtgactactgtattctcataggtgtgttgaggcctagaaagagtttaacacagagacaagtttcaaagatagaagaaagtttgtttttgttttgttttgtaagcttgatacccatgaggaagtttgcttttctttctgacatttgaacaggaccttctgcctacatgaccatatgaatctactcatgctttcatgcaaataatcatgttccatccatgtctgcttaatatggttctttcttttaaatatatgttaatacgtttattggtaaaatgcaattttttgccagctttattgaggtatacttgacaaaattttattttattattattattattattattattattattgttttggagacagagtgtcactctgtcacccaggctggagtacagtggcaccatcttggctcacagcaacctccacctcccaggttcaagcgattcttgtgtatcagcctcccgagtagctgggattacaggcatgcgccaccatgtctggctaatttttgtgtttttagcagagatgggatttcactatgttggccaggctggtctcaaactcctggcctcaagtggtctgcctgccttggcctcccaaagtgctgggattacaggtatgagccactgcatgcccggcctgcattcttcaatcatatgctttttagctaaacttagtcattgttctttaaatacagttcccaactctgggttcctattcttgtcatctgacatgtctccccctctccaggtgttcacacctttagggcaaatgctagcatctctatgaaacctacctcaattccgccaaacagaagtaacctttcttttctgaagcatccattatatagagactgtgcatttttaatggcagtcgtaccttgttgcttatatcacatttacatgaatatctccattattagacatcgggctcttagatggctaagtccatgtcttgagagggccttggatttcataggtgctcagtaaacttactaagagaatgaatgaatttgcattgataatacataaaccagctaatgtttatcttactattcttttgaaaaattaggctaatattagtgtttgcaaagaagatccttgaataaacccacaaaatggaattactggtaccagttttgtggagggtggtgattgtgagtgtgtgtgtgtgtatgtgtatgtatgtatatcaccaccacaagcagagtcaagagacagctaataaaccaagagaaaatattggcaatttatatttaaggctaaagggctaatctctaatatataaagagctcctacaaattgatgagactaaatttttatctaatttttaaaaagagcagataatcagtctattgtcaggaaaaaagtacatatggctcttaaaaatgtgaaaaggtgattaacttcatcctaagagaaatgcaaattaaaattgtacttgagatattttcactcatcagattggcaataatcccaaagtttaataacatactctattgaggttgtagggaaaggtcttttcttgtttttttgggtttttttttggtttggtttttttttttttgagaaggagttttgctattgttgcccaggctggagtgcaatggcatgatcttggctcaccgcaacctctgcctcctgggttcaattgattctcctgcctcagcctcccaagtagctgggattacaggcatgcgccaccattcctggctaattttgtatttttagtagagacggggtttctccatgtttgtcaggctggtctcaaactccggacctcaggtgatccgcccgccttggcctcccaaagtgctgggattataggcgtgagccactgcccccaggctggaaaggtcttttcttacattggtggtgagaaggcaattggaccgtgtttattcaaattaataaatttgtaaaaattataaaaatttataagattgtaaatgttcataccctttggcccaacacttgtgtgaatatatacccatatgtgtgcgtgtatatatatatatatgcatatttataatcatgcctaaaaacatctctggatggatacacagtgaaacagtggtacctatttatgtgtaggtagcaaagaactgggcagatggtagacagggatgggatgaagactttttgttatatctcttttaatatttagtttttaaaccatgtgaatatattgcctgttcaggatatcaaaaatagcaagtttactagagtttaaacaatagctgttatatctgacacacacttgaaaccttgctaaattcacatttatttttctttttatggtgtattagtgcaagcctgtctttgtattgtaaaatctaatgatacggtatttatattatttttgtttggcattttttgcattaaatgaattattttgcagaggtatcttttaattaaaaactacagtgatttaatttaaaaattacattattttagcttagcattgtttgtattaaatggtttataacatgaaatacagtccttcaagtcttctgtttcatctctctctctgaccacaatttcattttttttctccatttctttagaaaggtgcaaaattccttagtgatgctgagatcatccagttagtcaatgctaagcatatcccagcctacaagttggaaactctgatggaaactcatgagcgtggtgtatctattcgccgacagttactttccaagaagctttcagaaccttcttctctccagtacctaccttacagggattataattactccttggtatgttattttctcgattaagagagatttgctttgtatgtttttaatcttttttcttgattagtttcatatatgtacatagttttataaaacattttccttttaaatcattttatcctaattttttattctgcttatgatgtaggtcatagaaattaaaaatatatttcctgcttttatagtcattactcaaagattttagtattttaaacactttttaaaggtgaattaaacattttgtttaaaaagaatacatactaaaggattaagtttgaagatagttatactgacaagctgagataaaattttgtgcatttactatatagattttcatttggtgcctgactttaccttttaggtgatgggagcttgttgtgagaatgttattggatatatgcccatccctgttggagtggcaggacccctttgcttagatgaaaaagaatttcaggttccaatggcaacaacagaaggttgtcttgtggccagcaccaatagaggctgcagagcaataggtgtaagttggcatttatatatttgccagtttaaaaatacatcataagtaaggcaatgagaagagttttaaggacaattagtgataccttttgggtcaagcatgagcatttttgggtaacatgtgcttgcttctctaacatatactgtgtagcttggtggaggtgccagcagccgagtccttgcagatgggatgactcgtggcccagttgtgcgtcttccacgtgcttgtgactctgcagaagtgaaagcctggctcgaaacatctgaagggttcgcagtgataaaggaggcatttgacagcactagcaggtgtgtgagtggatttgtatgtacagttatatctatttgtttattttagaaccagtgtcattttctgtgattaccaaacataattgttaacatattacctgctaaagagcacataacagaatatcaactttaaagccattcatttaaaatgagtaatatttatgcttggttggggggaaaaaaagaatgttgattcaaatgaatagctccacagaggtaaattagtaagaaaaaaaaaaaagtgtgagctagtaattttgattagatgttactttgcctaggagagaactgtcttagaaaaaaagatttttcaaataggagagaaatattagtataataagacttacttcaaataaagaaaattaataaagtagcataatcaacacaaatgataaccatagtatagttcaagctaacacatttgtttttatgtgaactgtgtaagtttattaagaaataattgtgactgggcgcagtggctcacgcctgtaatcccaacactttggggaggccaacgcgggcagatcacttgaggccaggagttcgagaccagcctggccagcatggcgaaaccctgtctctactcaaaatacaaaaattggctgggcatggtggcccgcgcctgtaatcccagctactcgggaggctgaggctggagaatttcttgaacccgggaggtggatgttgcagtgagccaagatcaagccactgcactccagcctgggccacagagtgagactccgtctcaaaaaaaaacaaaaaacaaagaaataataataataaaagaataaaacacagtctttgcatcttttatttatagatttgcacgtctacagaaacttcatacaagtatagctggacgcaacctttatatccgtttccagtccaggtcaggggatgccatggggatgaacatgatttcaaaggtaagtgtaggcagagtatctgaaagtacttttattaaaatgaaagtacttttataaaaaacaaatcaggcatttgttgattggtattccttacatttgatagatttaatttagacttggcattacacatatcctgagtttacttaggactgggaacaatcttagtattgacatttcaaaactttatccagtcaagagaccacctttgaagctgacctcttcaagatttgtctttaagaacaccaatataatttcagtactttgggaggccaaggcaagaagattgcttggggtctggagtttaagaccagcctgggcaacacagtgagatgctatctctacaaacaataaaaaaaaatagttgtgcatagtggcacacacctgtggtcctcgctacacggtaggctggggcaggaagttagcttgagcctaggagcttgaggccagcttcggcaatgtagcaagaccctgactccattcatccatccgtctgtccgtccgtccgtctgtctgttttcaatttaggatattttctgcttatgtggggtttacagcctaataaacctatcaaaagtcaaggagcatctgtataagctttaaaattgccaataaacagtatggcagttcaacaacttaaacatgaaattaccatatgatccagcagttgcacttccgggcatatacccaaaagaactgaaagcagttctcagagagatatttgtacagctatgtttgtagcagcatttttcataatagccatgaattggaatcaaccttagtgttcgttgttggatgaatggacaacaaattagatgtatttgtatgtgtgtgtatgtatatgtctatataaaatggaatattattcagcattaaaaaggaaggaaattatagcacatgatacagcatggataaacattgatgacattatgctaaatgaaataaaccagtcacaaaaagacaaatactgtatcattccacttgaatgaggtgtctagaatagtcaaattcatagagacagaaagtagaatggtggttatcatgggtttggggaaggggaaaatgggtggttgttatttagtaagtacagagtttttgttttgtgagatgaaaagagttctgggagcaaagacatggaaccaacccaaatgcccatcaatgatagaccggataaagaaaatgtggcacatatacagcatgcaatactgtgcagccataaaaaaggaatgagatcatgtcctttgtagggacatggatgagcctggaaatatcattctcagcaaactaacacaggaacagaaaaccaaacaccacaccttttcacttgtaagtgggaattgaacaatgagaacacatggacacagggaggggaacaacacacaccgaggcatgtcggggggttgggggcaaggggaagagcattagggcaaatacctaatgcatgtggagcttaaaacctagatgacaggttgataggtgcagcagaccaccatggcacatgtatacctatgtaacaaacctgcatgttctgtacatatatcccagaacttaaaaaagagttctggggatttgttgcatggcagtgtgaatatacttaccactgtacacctaaaaatgggtaggatggtaaattttatgtgtttcaccacaataaaattatgtttttaattgccaataaatatgttttggattattgaggtatgagttgttaattgaattaatgccatttaattggaagtcattgggaagcttatttgtattttatgtaatataaagctcaacgacataagagtcgaatcacaagatcaactcttatgacccacttctctttacagacttcattacttggggttttaggtaacagctgaataactagaagatggaatttattactcattccccagtgacatataaatatgagtatttttattgaatatttttaacattatcatcttttatctacatctttttcaacaatgactacaaagaacttggttttcataccgagaaagaaacacattaggaatttatacctgaccaagaaagtaattgtgatggttaacaaaacagctgttacttttgtgctcagtttctttgaagtatagttattatacttagaaatatatcatagatacaaattcttctcataaggatgaaggatgaatatttcatgcagtttaatatgtgtgtgttttgggttcttgttaacagggtacagagaaagcactttcaaaacttcacgagtatttccctgaaatgcagattctagccgttagtggtaactattgtactgacaagaaacctgctgctataaattggatagagggaagaggaaaatctgttgtttgtgaagctgtcattccagccaaggttgtcagagaagtgagtgactggatggataatttatcttttttattttgtaatctttaattgtatttaaaaatgggggaaaggagtattaacattttaaataaagttaaatatatgggacagtgttttccatcaaagatgactgttgtaccttgcccatctgtctgtgtgtatcatccataggaacaaactttactgattttttttaattttttttattttttaatggaggacagggcttaaatggggccacatctaaactttgttttctggaggttcagaaagatagatttgggtaacattcccctgaaccttctggaggaacatctaaatgtacacagctctgttttgtaggtattaaagactaccacagaggctatgattgaggtcaacattaacaagaatttagtgggctctgccatggctgggagcataggaggctacaacgcccatgcagcaaacattgtcaccgccatctacattgcctgtggacaggtgagctctccagcctccacttctcttgtgttacgtctttctaagtgaaagaagtatattgtatattttttcttttcttgtttccaggatgcagcacagaatgttggtagttcaaactgtattactttaatggaagcaagtggtcccacaaatgaagatttatatatcagctgcaccatgccatctatagagataggaacggtgggtggtgggaccaacctactacctcagcaagcctgtttgcaggtatgatgtatcaggcatagagtccacaagcctagttctgactctctgggtttctctttctatctgagactatgtatcactcacctctattttaattggtcttttccaaactcttttgtcatatcagcctaatccattgtgtccaaataagcatgtttaagcttatgcttagataagaaagtagatgaagagagcaaatgaatgttcatctactgagttaagggtactgccagtcaggctgtgaatattatgttagctatggtattatgcactgtcaggtgtggctgtcaagtcttggaaagttagtgcttccagtggagtctagttctattctgatgccattacagttgccctgtttttagttgatttagtaagaaattggtcatgattttaagggtgaatcttgttgtgtctctccctggctacagatgctaggtgttcaaggagcatgcaaagataatcctggggaaaatgcccggcagcttgcccgaattgtgtgtgggaccgtaatggctggggaattgtcacttatggcagcattggcagcaggacatcttgtcaaaagtcacatgattcacaacaggtaagactcaaagatatatttaacatgttccccctatacttcaaaaaatatgcagtgtaaaaacttactattcatctactgtagttccaagttaaaattctacactcctgatatttatatattgctactttgtcattttctaccataggtcgaagatcaatttacaagacctccaaggagcttgcaccaagaagacagcctgaatagcccgacagttctgaactggaacatgggcattgggttctaaaggactaacataaaatctgtgaattaaaaaagctcaatgcattgtcttgtggaggatgaatagatgtgatcactgagacagccacttggtttttggctctttcagagaggtctcaggttctttccatgcagactcctcagatctgaacacagtttagtgctttacatgctgtgctctttgaagagatttcaacaagaatattgtatgttaaagcatcagagatggtaatctacagctcacctctgaaggcaaatataagctgggaaaaaagttttgatgaaattcttgaagttcatggtgatcagtgcaattgaccttctccctcactcctgccagttgaaaatggatttttaaattatactgtagctgatgaaactcctgattttgtagttaatttattaagtctgggatgtagaacttcaagaagtaagagctaagttctaagttcatgtttgtaaattaatacttcatttggtgctggtctattttgattttggggggtaatcagcattattcttcagaaggggacctgttttcttcaagggaagaaacactcttattcccaaactacagaataatgtgttaaacatgctaaatagttctatcaggaaaacaaatcactgtatttatctccgcaggctatttgttcagagaggccttttgtttaaatataaatgtttaaatataaatgtttgtctggattggctataacatgtctttcagcattaggcttttaagaaacacagggttttgtattctttactaaagatatcagagctcttaatgttgcttagatgagggtgactgtcaagtacaagcaagactgggaccttagaaatcattgtagaaacacagttttgaaagaaaaataccatgtctctaagccaactttaattgcttaaaagacatttttatttagttgaaaaatctagttttttttgtaaactgtatcaaatctgtatatgttgtaataaaacttatgctagtttattggaagtgttcaagaaataaaaatcaacttgtgtactgataaaatactctagcctgggccagagaagataatgttctttaatgttgtccaggaaaccctggcttgcttgccgagcctaatgaaagggaaagtcagctttcagagccagtgaaggagccacgtgaatggccctagaactgtgcctagttcctgtggccaggaggttggtgactgaaacattcacacagggctctttgatggacccacgaacgctcttagctttctcagggggtcagcagagttattgaatcttaattttttttaatgtacaagttttgtataaataataaagaactccttattttgtattacatctaatgcttcaagtgttgctcttggaaagctgatgatgtctcttgtagaagatggactctgaaaaacattccaggaaaccatggcagcatggagagcctcttagtgattgtgtctgcattgttattgtggaagatttaccttttctgttgtacgtaaagcttaaattgcttttgttgtgactttttagccagtgactttttctgagcttttcatggaagtggcagtgaaaaatatgttgagtgttcattttagtgactgtaattaatatcttgctggattaatgttttgtacaattactaaattgtatacattttgttatagaatacttttttctagtttcagtaaataatgaaaaggaagttaataccaataagtgtaagcagtaaccttttttctttggattaaccctagccctgaggtctggaagcttgtaaagtctggtcatagtagtaacctgtaattcatgctaggactcacatgaccatttattctcaaattctacaacattgattgatagcagtattctattacattaaaatgagctctcttagagggtttgattagttcagatttatcatctcaactagacatcttttggatagtgagagtgggagggctagttaaggagaagaggggcagccacaaccaaacagccattgcaagcatttaagctgtgtgagctgaattggagaggggaatttgtacagcttggtatagctgaggatggcctctttagaaattactgtgagtcagtaatttacagaaaattattgactacacttttgctgtaattagaggtaaaaaggtatgtgtgagcactaagaaagaaccaaggcccagatactagagaatcagtttgagtttttctctgaaatgacctgtggtcacctgtatgctcagccctctccagggtggaacaggctggacagaagagagtgaaggatctttaagcctgctctctgcctgggtgatctgctgagcaatgagatgcatgtggcaggacaggatgtttgatttcaggagacgatacaggattaaatctaaggggcacatctcacactgaagagcaaaacacatcaataccaatctcctgagcattatgttcattgtggagattttttcatgaccagtgtttctcgaagtatgctcctacgctaggtaagtcttgaatttattaattactttgccagttagcaaaaataatgggtaacctctacactggaagccgagagaagatggcagatgatttagtttacaattatatatttaaagcttaacggattgcttttttcattttggtgtgcttggaacacagccctcctacccctatccctgccgcttgttttccatcctgagcaagtttgagagctgcagagggaggtatgggcactcttgcatcaggatgtgagttttctaacagctgctccctaaggccaaaagaagagcctcacactaacagctggagttaggaggctgaatgcaaaagatggctttaatactgcggctctcaaatgagtgtgcatttacccagaggacctgcttaaacagactgctgggccctgccccagcgatttctgattctcttgttctggggtggggccggaacgtggcagttaacagttgctgctgctgctgcactaataggttggaatttcagtatgaggtgcctggtggggcttgaatgaatggttttacaaaactgtttattcagtagcacaaggttgggaaacacctggggagagaccgagtgttggctaataaaaatttaattggaattaacccgagagatgtaataactaactagaaaatgttatttgaatttggtgctcctcacacgcccccctcctgtcccagaacaacactgaaggtc

SEQ ID NO: 257 - DNA, 61662 bp, Homo sapiens
  source 1..61662: mol_type = genomic DNA
acaccctggagattgttggtccatcaggtggtgggaggaaggtgtgggggttgaagcttgccaatgaatcttcagagtgtgtgattccccttggcccttgtatagccagtggagggaggtccctgtttgatttagaaaggtgaagctaaccatccttggggctctcagttgccagggtcagctgtctacatatcttcgttcaaataggatttcgttaggaaaactctctagagactgtccccaacccagccatcctccctctcttccatctacacctctgcccagatgacctgttagataaatatgaccttctgggttttcagggtctaaatgcaagatctaaaatctatcaaaagcagatgcttgcttttctagaaacaacacgagtccagatatagggcttcaattggggctggagcttgaggcctatgttcctttcctcttcccggagctcacaggagccatccaacaggacagctcagctaatgaaaggggatcttggcctctctccatatgcagtgctcggccttgtcctcagccctcctcaacccagtcatgaacttttctcttcactgtttcaatccaaattacattgttagggggagctaggaatcaattaaagtcagtatttccttgtccatccattgctgctctggccacagactaggtactcagtaaatttgcccagctcactgagaattgaatctcccactacaatgggattttgaaaaaatccatcactcatggcctggttagcacaatctttgcttccactttcattgggacatgctctgcctaaaagcgaagaaccacagggcagtaggcctatgctgtttggcaaaaaaggaaacagcaaagaagacaggtccatcttcctttcttctggagtcagcactgaattatttgtggtaaagtccctgctggtggagtctctgggcctttggctttttactgtttggactatttgtattccttagcatccccaccagagagagaatcttgggcaagaggtgacgtccacaagagcccattcacttagtgactgagagctgtaagggaaggaaaaggagggcaggaagaaaggctggaattaatgctttaaatgaggctaaacaatttacccgcagagttttcattcatcctactttttgtctgtttctatcacatgtcacccaccaagaattgactctatgactttacccctgtgagttgcagggaagaaaagggtgctagctcctgctctggccagattccctctgagcgacttgtggagtcttactgggggattcaactcttcttcacctcaatcagcagtaaagcctacacagacactgggagcatgacggcaagagaaggccacccacctctctacacccctagatgacacactacaggatcccagtggagtatacagaaaattccaaggagaccaggggccaggggttctcggtggaaccatggcagggaaagtatcagagacagaaatatgagactctgggtagtgataaaataaattgttttaatggaaggctttctgagactgcaactttttcttctgctatcaaacagccagtttccctgccctggggtttcttagggagtgcacggctgagctcctggcccacaggaagctggcatgttactctgacacactacattcagcccctccagggatccagaggtgtgtcttaatgtcaggagactggagttagctggtagtcagtccaaggtatgctgtccccataagtgtccaggcccgcgggagaggacaaggggcttcacttcccacttaggatgtttctccatgaggggagaggggacagatcacttttgaaattttgactctgacctttacaaagaaaactaatagacactttagtattatatacagggcagaggggagaggacacagaggggaaattgcacttaattacagtagtttatagtttacagccattggacaaatttacttctttaaaagaaatctcaagatcatgtgggatgggggcaggggagggagtctgtggatatttacagtgtgtttggctcagttcaatagcacatgtccttctctcctcatttcagtaacagattcaagttttcgcatcagtttgttcgatgaaggatcacaacatagacagtacggctttcttgcttcctcttcggtggttccttgtctcccacctccaggacagacaggagtccttgacatcgtgggagaggcattgtggcaatactgcatagaagggaaactgggcttcgggctgcgcctcctgagagtggattgtctgaggtgccagcaggacgtccgtcaggtaagcagggacctctcgcaggtgccggtcaggtcactgggcttttccatgacagctgcccagagggtgatggtgtggaaaacagggtccttgttgttgcgcacgaagtaagtggtgtgtgggcatcaccaggcttgtagaggacactgcagagagagaggagagagagtgctcagctgtgtcatttggcagggtcatgggccattagtttggcttctctaagggagatgatgcccaactcaaccagcaaagagcagcaggtggagggctgggggcctcgtgtctgctcagttctgcagttttcatgctgaggcacacttcctgcaggaaaacccgggagccggctttcctggccacttcagaagaaagaagtgaattgctggggaccttgaagtagtcttaacttgctgacctgaatcctgaagctgggctcctctttctgtgacagtggcatttatagagtgcttagtgtacttgaaaaggcagctggatggtgagctcttgcctctcgtggaagcaagggtctcttcctaagaccgctaagagcagaggcctcctatactaatgcttctcgaactttaacggacccacaagtaccagagagcctgtgaaaatgtggattctggtttaattctgacttgtaggcctggggtgcacctaagagtctgcatttctaacaagttcccagggtgtgccagtgctgctcacctagggcagcaaggccagaaagcacacgagaaaatgaccactcaaactactcatcaggaaggagctttgcaaattgcaaagtgctttctacgggtttcttactttagcataagaaactcagaggaccagggaaaggatccaaaggctgaaggcctctgatgccatccttgtgggtgggccagggcaggagaccccagaatggctggagaagccctcgagagaagccacctcacccaactcagggcagccttgccctccagtgcctgggccttattcattggaactgtcatggagtgtcactgctttccttttcacttctggggagtctctttttgtctccctgtgtctcctccttcccttttgcttttgccggcatctaaggttctgcctttgacttagtggcttattctctcaagatccccccaaacacacacacacacacacacacacacacacacacacacacacacttacacctaccaataccactaaaggccactgttatcgcattgatcagtgctccaaccataaccctatatgaggataccattatgtctatttgacagattaggaaaacaaggctaaaagagagtcagtgaattgtccatggtttaagaactaggagagtgtggagccacagcttcaaactagctgtctaggtggccactcagcatgtgctctttcaatcatgcttggaggtgaggagccttctactaagctttgtgctcttggacaagttactctctctgtgcctcagtttcttcccctataatatgggagttgttgtgtgattagatgagtcaacacctgtggagtcctgagcatggtccttggcacaattgttattattaacatggggttcttcagcccaagcccctgctgctcctcagtactcttaagagtggggctgaaggcctggcgcagtgcctcacgcctgtaatcccagcactttgagaggccaaggcaggtggatcacaaggtcgggagatcgagatcagcctggccaacatagtgaaaccacatccctactaaaaatacaaaaattagctgggcatggtggtgcacacctgtagtcccagctacttgagaggctgaggcaagagaatcgtttgaacccaggaggcggaggttgtggtgagccgatattatgctactgcactccagcctgggcgacagagcaagacttggtctcaccaaaaaaaaaaaaaaaaaaaaaaagaggggggctgagcagtgcgtgcatgtgaggagacaggcttctgacccttccacattcttgagacgttggtcagggtcctctgataccctttgcctcctcttcctcccctggcccacccccactctcaagtctctttacttcccactatcagcctttttccaattttcagatttcaggtggaggagagagaaaacggcttgtgaccttgcaggtttcaaaagaagagcaaacaagaagggcagataaggagacgccagtgagattctatggcctgtcattagggatgggcttcccagctatcaaatgtttgctcacataataaaatggtggcagagcccaaaatgttgtcaaaagaactagagttatttgcctccttcagagtctaaacacaaacatctgataaggggtgcactgtggtcccttagaactggaggcccagcacacgcagccccacgggggcctggcccagaagatctctgagagaccgcggggccctccgtctgaaaggtgtggtagctgtggcaaatgtgaaggacatccttattctaagaggatttgttacataatggtaagagctaacatttattgacatcctactgtgtgccaggcaccataccaagggcttcacaagcatcactgcctcgagttcttacgtcgaccctttgaagtaggtgattatcgtgaattcatttaacacgtttgagtgcctactgtgtacttggcacttttttagacactggagatgcagctgtaaacaacaccctgcccacttcttcacaggctttacctcctagtgaaggctttgaataataaacaagtaaacaaatgcgtgcacacacacacacacacacacacacacacacacacactacaactttaggtggagatgagcactccatagaaaaataagcatagaggttagggcagcttgaggaaaaagagattaacttagatatgggaatcaggcgaggcctctttgaaatggtaacatttgagctgaatgaagtgaaggggcaagcatgtaaaaatgcacagaaaaaaagagctccaggcagacaccacaaatgcaggagtcctggagtgggatctcttcagccctggcacagctaaagctgagcgggtgatggagggaggaaggaggtgagaacggcgacactggcaggggcataatcacatagggtcctgtatgtctctgttttagtttggttgtgatggaaagctattggagagttttgacaggggattgacatgcttgatgtctctttgtaagagatcactctggcgaacagcccccagtggggcaagggtggaagtgggagacaggcaagggccacctaaggagatcagggagagacaagggggcctgggctgggactagggcagtcctgatgggagtgtgagaagaggtcagatttaggatgtattctgagggtcccctagtagaacttattgagagactgatgtgatgtggagagaagaatcagggatactctcagctctctcacttgaacaactggtaccagttttggaaatggagaagcccatgggggaagcaattttgataggatgaaatagggcaaaatgaagagttcctattttaggcacgttgaattcaagaggcttattagatattttagacatgcgtctgtccctgccgaagcagcactggatctgtgagtgagcactcagtagggaagaccggactgtacacagaattacaggaaccatcggcgtgtacacttgacctaaagccatgggactggaggagatcacccaggagtgagcacagatgagaagaggccaaagaatgaggcccggggccctccaacacataaatattgggaagatgagttgccagctgaggagatgagaagtggccagtgccgtagaagaaccaggaatggtagtatcccaaactcccatggaaaaaaggagggagagatcagctgtgtcagagacagaggttgaaaagtaaccattggtttcagcagcatggaggggatcgtgagctggacacagtgaggcgtgaggataaaggccagtctgcagtgatctcaagagagaattgagggtgaggaagtggagacagtgaggacagataagtcacttctatgaccatgaacttatgtgagattcattgtggctccattaattaaaagtcatgattataattccggttttacagatgagggaagcgtggcctggagaggtgataagtaagttggccggggtctcacaacagcaaggcttgtgctcttcacccctatgtaagagcacttctttcaaccccctcaacacggggaaataaatgccctttgccacgtaagacccttttcccaaactcagagccgctcaggggtgctagcaggggaagccaagagtgacccagcttccatgggctgggtgtttcctttgggacatgcgctgagtgaagtattttacaggtcttcgtgcagttagtcctttcagtgatcccatgaaagaggtatcattatcttcattttacaggtgagcaaacagaggctcaaagaggctaagacatttctctgaggtcacacaggtagaaagtggtagaatgttgagcccagatctgcctaactcctaggtcgatgctcccaaccatcagaacactctgcttcctcacccagtgaagaagctgggagaggaatagccgaaggggatagatgatgaggccacccacctgcccccttgtcagtgccctgactagttactgctctgggggccctctcttcaccttcccataaactaggaagtcaagcagcggggagagaacactgtggaaacaggagttggctcacaacctgcctgcacttgttctaactgaggtcagtggttgctgtggtcttgtttccagactagaggggcattgttgaactcatgcacaaacccactcagagataacttgccagcacccaagagttgagaaggagggagacgtatgtgctctggaagggacagatggcagtagatgcagaaggattcttggcagcgagaagtcccagcctggggttcctgacctgtaatccccaaggcccttggggcatgtctgccttgacaacaggaagtactgggatcagacagatacaagtacaaatcctggctttagccttatacctgcataaccttgggttgttattatgggtgcttaaaagtggatattggaagatgaacgttgtttaatgagtttggagtgagaaagccagtctggaagtccagctctggaatttatgatctgtttgaacttgaccagatccatacccatctttgaacctcagttttctgctttgtaaatcaggtataaaaataacgaccttgcagaatgggtaagagggttctccaggaaatgtaagctagaaaagcatctggggtgctgcttggaaaatggaggcatcaaaaaacacgggttctgcattcattcattcatttgttcgttcattcattctttgttatttactgaacatctaatatagcccaggcatttggctaagcccaaagggtatgggtgctttgacaggccctgaactatttgcttttttcctgggaaataggtgagcagggagtctgtgtatcagcaggagaatgggaaacagggatccggaacccaggcccaagaggtaggatgtgcttgagagatggtagtaatcctgagacattttcttctcccagcctcctttgactgcatgtagaccaagcactgaattggatattgaaagagtcactaggccgggtccagtggctcacacctgtaattccagcactttgggaggcagaggcgggcagatcacgaggtcaggaatttgagagcagcctggccaacatagtgaaaccccgtctctactaaaaatacaaaaaattagccaggtgtggtggcgtgtgcctgtagttccagttacttgggaggctgaggcgggagaattgcttgtacccagtaggcggaggttgcagtgagctgagaccacaccattgcactccagcctgggtgacagagtgagattccatctcaaaaaaaaaaaaaaaaaaaaaaagagtcactggaaggggagacaactatctcctaaaggatcacagacgggagagaaaacagggagggggctaccactttgaatacttgactatgtactaggcattctgttaggcacattgaatattttgtgagatgggggtgggattttccccatttatagatgaagaaactgagtctcccaacagggaattaactgcccaaggtcacataccagggggtgatgaagctgaaagtagctcaggtctgctggcgtttcctaccactgtacaatacctctaaaatagcactgctcaggatgtgtccctttgactcgagcagggtgcacgctaattgcccggttcagtgcacacatcagcaagtgaaatgctctgagaagccctgcccagtagcatttaactttgtgtaatccagcagttcccccaacatatttgaccaagaaatccttctctcccctcactcgtatgtccttgatacctagtgatatggtttagatgtgtgtcccttccaaatctcatgttgaaatacgatacccagtgttggaggtaaggcctggtggaagatattggatcacaggggcagatcccttatgaatggctcagcgccatccccttggtgataagtgagctctcgctcaagttaattcacacaagatctggttgtttaagagtctgggatcttccctttctctctcttgctctttatctcaccatatgacatgcctattccccctttaccttctgccctgactgtaagcttcctaaggccctcaccagaagcagatgctggcaccacaacctgcagagccatgagccaattaaacatattttctttttaagttacccagcctcaggtattcctttatagtgatgcaaatggactaacacaaaaaactggtcctgggagtggggcattactataaagatacttgaagatggccaggtgcagtggctcacgcctgtaatcccagcactttgggaggctgaggcaggtggatcacctgaggtcaggagttcgagaccaggctggccaacatggtgaatccctgtttctactaaaaatacaaaaaattagccaggcgtggtggcctgtgcctgtaatcctagctactcaggactctgaggcagaatcgcttgaacctgggaggtggaggctgcagtgagctgagatcacaccattgtactccagcttgggcaacaagagcaaaactccgtccccccgccccgccgccccccctccccgcaaaaaaaaaagatacttgaagatgtggaagcagctttggcaatgggtaacaggcagagattgggagtttggaggaacagaagaagacaggaagatgaaggaaagtttagaatttcttagagacctgttaagtggttgtgaccaaaatcctgatagaactatggagagtgaaggccaggctgatgagatctcagatggaaatgaggaactgattgggaactagagcaaaggtcaccctccttacgcccaggcagagaacttggctgcattgtgtccatattctagggatctgtggaagtttgaacttcagaatgatagcctagggtatctaacagaagacatttctaagcggtaaaacattcatgatgtggcctggctgcttctaacaacccacagtagctacggaagcaaaggaatgacttacatttggaatgttggaatttacatttaaaaagggaagcagagcgtaaaagtttggaaaatttgcagcctaaccctgtggtagagaaggaattcaagtggcctatggagcaacagcttgctagagagattagcttgactaaagagggctgcatgctatagccaagacaatggaaaaaaggcactgaagtatttcagacatcttctaggcagcccctcccactagaggcccagaggcctaggaagaaaatatggttttgggggccagaccaaaggccctgctgccctgcacagccttgggacactgctccctgcatacatgctgctctagcttcagccctggctcaaagggacccaggtacagctcagaccaccactctagagggtgcagtctgtaagctttggtgggtttcatgtgatgttaagcctgcagatgcacagaatgcaagagtgaaggaggtttggcagcttccacctagatttcaaaggctgtatcagaaagcctgggtgcccaggcagaagcttgctgcaggggcagagcccccacagagaacctccactagggcagtgctgaggggaaatgtgggattggagccccacccgccccacacacagagtccctaccaggatactgcctaatggagctgtgggaatgggcctgccaccctctagacctcagaatggtaaagccactagcagcttgcaacctcagcatggaaaagccacaggaacacagctgcccaaggccttgggagcccacctggcacaccaatgtgcccaggatgtgggacatggaatcaaggattattttggagctttaagatttaatgcctgccctgttgggtttcagacttgcatggggtgttacccctttcttttggccaatttatttcttttgggatgggaacgtctgcccaatgcctgtaccaccattgtattttggaagtaagtatatagtttttttattttacaagctcataggtggaaggacttgctcttgagtctcagatgagactctggactttgagttaatgctgtaatgagttaagactttcagggactagtgggaagggatgactgtatttctcaatgtgagaaggacatgagatttgggaggccaggggtggaatgatatggtctggatgtgtgtcccctccaaatctcatgttgaaatgtgattcccagtcttggaggtggggctcagtgggaggtaatggatcatggtgatgggtgaggaattcatgcttgagttagttcacgtgagatctggctgtttaaaagagtctagggctaggcatggtggctcacacctgtaatcccagcactttgggaggccaaggcaggcagttcacttgagcgcaggagtttgagaccagcctgggcaacatggcaaaacaaaaaaaatgcaaaaatttagcctgtcattgtggtgtgcgcctgtagtctcagctactctggaggctgaggcgggaggactgattgagcccaggaggttaaagctgcagtgagctgtgattgcgccactgcactccagcctgggtgacagaacgggaccctgtctcaaaacataaaaatataaataaataaataagaacccagggcagggcctctcccttctccctcctgctcacactctcaccacgtgatgcacctgccctgtctgcaccttccgccacgcttgtaaaccttctgaggccttcagcagaggcagatgctggcatcatgcttcctgtgcagcctgcagaaccatgagcctttgaacctcttttacccagcctcagatatttctttatagcgaagcaaacagacatcgctataagcaataaatctgaacacgccagaaatgaatttgaaattcctgttggaatataagaccttaaaacaaaaccaaaaaagcagaattgccatcaggtctctttcagaactcacttctgaccctctgccttaggaacagagtttgtacaaactgtcttcaccttgggtaccttctgctgtcaggaggcagcacctttaccctcattttacttcactgtgcctttcccattcctccttctctttcaacttgttggaagaacgtttcctgagtggaatatggcaagtgaacttattttttactcttgttcctgaccacaaagacaacaagagtggcagcagttaccgtagaattttaaagatggtagtggaaggcaagtatgtggagtcaaagaccaaagcctgaaggtccagcactagaatttatcatctgtgtgaccttgggcaggtcactcttcatctctgggttttagtttatttctttgtacttaggaggttgcagtaaaaagaaaacaatgagacaatgttcatgagaagtataaactgtaacgtgccacgtgagtatttttcatccttactgagtgtaataatcatcctcatcatcgcagaaatgagtctattgccagactcctgaaatgtctggggacatggagacaatgtcacagcagttctgggaggccactcatgcagcttcaaggttggctggccactctgtccaatggagaggagaagccagtggggggctggtgcagcgtctcagggagcatcttaaagtattttgattaagagaccatttcctgaattcagacgacttgtttcaacaagcaaccatcaaagtcaacttgggaaagacaggaataattaatcatggtcctgtctggggctgaccaagcggcagatggattgataaacctttcaaaggggaaggtattcccaaggagggccgctgcgcctggctgcccccctgattgagatttgtgagcacagataaatgttttccctgcccactacaaagagtgggaactcgcacgggagtcgaagggcagggtagtgaggggttgtcctttcatcttctattgggtgagagaagagtggcaaagcaggtcccacacacctctccctctacccccagctccagagcccagctgccctggtcgtgtgtgtgtttcagtgcccaagacaccagttacttaatctacgcaagcttgctgaatcctcagaaaaagcagatgttacaactctcactttaaagatgaagaaatgaaggctcagggaggtcaaggtcaccaagcaaatggcagaaccaggaatagaacccacctgctccactgcactctagggctggaaggagatcggggcaaaggaaaggatagagaaccctgatcccatgaaggaacctcctgggaagcccatggcagtggatgaagtgtgatttgcagggctcagatgaaaaaaagaccatcaacaagaccaaattctgagagcttctgacatgaagttcaaggttgtcacctacttatctagtaatcgatagaggccaaacagttcccacactgcacagaccccagctactaaaaggtctcattgtgttactctggaatcatcacctgtgttcagacatcttgtcctgttttctaactctcggtgtcttcttgcagtccagctgtccaagctgcagcaatgagcctcgccatcagctgcctgtctactattccatcacctctattcagaggtgggacttagtcatcaactgaaacagtgactaagcctctggattccccactttcagtgcagcaggaagttgattctaaatttcttgataaaaccccaagtggatgcttacccctggaaaagccaggctgtctactggggagtccccatgggttgacacaactgggtcattcccagagcttatggcattctgggtccaggggaatcagcctcaggacctctgacttcctactcactttctccgctgactactttgtggatcctcagggatccctcttgcaaagcatgaacctcagcaggggatctgtcctcctgagccctccttggaaataccttttccatggaccattgatcattctattagggaacactcaatctaaatgcctaagcgctctatgtcatccagtctccagcaacctatcaaacttctgtccttgtttagtgctcttcctggggaatctgggggagcaataagccctttcagcctgtggcccttttttttttgccctgggaccttaaggattccctttgcaaacaacagggagcctcagaaggacctaatttctggccgagtccatgcttgccacaacctctgcacatccatggccttatcacaccctgcccacaccccaacccccgcaaatcctgctggcattacctgtttacttgaagacatgttggtgagtgtactgatgctgctggtatctgtgaccaccattgcagatggaaaccgggaggtgtgggaatactgggggggttcctgcttgtgtgcgtacactggagagacagagtgaagacagaatcaaggtgcatacacaggcaaagacacaggtacagagcccccatcccacaccatagctcccatctcctcaggtagataaaagggctggtggttatagtggggatttctcatattagttatccataagattcatgtaaattccaagtcacataaccaactcccgaaagcatgtggatgcttggctgtgagggagagaccacctgctctcagaacacagggcctaccagggaggcctccggtacggaacgggagcaaaggtcactggctgttgcctcggcttgcccttctcatgcagggaggcaggttatttcctggtccagggcaccatgggctctctcttcatgggcggccaggcctgctgggcctcagcagtccacaggtcgctggtgaccactctctgactatcccacccaggcctcgccactgaggaagcctggccaggtgaagggatggggtaagtggggagcacatcaccaggctctgggaggaagggaagtggggcacatgtggtctcagactctgctacaggctgtggcagattttcagaagccactaaaatgtgattggaatgtgagatggtgctcagaaaccagctccacaggcccgagtggggattgagccctgaagatagaaggctggacttggctgttctcccccaaacccacagcttatccgatgcagctagggaagaaacacaaacctctttcaccatcattgccttctaagagtccctttataaataatctttataattttttatgcttaccaaacgcagtttacccctatgtttatttcatattcataatgactctaaatgcatactatttccattttatggatgtagagattggacttagagtggctaagtaacttgcattaagctacacagctggtaagtatcacagccaggatttaaatccaggtctgtctgatctaagactagtgctttatactgaacacttccttggggtttctgaagcagagaagccatgattcctcccaaactcctgtgtcaggggctatagccagacctggccagaggattggaagcctgggactcaggatgaaaggcagagaaacagaggatgggattggatgggaaataagtggtcgaaaggtaggcttggggtaggtatagaaattggatatgagaaacagtctgtgtgcagagatgcaggggtggcatggaggaagaaactctaatgcccaggatggcatgccactggtatttttcacttgtgttcatggttcttgattagagatgtttggggtgtataaattggaggacatgggactctagaagattcttctcttttagggaaggcaaacaggatgcaaattagatgccaattgtgatcatttgataatggctgcttggaagtttagattgcaaaggctaagttgaagttcactgggaaaaggtgctggtggtttatggacgcgatcttttccagaggtgttggaatgggaaattggcggtgtgtgttccacatgctgtctggctccaattccccttcatctgtaggcctacactgtcctcttcaaacccttccctgggaatctcaggggtagagaagaggactagaaaaggtacagcaacactcaagagttatgcttgagaaattgtcttagtcggttgatcataggcagggaaaagtgaccaagccaataaacttccgagaaagttcagacccagagagggaaagtggttggccactgagggtcctgagtgctccctccctccacatgcccgtgtccttactgtgtgagttctgcagctgagtcacagctgccatgaagggctgctgggccatgtggctgcctgggctctgctgcatgaggggctgctggtgagggctgtgcagctgctgggagaactggacgggctgcagggctgccaggctgccggccacactgttgatgacagggacactctgtgcttgggaggtgttgaggcctgtgggagcaagaggaaaagatcacagacagctcctgggataaggagaggtggatggatgccatcatttgagcccccgctcaatgtcccagtcaccgggctgagcctgttacacaggagattccatgggaggcaagtgtaaagaaacggagacttggagatattaatttacttgctcaagttccacaatgagttgtgggttggagatgggcattaaacagatctgattaaagcctgagagtctcccagagtcatcctgtgacctcccaaacttagctctcttgaggttaccagggctttggaaaagctggctctacctgcccactccatccatgccaggctgtgagagaggcttgccctggtgcccgcagggcagagttaaagatgtccacactgaggcacaggttattgcccagatcggtctgtccagtagagggcaggagtgtgcagggacccaaattttgactaaaaacaacgtccatagtcccgggagtatgaggttgggagacccttatttagtagactgtacaaagacccccagagaaatcaggtgccaactcccttgactgtaacagagaggggagaaaacactggaactcagccagtctgcgaggcgggcatatcttatgtggcagcatagggcttgtggcactaaaaggaccaggttttagaaagaggaagtagtacattaaaggttgactcttggcatttatagtgggtcttcccatctttctgttctggagatgtcagggcctctgtaacttggaactgtgtatcctgaggcctctttagaacccgggccagcactctgaggattggatcccctggtacccatgctctatctcctccctgagagcgacacggaggaagacagctaaggtaggatgggagtggggacaggacgatcaggagagaagacacctggacctgcttcctggggtcgattgtgttcctgtgttcttgctttctgggaagttgggggaagaatgggatgaagaaggaatccagaaaaaggtctgttttaggtggatgtggaagggacacctagagaggctttcctgaaatggagacggtttcataggcaggtttgagggaagtcatcaatggagataacacagagtcctcaacaattgcctactcagagctttagctgatactgttatcagaaacctaaaaggcgagacccctgagcagaaaggacaggggatgaatcctgcttctggctctcctgggtgggggctgggggtgccaccctctgatcaccctcagaacagcgctgtctccagttccccagggggctcagcgtctcctcaagccagcatctcaccagataccctgatgaccgatgaccgtgtttccctttcctacctcctgcttatggtctcagtctcccagaaagctccatgaatgtgccgtttttgagaaatctttgagagcactgctgctgctctttttgagaaactgctgcccaaaaaagcaaatgatcctgtctagagtggatgacatttgaaggcatagttctgaaacctgcatgtgcttcagaaatcatctgggggagctctttaacaaatatacattcctgggccccacccaagacctaatgagtcagaaccttcagaggtggggcccaggaatcttattttcaatgcagtctgtgatcctgatgtgcctcaattccaggattgagagcctctgatgtcattccagctccctcagtgggtaagtcttgaccttttcatctgtttctgtttctgggcactggttcttgcttgggaagtatgctatccagtccagggaagagatgagaaagagaataggatgaagaggtgagaatgagtagagaataaggaattggccctgccaaataatttgttaccaccttctccacaggcttccgcaattctgaggcagggcccatggtactcaacacatcagtcagttaaatgaagatgcctgcaaccagtttctcatcctaacactccatagtgtaggacctctgtgtctcagcagtcttctggtgattctcaccatttctcatgctctgtctaccccaagtgtacacagatatgtacacacacagccatccttctgaggtcagtgtgcactctggtgcagcccatctgaataggagattaaggagcatcgtgaaatgatagagaaatatgagtagaggaaattagaaagaacaaaatggaaagatgcagactagccccagggaaaattttaattcagatagtatatatatatatatataactgtatggcagtgaaagcttagaatggaaagaaagaagttaagtgggacagtttgtttattattttggttgcagaaataagtggaatatcttccccacgggccttttaatcaaatcttctaaatggcaaacaagctggttttaggtatcttatctcattccaaactctggtattagtataattaccatattccatataccagagggcccagtcaaaaggcaatacatttaaaatgatcatttatattgtgagttctctaaatgcttccccattcccattttccttctgccaaaatcaatgcactgtgtgtcaatttccaagcagctaaggatagagtgagagccacacatattcaataaatttgtgtgcctccaatgggcttagccctgttctgacctcaaaggatgtgtaagtcattctcttcagaagtgagaatccaagttccgaccctagctaaagctgatttagggagagaagagggaagaaagaaaaaggcagaaacaaaacaaagaggtggccaacatgagccctagatacaaggaaggtaagaggacaatggagcaatacaaggttgaaagaaagatgaccaatgtgttacccttagatctctcccaagacatccagcaatacatccaagggtcacaaggatggttttgagaaacaacgacacctgagctgtcatagtgaagctggaaatatgctgaatactcatcaacattaaaactctcaaagagatatccacaaccacagttcccttcagacttctcatgcctcaagatggcccatgtatgggagggcacaggcttgctgttgaatatgagcctcctggagctggagggacctgatccatctccgtgtcttcaggcgtgtgatgtgccaaagcaagctttttctccttaaagttttcaaagctctcagatacaatggcagtttccctctggatcctcccttggtgtattttcactgctggccaaggagatttcatataccacacaaaactccccatttagaaggaaacctgtcattcttacttcatcatcaccaaacagaaagaacctcctgaaaaatctaccacctacttagtgataggaatgaactcaagacaaagtgtaagctacgatgttatacatattcatgctttagagatttataagcatgttcatattcactgtcagttgatcactttaacaacctattttatagatgaggacattgaatctcctgaaggttcaatgatttgacccaggatgcacagctgctaaactgtgaccaggatccaaatccattccacaattttctcttgttttaggctaaacaatccaaatattggatttaaggagacagatgagaaactaaagaagttaaaccaaatctactagtcgtgggtgagtttgaaggagacctacagttatttttcaccacattaatttgcttcccattcttcttctccctgcccccaagttttccaaccaagaatagaacttactttgtgcaattgccatgactccagagaggggtgtcatgatgaggttttgagattgctggggattatggtgggagaggctgtggatattcgtcaaggtgctgactgggggcaaacctcctcctgagactgagatctgatggagagaaaaaaacaagagaaacatgggtggacttggaccacaaagagcagtttccaacacgatgtgacttagcgattccttggcatgactagttctcaaattcattccttcattcactcaataacaattattggctgggcatggtgcttcacccctgtaatcccagcactttgggaagccaagacaggaggactgcctgagctcaggagttcaagaccagcctgggcaacatggtgaaatcatctctacaaaaaaagaaaaaaacacaattattaagtgtctactgtgggacagacactattctaggtgctggggatagagcagtaagtaaaacagacagtgatccctgccctcatggtgcatctattgttgactgtctgagttactagccagcttcagaaattactaagggttgggggagattagccattataaggtttctctactttttccacatctccagtacacattacaaaattttttttcttttttggtcaaggatcctatattgtaatcaccattatattttaatgacagattagtatgagaaagctactgattttggtgtatttactttgtacatgaccacttcactgaatcctactagtgtcttttcctcattgatttttttccaagtatgtaattgtaatacaagcatctgatggtaacagggtcttttccttgctagtactgatatgtctacatgtcctattatattgcttagaacttacagtattaaacaataacagctgtaatagatgtgcttattttgcttctgatgttatcagaaatgtttccaatgttttcccattaactctaattgtaattataagggcgcgatcagttttaaacacacctacactttttccatgatacattagtttactacttatagtttcaaaataatttttttctttttttgaggtggagtccagctctgttgcccaggctggagtgcagtggcatgatctctgctcactgcaacctccgccttgtgggttcaagcaattctcctgcctcagcctcccgagtggatggaaccacaggcacctaccaccacgcctggctgatttttgtatttttagtagagacgggatttcactatgttgaccaggctggtcttgaactcctgacctcaggttatgtgcccacctcagcctcccaaagtgctgggattacaggtgtgagccactgtgcccagcctcaaaataatttttaaagttattatgaagaaaggactggcccctcttattctgaacccaggcgtgcttgagagcatcaggaaccccgagaggtgctttagggttaggatgcaccagatgtctgagtaactcaactttccttcttccatctttcacttcccagagcttttcagacgatagctctcccaccagcacccaggtaagatgctatctcccaccctgcccttccggtcaactccatagtgtccaaggttaatttgaaaaagaaagaaagcaaaaaccaaacaggtttgtttgtgtttttaaaataagcatcaagaaatgttagggggtcacatgaccaagaaggaattctgaccacatcaaacaagagagaagcagcctgtttgctggacttgtttttcaaaataccagtcattaaaaaaaaaaaaaaaaaaaatccgtagcctgccctcagactgaatctcttgggtaatgtagttcctttggagaaagtcaaccaagtgacagtaatttctctgacatttcagcatttggttaatggtataagagaagtgtggaggccaatgataaaaataatttaaatgtgtgtgactttaggatttgtaaagtgctttcactgattgtccttaatagataatgacacaagtagggcaggcattattactatcagtccctgtattacagattaagaaactgatcttcagaagagttgagactatttctatgtcacttgactcataagtgaaaaagccagagttaaaatccagttttgctggagcttaaatcttattcacttactaagtttgggcaaccttgatcaagttacttcccattctaaaatgcaactattatttttaattttttttttttttttgagacagggtcttactctatcgccaaggctggagtgcagtggcatgatcacagctcactgcagcttcgaactcctggaattaagcgatcttgtcacctcaacctctggagtagctgggacaacaggcatgcaccaccgtgcccagctaatttttttattttttgtagggacagggccttgctgtgttacccaagctggtcttgaactcctgggctcaagcaattatctttcctcacctcccaaaatagtggaattacacgtgtgagccactgtgcccggctacaaccattactttctatttggctcctggactgatggaagctagggcactgccaagggtatcagtggtgatccttacatgataatttggagagcctgaattacattaatgctgtcatttatggtctcttcactatgctaggttctttatatacctataatctataaggttggtattattatccctatttcatagagaaggatactgaaatttagagaagttaagaagtgtgcccaagtggtagaattggggttgaaagcaggctatctaccgccacagcctgagcttttcaccattaggacatactgcttgatactgtgaaagtatccagtatgtgctttgctttgttctctctcttttttttttttttaaaggttcgacatgcacagactacaaccctaaacctggccagttttttgtcaatgcgtgacatttgggcatgggggtgggtaggggcagacagtacaacagagagttcaaatggattggctttatttccaaaaccagtccttggggaaagatttcaaggcacgtcctactgaaagtcagcatgcagagattgtcattcctagaacagggctgacccaaagaacaacagtgctacaagcaatcttcacaccaaccctatgacgtaggcatcattatcccccattttacagatgaagaaactgaggttaagcaatttgtccacactactgctggtgaatgaccgagccaagacttgcacatactggttcccttccctgcattcctttttaaccatactccactcttgccttgggggaccaagatccgtgatggacatgttattatattaacaagaaaacagactcttgaatttggacctctgatgatagtgacacagcacatgcactagggtgttggagacaagagaaaagccaggccctgcaaacaagcttccaggtgtttgctaacgttgaggtgtgcagtcttggtcaatcatcaatccagtaacacactgcccagttaaagcactgctgagcagaacaggaagcaaaaagcgtgtccacaggctgcatttagagcggccctggcctgggtgaggcagcttgcctcttagaaggaggagaggcagagctcagtaggaaaccccaaggaccttcaagcagtaagagctgagacctggaaggttcttccacactgagaagtcaagacctcttccgtaaggcacccttctccatggaagcctgggtaatccttaaccctaacttgtttgggacactcttgagaagtcagaaagacttgtctgtgcctctcacaggtaactgacacaagtggttcttcacatggagaagaatctttcttaagggataggtgggagtaggagaagagggctgcaaaatgcctcccccaggaatgccctttcatttttgtttgcagagaccacgaccagggcaagcagctcaggtcctctgaaaccagaattggccgggtcagtgctcccctcagaaaccacacttgtttttcctccagggagccagggactcgatcacctgtgactcaccgtttctgtgttgcctacacagcacacacgtcaagatctaaaatggcctctgcaccctgttgccctcacccatcctggcccccactctgggaatgtgtgcagctccaccttcagcatgaaagtcgggaatctgcggctcctccctcccctgaaaaacagagcatgacccaaagaatagagctttccattctctacccttgccagtgtcgtaatgctcctgttctcccataagccactctctcctgcacttgtgttgctacaggatcagaacctaatcctaattagaacctagttttatttattttattgttattattaattattattttttgagacacccgagtctcactctgttgcccaggctggagtgcagtggtgtgagctcactgcaacctctgcctcccaggctcaagtgagctccccacctcagcctcccgagtagctgggattacaggtgcatgccaccattcctggctaatttttgtattttttttttaatagagatggtgtttcgccctgttgtccaggctggtctcaaactttctggcctcaagtgatccacctgcctcagtctccccaagtgctggaattacaggtatgagccactgcacctggcctagaatctagtttgatgtagaaaattcaaattcaaattgtgcattcttcaccaagtgtgctaaacttgcatctgggtgtggggctgtggttacggatatagaaaacttcatttaatgagaatgatattgacatttacacgacaacaacaacaatactgcaatttattgactattttctatggcaaacactgcagagtatttctcaaatgttatcacgctcatgcccccaccaagtctattgttaccgcccccattttatagatgaggaagagatcataagtagtcgagtaacctgctcaggctacacagctattaagagctggagctgggatttgaacctgggcaattgtaacttcaaagttggtgtttctccctccctaagcatcgccccaccccatctaccatttgtgctgtgatcttcgctgtcatggtgtcccatgtctttcactgttccagttcaagaagcttctccccatcgcctcctatccactacatcctgacttgctaatgactcttcttgtcagtaccaaggggatggtaaggaggaagagggggcttgtgtcaaagtgaggtgctctctaagttaaaaaattggctttggaggccttggggggagggatgaatgaacattttatcaacacaaatgtcattggcaagccccaaaacaaacagtgtcccaccgggcttgctcctttatgaggcattcaatcaataaaaagagagcagaactctgtcagatttattggctgggttcaaaccgaacacctcttctacccgccaaaggctgggtcaccagcactacctctcctttccgactctggacagccctcattttcccctatggggctacaatggttcattgtttgaggcaggccttgtgagaagttgtgtttgttttgcctcttatcttatcagctccagagcgacaatggcccaggtgtactcaccattttaccatcaggtgagaggagattgtggcctgggtccaggctggctggggagacttgctgtaaaaccgactggctggtcaccatggcgctgttgccatggtgactgattgttgaggaggaagtgatctcattgtttccctgctggctgtagcgcactcctgcaaaacaacacaaacccagtagggaacattagtgccaccagggtcctggaacaatgactcggcacctcttgttttcaagggtgggtaataagaaaataaagttgctttctcctcccctgtccacccacaagaaatatcggctgcttttctccagggtaaatatggcatgttctctatttaattctagaatgtaagcgccacgagggcaggaaatttttatctcgtttgttttgttcactgatgtatccccagtgccttggcactgaatagccactcggtaaacttctgatgaataaatgaatgactggatggattctgtttgttattgcttccgcacagttctttgaggatttgggggttgagactagccttctgttactggctggagtattttttattctttaaaatgccttttagaaatgtttccctggcatccctcgtggtgctgcaaagtataagtagacccatgtgacgaagaagaagcccttgtccagtgacccttgaaagagccgtagcttaggcatcagtctctgtgtaccacctttgtggccaggcccaagaggtcaggggcacggacacaggcagagcaggacagggatgaagctgcgtctaggagctaggctgtagaactcacattcctttgctgggggtcccatttggctgccttccagggcacagggaaaggtgtgtctgctgggaggtggggcaggcagcaccacacacaggcagatgtggatgtttagtaaaccactggagtttgctctgcaggggaagggtagaaccaaacatgtttacaacctcgctgctctgaccctccctcttgctcgggaaccaaaatggaggtctgctctcaggaaagaaaagttctggacagagatcaggcaactgaaggaagctaaaagaacgcctgggtccagtttgcagatggaaatcctgcttgatgtgcccatgaaacagtcaaggacaaggttgggggtacatggggcatctcacccctaagctcagtgcttagaaagacagtgttcttgttttttgctttggatttgacaaaaaggtttggaggaccctgtcctgcagagaccaaatgctctaggcatggaattatctggataggtggaccaactctttagctgcacgtcttcctttgcccagtttcccaagatgaaccatccctgtacactgattctgttgttgctctttcatccacccaccccctgccctagctagagccccaccttccagaggagaccacaaagttcccccaggggccaggcactgccataatcagtgtcataatctgcctctaattcaccaagatgaagcttaccaagatgagactagatgagccccaagccagttttccttggatcttcctaaggactttacccaaggccgatatgacctagagcttaagagggctggggaaaagaacaaaacaaatgctaaagctgggttctaaccttcaagagcaacttgtctgagtatgtagtggcttgacgcttgctctatgagcttttctattggccattttccccattctttgaatcaaggagctgctagtgggggtggtggtgacagtgggatggcgctggcattggtgtattggtttaaggcactacattttttgggaaggacagaaatcatgaagttaaaaggaggaacagcgttcagctccccaagtcaacagccggtgcccaggcccctgtcctcctgtgcacctatctgcagcccccacgtctcctgtttgccatcgatgccatcccattggattaaatgaggccttctttcttcacgtctgccacccagttcccagtaggatgcttccaacagttcaaagtgttgttacatgaaagaagaaagagatttgaaccttatgagctctgaaggcagagctaggttcaatggaaaacagggaggcagatttcaaataaataacaggaagaattttctatcaaggaggggcagtgggaagactatggactctgcagcgaaaccaactcaggttcaaattctgatgctgctcttaatagatctgtgatcatgggaaaattactttccctctctgtgcctttgtttcctctagaaaaatggagagaatgcctcctcaacaggactctttttggattagaggtaacatctatacagtttcttgcaaaatgccatataaatggcaactatgggtggggatgctgtggggaggaagctggtacaggaatggaccccaagatatttgccctaagatcctagaattctagatggcttaggacagattctaaacactgaatggaattatctttccgtagagaacagtttccaaagaatcctaccctggcagaaccactgatgctttgccctggaagcaacctgggagagaggtctagccgctgccctcttgctctgttcttttggaggaactggacttcaccctgtttttctcctgctttctctgactccctaaccagctatttacctccccgagaggctctgctcctgagagagtgttgataacgctgggagtcagttgtgttttcacctcccagcctgtccccatcatcgattcagtctcaagtcaaacagtctctggatttagcctatttaatttggctgatggaaaagggccagccctctgatgatcaaatatgggtcacaaggaggcttctcccctaccaaaggctacgcaattatttatttaaaaataattaaccaaggatttccgcaggaaacaaaaggcttctttacaagggagcatgtcaggagagactcaagagccatttgttagaatccaggcagcatattccaaggctgctgtggtttttatactttgttttctccccaacaaaactttattatataagaaatataacggtggagctgctctgtcaaaagacagatgagcctagacctttgaacgttcctttaaaagcccctggttaagtgatagaggctcggctggaaactgggggatccctgttttaatctcagctctgctatcaatttcttgggtgagcaccagcttcctcatctataagccagaggacggcccactgtggggagggggccattgtcacagcagtgtgatgggagccaggcacaaggctgctcatcagccccagatccacctgcaggtgttcccacgatgctcctctcaccaagcatgtggcaatcactggcccctgagagggtggctgtaatcagccagccatcttatgagggggcggggtgggggcgcatcacaaggtgtacaccaaaaataggtgctcttgttagaggaaggagaggccagtcctcctatatttcaaaaactcagaagagcacttgaagtgagaacaaaaataagtgcaaagtgtgtaggctctggagccaggtgacctgggtttaaatcttggctctaccctgtaagacctgtgtgatcttgggaagttacttaacctccctgagcttcagttccttactgttaacaatatccatctgtcaggtcattgggaagagaacggaatgagttaatggatgtccaaatacccagatcatgctgggcacataacagttgctgaaaacacgtcaattcctcctactttggcactgtccttgtttaaaagacatttttaggaaggctgaggtcgtgccactttattgagcacctaccatgtgccaggcactgtgttaggaagcattaagaaatggaatagcatcttcccttcttccttcaccaatgcaagttcttaaagtgaacatatgacaagggctctggtttaatattgattaaccaaagatgccaggttaatagccacagaggacccataggagaaatgacagtggcagatggtagccattcaccttctacttacttcctagctcaagccactcactggccccatccccattgttggctctatgaaccacagcaattgtgtccagcagcaaaagccatccaaggtggagttgagacatccctgaggccctggtgagtagatcatctactttcctctattcctaggcatcagcatcatgggtgttgggctattcctggatacagacgcagatcattcggtttctatccaatatgactggtcagaagtgccaaaggcatggcacaggtgcatggttccaagaagccagcatccttgctctgccttcctgtgccagcaccgtctctagggtcctttcacactgctgcagcctgggatatctttctaaaacaaagtcacaccatgcctctgctctgcttggaaacatctgatggctcctcactgctttccagaaaagccccaacacctgagactggcagaactgggcctttgtgattcgtctgttttatttgcattatctctcaccacaatcttaatgcacttctcaaatggcctgaccatctcctgcctctgcacctttgctgtttcctctgcctggaaagcatctcgtgtcacatgtcgcccccctgtgaagctcttcttgattcatcctgggagatggctgctccttcctttgtattttacatgcactagacagagacttacggcaggagtcagtcaccctgcatgcacgctgatgatatgtttacttttctctgcctcttaaagaaagagatgagtctttacttgttgcatccttatagcctagcagactgcctggtactgtgcatatttattgactgaaggaatgaaaccccagcagctttgagcacccatgccccagacaaggagcatcacgtctagcagaagtagaaaatacagtcagttgtgtatttattgtagtgaaagtgtaaatctgttccaattatatagacatattggggataatttgagtgtaatgtcaatttcacatttggaaaacacttagtgaattcagaagcctgcatccagctgaatggaaccacataggagaatactaacaatgctcctgtgtgtacatatgcgcacctcaaacatccaccagccgcctcggtccactgtgtgcactggtaagacacatccatgcaatatggagtcacatcttttccttcccatgtcagataaccctttctccactgcttcacagtaactcacaacccacagcacttctgatgcccacttccctaggcaaacttgccatatttactattgtatagcattgatatatttcttaactatttaacgggtataaaactgtggtaatctttttattggattcttatcttttaaaaatgtgttggccgggcacggtggctcatgcctgtaatcccagcactttgggaggctgaggcaggtggatcacttgaggtcaggagttcgagactagcctggccaacatggtgaaaccctgtctctactaaacatacaaaaattagctgggtatggtggtacacgcattagctaggcatagtggtgtaatccccactactcaggaagctaaggcaggagaattgcttgaacctgggaggcagaggttgcagtgagctgagatcgtgccactgcactccagcctgggtgaccagaacaagactccatctcaaaacaaacaaaatgtgtcgctgaggaagttttcaagtgttgtgctttttaaaaaagtttatttcagagacagagtctcattctgtcacctagtctggagtacagtggcgtaatctcggctcacggcaaccttcgcctcccgggctcaagtgattctcctgcctcagcctcctgagtagctggaactacaggcgcccaccaccacgctcagctaaatttttgtatttttggtagagacagagtttcaccgtgttggccaggctggtctcaaactcctgacctcaagtgatccgcccgcctcagcctcccaaagtgctgggattgaaggcatgagccactgcgcccggcctcaagtgttgtgtttttaatcctgtttttcccgtaagccctgtggttcttatcacatggcttagcaaactctggtgatttttaggctgcatatgtcaggttatatagaccctactgcgcctgtgtgttcaaagacaaacatgactgccttgcaggaggaccccagagaggagctgctcagggtgccattcaccagagactttgcagaaacctgtgcttcagggccttagagctacagctcatagagcccctggcgatttaattcagctctaagagcttcaaaaaatcatggaattccatgattccagagatcaactgggcaccagcctctagacactttaacaatctctctctctctctctctctctctctctctctctgccataactctctgatgattctgggtcagttaacttttgagccttggcatttttgtctgtgaaaggggcacacagatattccttcttcacaagccagaataatgaatgaataaaataatgtcagagatgcactggttctgctgggtaaacagaagagcaatgtcaacaaagaaaacaggaccagaattgttcttttagtaagaagaaatgagggaagtggggattcctgggcaatgtggggctcagcttgcccacgatgtggcttttggcactgaaacctgggggttcctttcactgaagtctatgagctgcacccagaatctggtgggatgcctttcacccttgacatttcagagccaacctcccatccctgataatgcaggaatgttcctccggctggtggacctctgccagcgtaagtgagcgtcccagccaccaacagagtaaacattactcaactggctggggctctgtcacacacattcttcccctgtgtttctaacctcatgcagagtgcagcccagccctgttgggtctagaaactgggaatttaaactcaggcaggagagagcatgcgaaggagaaagctcttccaaaaggtaataactatgttcattgttcataaattatgagtagacacagccatcttttctatgaagccaaatcattatgttggggagatgacagggagagactgggccaggcttgatggacccagtactgtgtcctgataactctaccttctccctaaacactttacttttcttaaggacagaggcagagagacaaatgattctgtctggtgaacttctgagaggcccatttggaagaaaagaatgtgaacaattccctggcttgaaattgagaactccagaaatgaaagctttcgaatgagttagcattgctgcctcagtttccttgtttgtagcactggacttttgctagttcttattaatatttcctcctctgagaggataaagattcatgtttgcaaagagtttagaagattaaaaatctgcaaatgtggaagaaaaagctgatgcaagatgaaagcaatttaaatgctgggctggtttcaattccggatccctttctacctaacatggcttagttaggagctcaattcataagaggagaaatacagacaggcctgcagggacagtaaacattcttgactcaaggagtaaaagttgagtgatacttaagggaagcccacaaactggttttcttatttaaaaaaaaaatcaaagcaaatgtaaccaagaaaagaaaaaaaaatctttcatcaaaagcaccttggctgagaacagaagctaacatgcatggtgcacttgaaaaaattgcacatgtggggaggtagaagaccaacagaaactctgtgtgtcctcccccacaaggtctacctgggccaccacgcctcatccttactagagtggcagtttctgcaggcaaacatcaggcagtttgcaatgaatacttcagcctgaagattgctgctgtaggtaaaaggaaccagcctggcacttgataacttgggcagtcctcacatctgagagtatgttacacccatctgcttctcaatgtgtcacaagcacccatttgacagagtggaaaactgaggttcggagaggacaaggttgtttgcaccgctccttgctagggggtctcccagcaagtccgtggtattccaaagctgacccttctccctcttcctcctaagccccaaatgggctccagatatgtagagcctccccatcacgacccactaatagcttgaaatgatcttgcaggtttgtttacttgttccttggctgcatccctcactgtaatgtaagccccatgagggcaggaccttgtctgtattctccattttcttcttggcagagtcatgctaagcattcagtaaacatttattgaaggagtaaatgatgaatgaataacctatgcttaaactctgactgatgactccacatcactttcacctttagactgttgagttgagtggtggtgaagtgactggagtatgtccatttatcctctaaatctcccagtttttcttttcttttttgaggcaagctctagctctgtcacccaggctggactgtggtggtgcaatcacagctcactgcagccttgaactcctgggctcaaggaatcctcccacctcagcccccaaaaatagttgagactacaggcacatgccaccatgcctggctaatttattaatattattattattattgttattattattttgaagagatgggggggtctatgttgcccagggtagtctcaaactcctgggctcaagtagtccttctgctttggcctcccctccctgtttttccatgggcaaggagaggcaagcattctttttaaggaggaagaaagaggagtaagagaagaggagagagagattaaaatacaatcaaaattgaagaaacagtattgatagacttgggcagtttcacatttgaagaaccgagtttgggggctactgggttgatttggggataaggagaagagtcaattaatgggaatttactgtggcaacatgaataacttttaaatgcccctttctccaaagaaactagagtaaaactaagaagggttaatggtggacatcgttaggcctaaaggctgtggggacacagagtgcccttctgcagtctggctcccggggtctggtattttctgagcagctgcctttgcaggcagagataatatggctgcaacaaaggcctctaggcctagtggacaaggagaatggtgatgctcccagtgggtctgggcaaagggagaaaggctataaagccatcagcagactgagccactgggtgtccacacaaaagtaaggtcctataaacagacatctgtattgtgactgaagggctaataaaattgccttagaaaagagaggttttccaccacagcctattcataacaaagaccgtactgggagatgatacccagggagaagatcctttgaggtctggcaagtgtcagagctgccttgtgatagggatttgcctggccagatcccagcctcttcatcactgtcacagagggcatctccatcagtatcattatcaccatcatcatcaccatcatcatgacagatagctgccgatcaccggcaggcccaaggaggctcgtcccaagcaacaccaggtgttgggcactgagataggagcaccagccaagtgctcagggagcaccaccagagacctaatggctgcccagagcagggcagttttgtttctgtctgtccagataattgatttgcagtagtccagtcccttttctagacctcattttgctcaaaggaaacaaaagaggagacgttcttgctcttttcttgccctagggatcctggtaagagattttaaaatgaatgaaagtagtagaacattaaagtaactagtagaactaaattaaatgagtagactagtttactagtagaacattagggagaaactcatgatacgttctttgaaaactttctggtaacattaaatgtcgacattaatttgtgaactgtacacttaagcagtgttaatagggttgaagctgggtgacactgtttctagagaagagaaaatatgcctttatatatacatatatatataattatatagcacatatatgctatataaaacaaaactaatcctaggctcagtttaattcttaaactgaataccaaatttataaaacagggggtttctgcatatgctttgacaggaagccttctataatagatatctttatttcacaaatatatggagtgtctaccatgtgccaggcacagggctatgggctggagacacaatgatgaagaaagctacctcaggctcagatgttggtacagcccacaattctgccactcagaatacatacatacagagcaaggtgttcagagacttcggggaccttcttcttcacggtgagattgaagtttacaggtagggatgcaaaccctctagttcccctggctgtagggttgtagacaatgaagaagaacggccgctcatttctgtctccatccataaaacaccttgagataaattaagcacttttgtgcccatcgtgcaaactgatgttacacaaataggagatgttgtttaagggttttccactcttgctgaacaagaactcacatagacttcactgccaacccagtccaatgggtgccaagcaggaagaggcaccctgcagtggacagggccagaaggcatgggcatgccagctgctattcagaagccctcaaagtgttaacctctagcagttataggtgtctcgtttatacccattataaatctgtttattgtgactggccccacccaatctgctggtgtcgtaaagctctaatgatccctaataaaggtggaaggcttctaacagcacacagttcctgaaacggggaaggagcgagggagtgagggagagaaggagagagagacaatgatgagtttcacaataaaataccacaatggcaagcctccctctgcactccaagctgcggagtcctgggccccaagactggatgccacacacagtcttcaaataatagcctgtcagagtggaaaggccctcatcccacaccctcatttgccagaattcccaggaagttaaatgattcacccaaggtcacccttgctcattggtggctctgatctcctgaatcctagtccaaggcccctcaccccggctgcttctcttttcccatttcagcaaggggccatgaggattaccttcaaccccttcagaactctcctgctccatctggcctagtaatgtcaaccctgactatgcatccaaatctctctctcttttttttttttttttagagacagggtctcactctgtcacccgggctgtactgcagtggcgccaatgggcacaaagtgcttaatttatctcaaggtgttttatagaaggagacaaaaataagcagcctgtgttccttgttgtctacaacccaactgccatagctcacttcagcctcaaactcctgggttcaagtgaccctgctaccttagcctcacaagtagctgggactctacgtgaatctcttagggcttttgtcgaaagttcttatgcctgtgaacccctcatctctcaattctgactccaaaggtgtgcgtgggtggagggagccatgtctatttttaatgagctccctggatgatttttatgtggtctggagagagatttgagaaccacagatcttgccaatacttagttcattgtttctgatgtttcaaatgacaagcagggttcatggaaagggaaatccttcccgattgaaactacaaggtaagacccttgtcaagaacccagggagaacccaagctcttccgttctctcaacaccctgaagtttctgagtcaattcaataatactgtaatggcagctaaccttccttgccaggcactgtgcttggcactgggtgtgtctgatcatatttaagcctcattgcacccctaaggggataggtattgggacagagaagctaataacttaaggtcacactgccggatagtgacagaaccacaacccaagccaagcctgatttgggtgctatacttggctacccagacacacgcatctgaatccggtcctgagaagggactggccataaccagctcaccttggctcaggtaggcttcccttgggaaagtctacatgctaaagaccatctgcaaggtgtttctccaacttaggaagaacatgcagagtacaagtcctgagaaaactgactcttgacttcccaaaagcattggaagcatcgagtccccccttgccagttgattcctcagtggctgaactcacgcaagtgtgctattgcggaggctgctgaagttggagcatagggtaacaggaaggtacctgaagcagacgcatgctcacaggttgagggaagtggtttccagaaaatcagcccttaggagctctgaggtttccctttgctcaccgtggggctgtgtgcaccttctccttcttaaatgctccttcgcctgaagtttgggggccattaagcttcccagatgcagcctccaccaggaacatcccacacccctctacctggcaggttcccagggctaattactaacaagcaatacacatgagaggagtactcacacctcctttaattaaaaaagaaaaatggccgggcgcggtggctcacggctgtaatcccagcactttgggaggccgaggcgggcagatcacgaggtcaggagatggagaccatcctggctaacacggtgaaaccccgtctctactaaaaaaaaaaaaatacaaaaaattagccgggcgtggtggtggacgcctgtagtcccagctactcgggaggctgaggccggagaatggcgtgaacccgggaggcggagcttgcagtgagccgagatcgcgccactgcactccagcctgggagatagcgagactctgtctcaaaaaaaaaaattaaaagaaaaagaaaaaagaaaaatgccctgttagttacaggaaattcatggtcatctcgacttcatgaacatcatgaacctgacctcctgctacatggtcatgaccctcccctctgcccccaccaatccatggtcttcccagcttcccctcactgtttcctgaatttgtactaaatgccttacggcactcaatatgccttgtggatgtcacagagaagtcctaggaagagcaggagattgcctcatacccaatgtgctgcaacaagccagcctaagtttgctgcaaacaccaagatgaatatctagttggagatactcaaattctttaaaaatcaaggttgaatgaaacctccaagaaggacaaggaaagagggaaaaaactaaaaaaacaaaaaaacaaagaaacaacccccaagtctctgcaaggaatggtaacagctactatttatgagaatctggtatgtctggagtgttttacatatatattatcttatttaattcttccagcatctgcatgagtggatgtctccacacctcaagaggcaagcacagagattccagagacttgcccaaggtcacacagcagtaagtgccaaagtgaaggttggaatttgggtctgcctccatagcctgtaattttgtcactgtgccggctggatttaaaagagcatttccccatattagatgtcaaggctggtgatggtgaggcaaattacacaggttgggaggcaaaggggagttagttgctaatccaactccagtactcaaaagtgtgtcccagaccatcctcttcaacagcacctgggaacttgttgaaaatgcagaaacccaggcctcaccccaggcctatagaatgagaatctgtatcctaacaccccccaccccagggaattggcatgcactttaacatttgagaagctaaatttgagaaccttagaactggttctcaaatttagctacacattggtatcacttagaaagttttaactactgatatgtagtcccactccccagctgttctgacaggtccagggtgcagcttggatactgggatttttaaatactccctcgggtgattctaaagtgtggccacatttgagaactattgtcctacagcggggtcagcaaactggtctgttggccaaagcagcctgtttttgtatgacccacaagctaagaatgggttttacatttttaaacagttgagaaaaaatcaattaaagactataggatgatatgtgaaaattatatgaaatttaaatttcagtccccataaaataaagtttgactggaagacagtgatgttcattcacttccatgtctatggtctatggctgctttggtgctacaaaggcacagttgagtaattacaactgaatagtttaaagtacttaatagttactatctggctctttacagaaaaagtttgtcaatccctgttctagagaatttatgaatagctaggataataaccatgactgactaattgatctgactttatttgtgggctgcattccttttatatatataacttctatatgtatgcgtgtgtgtgtgtgtgtgtgtgtgtgtgtgtatatatatataatacatatatatgtatgtatatttctctctctcctcttcatttgtgtttatacttccccctaaaaaataggtagaggcataaagccagatcttgttccattccattaagcaggtagcttcaaaggcccttgcacagatctctgcctctctctgcacctgtaatacctaattctctccaagttcctgtcgcttctcatcaaaccttcaacagtttccaagagcacttctcccataagctgcaggccagggctgtgtgcttgcaggcagcttccttcctcctcagagctcactggaggcggcaaggagtccttgaatcgtctaaggatccttcaggcggattaggcatgaccctttggtgataggactccagtatctcctggcccctttgtgcagaggcttggagccccacgagcacagcagcctggtttctttgtatgcagaccagggctggtcccctatcagagggaggctgacagcagaacaccctgaaggctaggcctcttaatctcattaatatcctgattgtcttccccaacccagtggcagctgatggggtggtacccacaagataaaatgaccttcaaattcaagagataaaatggcactcagataaagtccctaagaaggagaatgctggagccacccatgtccgccactaaacctcaagtcagtatgaatgtgtttcctagaatagcagacatttcaaggcaggatttgtctctcttctgaactgaaataatctgctacttaaggacaatgggccttatttaccgtgaggaactttgctgctgagatgaatatttttacaactaccctcataaacccctcccgctgtctgctgcccagggagggggcggagctcccagaggtgagctgaggtgcttgcactgtctcagaagccccattaagttgttaaggcatttagtagtccagacagtgccgactgcaagggcagttcaaatccccacacaaatggggatggggtcatgaaagagggggctttgatttcttgcctgggcagggcacagaatccaccttggtcaggggcagtggttggggaggaagtagtaaactacccagaatgggagactctcacccttaccccacctctttggccatgatctcccaaagcctcagtgtcatttagaggggaacagtaggaatgtgggaaaaggaactgctgggggctgtgtgtgtgtgtgtgtgtgtctttctctctctctctctctgtgttgggtttagtgcctgaaaagttcttagcatctgcataaagcaaaaagagatggacagtgtgcaacagctcaaaacctctccccaccacttactaagaatatgaacttgggcacatgccttccattctaaatagttcacttctcctgattgtaaaatgaagatgacactagagatggctcctactctgcagggctgttgtgtgggtcacataagatgatgcatggaggaactcggcccagggcctgggaccaaggaagtgctccatcaacactggccattagaattcctctcgttgagtcactaccttgccactggacactttggagatttcctcgtgtcctgcagaattcagtgccagggaaaacaacagcattcacataggtaccctggcccagagtttggctggtctgagacccagggttagattccctcaggtaacctgggaggggctgtgaagggggatgagcgagaggcaggaggcaggattctctgtttttcaagctctaagccacatcaaggaagtcaagtccactgggcttggagagggaggaatagagttcagcgaaagggaggagcagcagccacagaaataaatgtctcctctttggtgaaggggctatggttcgggacccctgaaagtcctcctggcagggcctcttctctttttctttgtgcctcactttctttccaggagaataagtccccccttccctctcaaaggtgacacaagagtgaggacatcatgcgtgggagagcggaggctgatgaagaccttttacccctcctctcctcctcaaggtagtggccaggtgagcttgctgccgactagagcaaagggtacagggagcaaggtcgccacagatcacacagcagataccacagcttgggccaaggctagccaagtttccatcccgcgccaacttcctcctcctcctcctcgagccaatcaatacaagcaccaggctccaaccagtccttctccttgctgccgccctgccctctgaccttttaggggcctttctcttgattcatctccagaagggaggtagaggccatcactccagacctgctcaatggcttcagaatgggctgtcatggagcctataaccagggacagctcctgctggccaagagctggaatagggggtgggggcggataaaggccttccaggctgaagataaatggctgcctgcagcctgctacagtaacttcaggcccccaagaagagcaaacaaagggtgcccctgtgacactccctggaaagatgaaggcccagcagcggcagccaggctggttcaaagccccaacttaattgtcaattaagcatgcataagggagacaaagccatgacaacccttggctgcatgctggtgtgtgattgtaaagccaaggaggggcaacgctggaaacagctgactctgctgacagtgtgtttgtagggcatcttgtaaccaatcagccgctgacagaggcagagtgctcctcctgccacccctattgtgccggacattccaggactagggtcacaccgtggtcatcgtgggcaagtgggccacagcatggtaagcatggctgggagggaaggtgctgttagagaaaggctgctcttcctctctaggaagagggttctggggaagcttcgtctccaaggtgctgccagccctcctggctcaggtgctgatgtttggagaggggagagcgtggagagtgggtgtggagggattcgggccttgttccccccagctcagtctttggggttgctagtgctgacggtggattttgggctctcctcagcaacatggagttttttttgttgttttttttttaagacagagtcttgctctgttgctcaggttggagtggagtggagtggcccatctcggctcactgcaacctccacttcccgcctcccgggttcaagcgattctcctgcctcagcctccggagtcgctgggattacaggcacctgccaccacgcccagctgatttttgtgtttttagtagagatggggtttcaccatgttggtcaggctggtctcaaactcctgacctcaagtgatctgcctgccttggccttccaaagttctgggatttcaggtgtgagccaccacacctagcccacagagcgttttttttttttttgagacggagtctcgctctgtcacccaggctagagtgcagtggcgtgatctctgctccctgcaagctccgcctcctgggttcacgccattctcctgcctcagcctcccaagtagctgggactacaggcacccgccaccacacccggctaattttttgtatttttagtacagacggggtttcactgtgttagccaggatggcctcgatctcctgacttcgtgatccgcccgcctcggcctcccaaagtgctgggattacaggcgtgagccaccgcacccggcctttttttttttttttttttcggtattctgcacacagttacgtttctggcttggttagtgaccctaccttggctgtgggcactgaggtgggaagagtgccatgcggctctacagacagaagccacccctgaatgctgggctccagcctgctgtctgcctgagtgcatgactcgggagccctgtcacggcacacacgccatcctggcagcctgaggtggggacacaagtctttgaccccagcatcgtgcatctcaggcactagcacagcagccacctctgtttctagttccagggccaggctacatctcactgcctcttagggggaatgccctggtgtgtgagatcaaaaagaaaatgatttctgctgcctgccagtcttctcactgcccttgtttagccctctctaatgttaagagtcataatgagggtagtatgggttatcgggaaaggtgtctttatacattcactcctttcatcctcacatgcaccctgtgtggaaggtcctatttctccattttgtaggcaggaaattcagactcagagaagttatgtgaattagccacagttataaccttactggttagaacccagatacataactacactcagagaaagagaagccagtccctgggcttgggacaaggaccatgttgaggagcccagagtgaaaattaaagcagaagggctgggcacaatctcacaactgtaatcccagcactttgggaggctaagacaggaggactgcttgagaccaggagttcgaggctgtagtgagccaagactgcaccactgcactctagctcgggtgacagaggtagaccctgtctctcaaaaaaaaaaaaaaaaaaaaaagacagaagaaaggcagccactgataatattcagtgtcccataactgttgctccagaaacagtaataggatctattacaccgcagaaagatccacaaagcccccaaacaaaacctccatctgcagctggttctggggactcgacagtgacccgatatccttcctaccagacagtaacctcccagagggcaggacgcgcagctcgtacatcactagcatattcccaggacttggtaagcattcaacacatcgtagtgctgtgggaaagtatggagtgggaaccagcaggcctgagctctagtccttgttttgctaccattgctctgtgtcactttggcaaatcactgcctctttctgggcctcagttcctttcttcaaattccctccaaattctaacattacaagatttttagaaagatccagacttcaggggcaccccagagtatccacttcccatgggacacgcccttcctagactccagtcagaggagtacacaggctgtgttttctgccctgctccctgtccctccagccctagctctctgggtctcctgtcagcacacaggatgcctaaaccaacgaccccgtggtgacctcagcacagcccttgcttgtcagaaggctgctgggcctttgtttggcttccaggctccctgactttggtgtggagatcacaggtcccaacacaatggccattgtcttcccagtaatgccccttgccccaaccacgccccctgtagctcccagcttcagctccgtggatcgctgtggtgggcaagcacactggtactgctcagtgccagccatgtgccatttgccacaaccctcagaaccctgctttgaatttccctaaaggggcgaagttactctgcaatcaggccagtctttgcctaggggcttctctgcctcttaagtaaccaagactttcttcctgtgtggctgagcctctctcctctgtgggagtgggacctacagaaacccccagcactggccccaccttcatgctgggcactgtcaggctcccagaggccctggaagaggcagtgctatgggagggcacagcaggcatggaacaaatgcttgtacaccacccagctgatggctccgagcctgtcttggtggctttggtcccctcaacacttgggtcagcccccagccctcaggcctttctcatcagaagggcaaccgacaggtgaggggagccaacaggtttcagaatcacccctgagttagaaacagtgtttggctttcctttcgcaagcccttttcttggagcaggcaggaggctgctacactttgtcctcatgggcaccacacagaccccagtgagcacatccattctaggaagccagctttgccagaagaatgaaggaccagaagaagtgctccatcccagcctgtgcctaacacagcgctcagcatgaggtgtgctttcccccgaggaggctgtaggattccatcctgacaaacccaaagcccacagcagaggcattctaatccaggccagggcccagcacacaggagcactcaatcaagcatgatggagcaggtactcggtcagtttttcccaactcattgctgcaaagatttcaagtgactgacccccaccaaccctgatgacacacggaagccaacaagcagaggccaccaacagagtggccgtccccaaaggctactgagcttctcctgaggcagccggaccgagcgaggggcaggatatggccagagatggaggaggtggccggagtgccatcctccaacacagtgagggttgccacgccatcacgacccgtttgcctgcggtttggatctggcccacccataaggcagcctcctcagtgtagaatgaccgctgagtcagcagccacacagggagaagaagagggaaggagacaaatagggtaaagggctccctggaagccgagtgagccctcacagggcaatggctgaaccaggagttggaggaaactgatcagagccacacattatttccaggggagtatattctggcaatgagagagcggccctaggatcatctcaaaagcgtttgctcctctgaaaacccttaaaccagataagatccgtggcaagaaccaggatggttgggttgccgaggcagtgaggcccaacctttgcttacctgacagcttgtttggaggagaggagctgggctggtggtggggggagccgtgggagagcagagggttcaggctgtgagtctggttggagctataggcgtccatggccagcttttgccggaatgcctcctccttcctgcggtttgcaaaccagttgtagacacggacctcagtgaccaagttggagcccaggccgtgggctttggagggggacacccctcgctgcaaacattctgccctgggaatggatggaggggagatggtgagtgagggggggcggggggacttgttggtgcttggccaaaaacacacaatcacagcagtcttggttgggagtatgaaggggccgtgggcagaatggaaggctggggaggagaggcctatgcagagaaaaggccaatccatggagtgatctgatgaagatggctgaagtgggcctgaacgcagggacagagcaggctatgccgccctgggagtcaggggcttaggctctggtgtggctctcgaggagaagagagcaagccggggacaggcagtccaggggaaggtccagatggggcttccttatttagccattcttcccaccacataaaaggcaaagcccttcgctggctctgtcttgagtggcttcaaagcacttcgagaggatttctggtcttttggggcttgaactccctgaaagagtgccaggaagcaagatgctttatcccctccaaaaggcaggctgggtggggtacaaagcagggtgcattgagatggccagtctctagctttatcagggctggtgaaacctcaaaaccaggtgcgagagattcttagacactactgggtgctgcaaggcatctcattagtcggggtatggagcacagcctgaggactcagtggcaatacaggcctccctgcttcccagcctgacctccctggctgcattcttcccacagccaaggccagcccagcccagagacagagaaagcgcacacaggccttggccagaccaaagagctgaagttttagaaagtcaatactggagtcagggagaacagggcaggaatgaagtaaaaagatttcccaaggctttccaatcgtttaaaaaaaaaatagctgggccctgtggctagagcctgtaatcccagctatttaggaggccaaggcaggaggatcgcttaagcccagttcaagatctgctgggcaacatagcaagaccacattttaaaaataaatacttaaaataacacagagttgtttttttgtttttttgtttttttttttaaatagagatagggtttcaccatgttgcccaggctggtctcaaactcctgggctcaagcaatcctcccgcctcggcctcccaaagtgctgggattataagtgtgagccaccgtgcctggctggtagttaacaagtaaaaagaactctgttgagtcagcgggggcagagtagactgaacagatctgaccaattcttactctcctgccaagtttccttttggaccactgcatgtctgacaattggtagaggccagatctagagtctgtggctaagggaaagttttaccctggcctgcagggaggtcaaacacacaatttcgcttcccaagtatcatattttaaattagcattctccagagtatcttccctggaagaataattcatggggttgtttgtactctaccgaagattccatagttaacaaccaattcaacaaagctaagtgggtttcttgactgcagggcttctcggaacctttaatatatgttgtgactctctaaggggaagtatccatatgctgattctcagacttactgattaatgaattgatattggggttctgtggaacatactttgagaagctctgatttagccacacttatctgtataactagtgtctcaatatcccaggaccgaggggagggttcctgggtctgtgtacttgcccacctgcccaggtgagcttctggtggtgttacctgttgcattcctccactaaggcctctctctcttccttgctggggttcttttgccgatcgtaggcctggtacaagatttgctgggacgcgggcccccatttgaaccggttgcggcgcatcttcttgttggtgggctcagagcaggcatcatcggactgcccaggcccatggctctgttgactgaactctggaaagagaaacagcagctgatcctgactgcttttgtctgtcatatttccagaactctggactgtctggttgaattctgaaaagagaaaggagtagatttgatagggtctgtagccttcactcagcagacagacagacagacagacaacggacgaagacacctttattcccctcgtctaactaagctttgcaaccttctctcactgcatgtggagctggagatggggagccctcagcacaggcccttactgcccacctcagttgctccagcaaagccacccttttcctttctttgaaggagctcaaacatagccagctatagttttaagaaaattattattttttcccctttggctcactggccttcagagatgaagcaacactctgcatcctgaactcctgtatttgatgtcaagtgggtgagctcaatcaagtctcacatccaggggagaactgctcaaaggtacaatttacacttgcacaaaatattcagaggctgtagatagcactccccacctctcctccctcttcctatatcctaggtatctacattataaagtcaggtttttagaaaaaccccaaaccttttggaacatgctttgaaataaatataactggagctttgtattggaaaaagaaaatgtgctttagatctcaaaataatttcaaagactacaaacacaggacctgtctgggagtagtgtttaattagctggaaatgatgctccctgtctgtccaattccttgagtccaggcatactgtgaccatcaggagatttttgtggaatgaatgagaaccagcagctcggcccagaggtgatgccttagcccacatggtttaatgagatttgatatctacattaccgaagaagaaagctttgctgtcctcgtcttcacatctgcatgaagcagggctcatcaggagtgattaattccattttaaagatgaataaacatggaggctaagcactctgctgagcaaagacacgtaatacattcatctcctagctctgggtccctatgttctggatcttaatatctttttttttttttttttgagacagagtttgcctcttgttgcccaggctggagtacagtggtgtgatctcggctcactacaatctccgcctcccgggttcaaacaattctcctgcctcagcctcctgagtagctgggattataggtgtgcggcaccatgcccagctaattttttgtatttttagtagagatggggtttcatcatgttgggcaggctggtctcaaactcccgacctcaggtgatccacctgcctcagcctcccaaagtgcagggattacaggtgtgagccaccgtgcccgaccttgatgactttctttctcagttcctgtaattactcccacaggtcacagaaagtggaaggctaccacctccctttgtgatgtaaatgatgtgccatcatttacatgccatccttcctgttcctttggacaactggatccaaaatcctcaaggttcaagtcaggctactacttaacgtttgaatcccctctacaaccccacaccaagtggccctccaggctatatgcctccagcagcagggaacttaccacctgtcttaggctcatttccattttgctccatcgggaggaatggttagggcccctagcccgccaagacttgcaatcccaactgcaggtggtgttgggctttgtttaactgtggactgatggtgtcactggggcctttgatttcggcccattcaccttggaggattcttaggccaccttagggctctgttttcagtggtgcccaacaatgccactatagacctgagagagtccctgtcaaatgtactagcaggaagtcactgctagtgggatcatgtggggccccagcttaattccctcatcatttagtctccccagctgtggaatgagactgactgaaagcttagggacactaactagtcttttagaatatctacccctagtcaggatgatagtgatgttggcccaaattcctttgggggttatactttttctttttttcaaacaaggtcttgctctgtgacccaggctggaatgcagtagtacgatcatagctcactgcagccttgacctcctgggctcaagccatcctctcgccttagcctcccaagtagctgggactacggatgtgcaggccaccacatctgactaattaaaaaaaattatttttgtagagacggggtctcgctatgttgcccaagctggtctcagactcctggcctcaagcagtcttcccgccacctcagcctcccaaagcattggggttacaggcgtgagccaccatgccccacctgattatacttttcaaagtgctttagcccctctatggtatttgacttcacagcagctctctaaatgcagttacttgaggggaaatccaagggggagaaggagatgtcccctgctcagtgaggtctgtcacagtgtcttccctcctccccgtgggccctgtgtggcaccagtagagtcaccaatggcgaaagccagtgtggatcatcccaagggcctgggagcaatgtgagattttttcatttaatgtgaacagacacaataacggttcacatttattgaaccttttctgtggtgaggtattgtgccaaatcctctaaatatattccttcatctaattcttacgaccgctccatgtgagaagtatagccacctccattttacagatgaagaaactgaggttcagactggtgaagtgacttgcccaaagtcatgtggacttggggcaggagcctggacatgagcccagcctgcaggcttgcaggctcctaactaccagcctgtgcatcacctctcactaaaaacaaaacccaagccacgtaccccgcaaacgcttcatatctgacttgtgtggaggtgacaaaaccgattcctgaagctttgtgtctggtgggtgtgagacactctcgcagctgctccccagtgtgagggctgcctcagtctctcacctgccctttgaggaggtagcaggctgaacagtgttcagaactcagtgtgtcctcaaatcagccaggtgggtttgcctgtaggtgctcagaaccattcgggttccactgacatcaggggcttggctctagcctctcccaatttttgaagaactagactcccacatttgctccctctagccaccaacaactcttctctacttcccttcagattaattggggttggggaagaaaatgttcattgcccatgaaaattatcttggagaagttggcttcagtagcctctttataggcttgggggctgcttggacaaggaggttctgtgtgtgtagaggggcccatgaatattaccatttgttatttttagtttttccaggaaatttgtaatcatgtatcattttttattctctcccctcttcctccttctcctcaccccattcacttgtgtccctcttttatttctcttacttcctaattcttatatcatgcttgcatgtcttacattcatccttcaagacatgatttgaatgtcacctcttctaggaagcctcccatgatgtctccaggcaatttagcaattcctctgctgccccttgtgtatatctttataacagctcttagaaagtgaatgtcattatttactcaaacatctccacttcttcactggatggcaggtaagtccctggagaaaagaacctatgtattccatagcttagcgtagtgtttggcacatagtaggtgcctgtataatagttacagaaggaaggaatgtttcttaagcttttatgtctcgtgtgactttaaaacaaaaataacaactgggtgcggtggctcacccctgtaatcccagcactttgggaggctgaggcggcggatcacgaggtcaggagatcaagaccagcctggccaacatagtgaaaccccgtctctactaaaaataccaaaaaaaaaaaaaaattagccaggtgtggtggcgggcacctgcagtcccagctacttgggaggctgaagcaggagaatggcgtgaacccgggaggcggagcttgcagtgagccgagatcgcgccactgcactccagtctgggtggcagagcgagaccccgtctcaaaaagttaaataaataaataaataaataaaacaaaaataacaataacaacaatctcttgaagaggctgttgtatttgtaaaacgtcccttcctcagcatcttgagaaactttctggacctctgtcttttgagaagtttccagtctgcctttcctgcctccttctcctttctgaagaaattctcattgaatacagagaggcagcacagactggagatgctgcataaagcttaaattgggcagggcccaagcgttgttgggtctttggagacaatggctcctgagaatttttttaggctttccaggaactacagagagttgcttcatgtcaggaacacaaattcttaaagagctagtcaccaagtatggggggccaacccattcttggaaaggtctctcgctctaagcagcaaacagctctcatgttgcttcttccaatctattcatgtaatgctcccaacaaaagcacaaacaccacaatatgaaatgaacacctaaaaccattcctttcaccagcccagggacattgagacaataaatactgaaacaatcacttcagagcagtgtgtaacagaagacaagagtcattttaaaaagcaacagggaaaaaacccaacccagaaacccagatagtggtggaaattaacatcttgataaagacagagaagcctagataaagccagaggatagtgtgtggggagagtgaaaaccgatacaaattttccaggaaaaggattggatcaaagtaatgaaagtgtaatgtcaaagaatactttcctaaaatacagacagtatgtcattcctactcttgttattcataggcagttcaaacttctctagacgtacttcaaaacaaaaaccttttagaattattgggtgggagaaatcttgggacagaaaaaaaactttgggatgggaatggggatgacaagaattgatgggtcagagttccaaatgcagatgcttttcctgtgccctgccttagccagaaatagcttcttcatgagcagggccaccagctgaggtccccacactctaccagtgttggtaaatgtgggtaaacaccttaaattgcctcaggattcaatccctcccactatcctccaagaacagggtgaagttctgaatatatctctctatacaaatgcattctattgttgatgctttttccagagaggaggaaattaacagtaatagtaatcaatattattgactgcaacgaaatgtcttctttggaaattgactgatggtcacgtatcaaggggagatgctgggttttctctcagggaagacatttcactctgtcacctacttggtttcaaagagaaggaggtggaaggaggggccaaaaagtttaaggtatgctgcatacactgacaggctcctcagagcaactggctgggtagcaagggggctgtgactgaagaacatgacagaagccaatccattgtacagcaaccaccaaggccaaatctacttgccaccttcctcatatctgccaagtgctcacaaggccttgtcgatgaaagggaaactgaggcagccaatggggtgagagggcaaaggtcacttcaggttgaggcagaggcaggatgaaaacacttacgtcggaggatctctcgttgctttctgacgtaccaggtgtacagagcggcacgcttctgggtcttcataggggtgcccttgttgagatgctgggagaggtgcgactggttcaggccggtgacatcgaccacctccctctgggggatgttgtgttgctgcatgtaacccttgatcattttagcagccctccaagggtcctcactagacagacaagcagatggttagggtactagtgggagacatctggggagaaacattctttttctagggggtgctacctatggtctatgcaaaattctgaattttccccccatctaagctacaactttggggtagacatgaggccaaaatggaagctaaacagaggagaaggtgactgcccctgtacggtacacctcatccctttcttccgaggttagtgggcaaaagaggacttcccatcttcaggaataaaaaagcaccaccaccactctctcttattaagcaaaaagaaaagctcttgttttatttaattaattaatttatttatttattattattttttttgatgtggagttttgctcttgtcacccaggctggagtgcaacggcatcttggctcactgcaacctccaccaggatcctgggttcaagcgattctcctgcctcagcctccagagtaactgggattatagatgcccagcaccacacccagctaaattttttatttttagtagagatggggtttcaccatgttggccaggctgggctcacactcctgaccttaggtgatccatctgcctcggcctcccaaagtgctgggattacagacgtgagccaccgcgcctggccattttattttgctttcctccattttcctgcaatgtgggagatttaaaaggcaggaggcccactggaaagtggggatgcctttagcttggggctggactccctgatcctacaatgaagtagggatagcatcagtttctgaatttgcccaattttagcttcaacctctcctacattattttccttttgaatgggtatctccatttcttataaaacaggggtgaaatgtatgtgttcaccttctaagaagcaaggaggatgtcttagccaaatagtaaataattttcagagttttagaaaagttttccaaaatacaatgttgtatctccttgggacgggaggatcacaccactgaggtgaggcaagtagttaaaaaaaaaaaaaatccacagctccaccttccagacaaaatctactgggctaatggggacaaataacttcaatttcggacattaacaattttagatgcttgttttcctgtattatgtttctcataaattttaaatactgaataagaacatggttatacttttcatttctcataaacacaggtgtgtaaactgctagttttagcacctttgaattttatttgtctagaatggtttcaactttgccaatatcttttcttgcttattgaacagatgctttgaaaagagagatataatttaaaactagaaattaaaatagtgtgcagcacagaacaaaagtactaaagaagcaatatatacatgtttactatttatttaatgcaggtacatatttaacttacaaaaaccagcaccccattactgtatgttgatatatatattagcttgatagaacaagaaaaaaaacggaagggaaaactagtttcaggtgaaacaaaaaagaaaacggtgtagaggctgaaatagatacagtattgcaacataataagcaattttatttctaaatggcgcctttaaatatgtcaaataaaattaattctgtttaatgaataaaaatccagtaatcgaacatattttataagcatttgggtagttgtgattattttattaagactttgatattaaactcgtgagaacacaggctttgatagagatgtttttgagaaatgcaaactttttatattaattatatataagaacgaatttctcaagtatttacaaaggtaatttccaagtacacaatatgaggaagtaacaagaagaacaaaaaatgagaaaacgagttacagtttcaaacgtggagaattcacattaagaggaaaataatgtaataaacgttttagacatatccttgtaaacatcacagatcatttaaaagtttatttctggtcaatatttccacagatatttttaggatggaaaaatactttcaacggctacgaacaagacgcctcgaaccttaggggaaaaattgcattttaaaagtgaatattgctttagcaaattcttcggctatttttcttttgtttaaatgcctttacctgtgttcattttgtatgcctaagaaacctagaaaaatagggtactgttctaagtgggaatgattctgtggaaacagtgaattagcccaacaattggggagggtttaaaaaaagcccccaagaaccttataaataatggcaaaaccttttaagtccgacttaaaagagtgaggagtaagatggcgcagttataccttcacagccctctgaccccaaaattcacgtgtgttcaccgggaagagccgggagagctggttatttttgtttgtttgtttgaaaacacagctcaggttcagaggttccctaacacggagaaaggcaccggtcccgaagagggcctgcggccattgtgtcccaagcgcaggtgtcaaacgccggccgcggcgcccgcagggtccgtcccgcacgctccttctcaaacaatgactttgctgcccacgagcagagaagcctggactccagcgcagtccgcagcgcgttcgttaaggagcccaacttcggcttcttagaatgcagcccactttctagacgcccccggcgcacctgcctcgaggccgcgagaaaggccagctccggccgggagccggggaccgggaagcgcgcagtcccgaccttcctcccctgcctttctcttccaggaggtttactagaactccaggaactccaaaacgcgacttttctttctctttgcttttcgtcttaagggaacacggtgggcaaaagaagggagtgcgtgtgcccgaggcttgggagccccctgtgcagtgacctaggaaccgctagcgatttcttgaaaaattactttaatcaagtccggcgctcccgggagcgggggaggaaaggcagcacccgctcgggacgggagaaaaaagcctccaggtctgtcccgcgtctccaactcggcgagggtctccggctccccagtccctctccctgccctgctggggcctggggctttggggagggaagagcggggctggggtctaaggaccctgggccgggcctggctctccgccggccgggcctgcgggtgtcggcgacccgggggctccgcgggcggctcgggcgctcacagagcccgcgtcccgcgccagagcggtgaggccgcggggccgcacggggcgcctggctgggtgcgcgctgggagcggcgagcagccccgcgcccgcgttttgatctccttcccccctctaagccgcgtttacaacttcaccaatgaataacccgcctctcttttcaacctaatcacggctctttgtgtatctttctgttgatgatttatagaaataaattaataacaccccaactccacgtgctgcagtttatgttacgtctcagctgcggccagcccggcgcggggctgggtgcggaggggcgccccaggtccttccagcgccgcgctagaaagcgggcgcctgcggccgggtgggagggcctaggccctgtggcccccggtggccggcggtgggagcctggttcatccgccaggtcctgagcgacctccccggcagccctggcgccccagccgctcctaggggccactctctcgacccctcttagcctccgcgactcacaccttccgcctcgcggaactctcttgcaggagttctctcccggtaggggagaaatcacctccgggcgggagagcgacgagggaagaacctcaaacctatgaattataccaaagtgtgtttggggaaaaaaaatctacaagttcccctgattgttttggctagagggcaaaccgccaggccctcggagcacaaattcaaatgcaaggtcatatcccaccccaaaccgccgctgcggacgtgcggccaaggctcagccccgaaatcgcggcgcttcagtgtccgaagccacgcgatgggctctgtcctaaagcggagtggcccgggagcgacgtgctgtctcagggaaccgctcggctccttagataattagtaaccagctgtcaaagtctagggcggtcggggaggacccacaaacgatcccggccctggggatacactgccagccggcctgaactcccggggagaggccgggggtgggcagcgaggtctggaaacgccctcctttctcagactgagaccagatcctctgcgaactgaggtctgagacgcgttcgcccccacaccaccgcgcttcgtttctttggccccgcgcgtgtccacccggaccctgcatggaacatgccctttgcaaatctaaacccgcgttggggatcccggataattccgggccttgcatgggcgcggctaacaagagtgcccaccagggaactcgcctcccagatcccggctccggatgccgcctgtccttcggcaaagaactgcaggtcatcatgcaggtcaatgtgtccgaggccgacatgcggctttccagacccgaggcagcgcgcaggaaaaatgcgcggcctggggcttgcagcggcgcgaggctctgctcccgggaagtcgcagcggtttcactgcacccactcgcaccttcagtcgcgtgggcaaacctcccggcaaagggctccacagctccagttctccccggcccagccccagccccgcggggaaaagcccttgggtctcggacgctggcctgggcctggggagaagaagcccggtgggccgcagggtcgtcccgctaagggattgggaagggtccgggtgttgggagagaagcagagcgccccccgggggacttctctggtgggaaacgggcttggcgagtgtggtcgggcgcagtgtcactcaggcccggggccggggctccaggggttcgggtgggtcccctccacctcgctctgcgcctacctgagcatccggtccacctccgcccgctgctccgccgcctcctcggtgttgagcgcctgcagctccttgaggatgggaggtgtgtcatagtcgtcgccgtcctcggagccctcgtcgccggacaagcggcccttggcgtggccgttggtgagagtatggaagaccggcttggtgtcgggctcggccccgctgccaggggacaggggcagcgtctccagcttcaccccgaagttcggggatggcagcaactcctccaaggcctgaaccagcacctccttggtgaccccggagctcagcagggcgctcaggagttcttgctggagcgacgtgagcttggacaccattttccaaggacggaaaaagaagggggtgagggggtgggtgggtgcgagagaggagggtggaggggagtttcacaagcaaaccccaaatccaggaacccctccacccttcagcctccagacacctgttactccccggggtcccggaggctcctccgaaaggagtcagaaaacttctaacttgccatgatcgccaccattaggccatataagatatgcaaattagtgggaagggcccagctttcggctggatgcaaatgatggtggggagggggaaacccggagagagggagagccggaggggcagacctggagagcagaagacctgggccgggagcggggctttgccagggtccattgtactcacgctggggggctagagaccttcttttactggttctgcttatcagccaaacttcacctaacctttggacttgttaagccagtgccttgcagcctaggcgcggggcttttccaccggttctcagttccgctttagtccagagagaagacactacgcttcggggttcaggtgagagccagaggaagctggggtgctcgtggaagaaggggacgcaggaggaagcgaagagtagagaccctggatgcgtcccggccgacgcaggtggtgggccaggagagcccgcagggcggaagagaaactgaccacttaggaaggggcgccgaggccacgggggaggtgaggcagcgttaggtgtggtgagcatgccctggagggactccatttatttctacctcggttactacctccaggccccagaacctccctggcctggtctggcggtttgggtttgcagaactgcccgccagagagcgtaggcgagggtgaaggagtccgggagaactcttggaaagagactactttatgggtagagggagtagccaaagtgaagctcccccagcagctgggctgcaccggcgcccagcctggccacgccactggggagctggacccctggggctcctcactctcctgtttaaacccggatgtcaaggcgcctccaccttgggggaggatggtgaggcagaatggtgaggcactaggatggtgaggcactaggatggtgaggcactaggatggtgaggcagtgaaagcaaagcttgacctgcagctgggtggacacttgcagccgagggtccccccggcccactcatttctggtttattcgtagttccagaacatctgtggttccctgggccggggacgagctctgtagacgaggtcactgcagcagtggcagaagtcttgcactcctagtacagaaggtgtcgacagagctactgagggaaagatgttttttttcccactctggcctgggccaggtaggaagccataggccttgcagcactattggagtttcacctgcttcccccctggtgacgggcaggaggggagggcggcggaagcgcgcccaaacctgcaagctaggacctgacctgtagaagaacagggaaaggggcttctttgcttccaccacacacagacctaaagcttctggggaggagcataacgcttcccttctgggagcctcagtttcctcatctgcaaaaagaggataccactgataacctttttttgggggttgtgtatattgactgaggccacttgtgcaaccgcttggtctaataataaagttcaacactttctggtctgagaagacgggaagccagttcccagtagtaaaactgagttactctggaaa

SEQ ID NO: 258 - DNA, 15648 bp, Homo sapiens
  source 1..15648: mol_type = genomic DNA
aaatccggcgcgatcgatggctgagacccagagcagagcagggaccgctggccccggtccgcgaacaaagcaaactccggggacttggggttccggccaggccggagcccctgcccaccctccctgctatatccaggaaagcagaagcggtttttcggccccaggccgcgcgagaaacgcactctggagccgccaatcctctctgcatggcacctggaggcgcggaaggttccggtgtaattcagcgggaggtggaaggcaggccccgatcccacagcgcgcctatgctcagcctttggtccgagcggccgccctcctgcgtgtgcctcggtccagacggcgctgccgattttccaaggagaggccgtggcccgcgtccgccgctgcaggactccccagcttcgccctccgctccgcgctgcagccctgcgcggtgctctcggttgccactctagccgaggcctcgagacaaagacgcgccgggcactggtggacgacccgggcgcctgggacactccctgactcgcgcctggagtgctcagcatcccggccctgtggcgaaggttgtgagaccttggtccaattccccgaccgtcgtggtcccggctgcggtcctctccagggtccagggagaggaaacccggcgcgcccacagccccggctgactcgagcagctcccgcgcccgacagcgccggcagctctggtctcctccggagggctgctgtgcccccgcgaaggacgagatgacccctgctggccggagctgtggaggttgcctcgccgagacccggatctgtccagtcgctcgtccctgagcaccctaggcgttggggggacgccctgtgagtgtgagagacctccaagagcggctggagtctgaggcgctggccgggcttcgtgaattagacctttatcctaagctccttccctctgccgggcactcggtgtccccacagcagctgaccgccctcctgcccggcttctcatcgctagaggctctgccctggaggctcctaagacctgtgccgcccgctggagcctggcataggagccaagaaactgggcctcgacaagaccaaacacagctggacctttagccaatctaaaccagcccgttgccagcaggtgatttctcttcttccagccagagccacttaggaggcaagtcttcactttgtcagtttacctggcccagagtggagagcttccttcaaagacaggtctgtgaggatggaaccccccagcagcccttgcttgggaagctctctgtaaaacgtgcatagtccacatgcagagcatggaaaagatgttccataaagcacacacctggtcatagtgctgccaataaattgaaacacagtctaaaatgcacagatatctctattatgggtacattgttggcatagaaaatatatttctttataaaatgtacacacagaggcacttttatctactgtatgtgaaagcaaccgactggggaaagattacatacagcacgtatattcaccacatgtaaaactttatttatgcataaaaccaccacacacacacaacctacacaaggaatgtgcagtcctgagtctatttagctacatgtgagtatatactccataaggcatataaaaccagtgcacagaaaatgcatccagatattaatatatctacattttaaaactgcatggaaaatacattattatatatacacaaagtgcatacctacccaatgtatggaaaatatattctgtgagttgtgtttatatacatactgtgtgtgtactaaatacattgaaattgcattcttctgggttcatgaactgtttaagacacaattctctagcaatcttaatagcaggaggaagttcaggcattgggaatggtaatctccatctgctgattttttttctgttcttctgtacttctattatttctgtcttttaaataccccttctgtgtctacatgcatcacttatttaagtgttctcctatgtctatttttctactgcaacttttgtcccaagctggggtctatatttagagtgcaaagtcccgtttgcagcagggtcccactgcataatcactcctgtatggaacaagcattatataattaggttacccatgtgtctcaagatgcattcttctagacctaatataagcatattatagagttgctctgtgctgccagttagaaaagcggtgccactgtgtcttggagaggcgtgtaacaggcaggtggattcctgggtgggtgctgaaccttcaagagcttccaaaggctagggctggtttcacttttaaaaatttgtttttgaatcttaagtctaggaatcagcacgaagcaaaggctggacctttgcttctatgttcctctcaaattccggagcagctcaagtcccctgcatccagccgggacagagaggcttccggcctacacaaccccttcgcttccttgtaattcttaaattgggctgggtctacacaagtagcagggaaaggctttcctataacccaagcttttttccaacaaaacacactcccaacccctttggggaagcattttctgacactgaacggactctgtttgggcctcctaaaattggtcccatttggatctttccttagcaactaaaaatccagaaccctctgacatttgcctatggaaaaattatttgagagacagtgcactcacgcccaacagatatattgtttatgagtccatgggttccgtgtagacgccgccatattttacagtccaaaggaatcaattaattagcgcctcccagtccccccaccgaccgctgctcggctgagcgggcgcggctgagatagaggtgcttggccagctctctggtcttgttaacaagcctcatcataaagatggagatgataagaagagcaaggaagccccggtggccgcgaggggcggggcttggtgggcccggtgtggggcagtggctgacccgagccgggtgctgccccggcacccgctcaggtttttccagcgttctctgggcgttcatgtggcgagctaggacccggattattctctctgtactcccgttccctagattttcccttttcctcatggaacaccaaatcagattttaaaaaataaaaatacataaacctctgtctgtgagtgcccgtcttgccctctgccacgtttgttccgggaactgccgccttgctcccttgcctgcatttctctgcgtggttcgctttcaccttcgtctggcgctctcttccctcctctggctctctctctagcttcgtggttgctttttctaccaggtcggtactggcttaggccccaacgagcttgtgaaaaaaaaatacaaatgccccctggttatctcttgccagagtgaacacccccagataagccagacccaatgaaaataaagttaaaaaaaaaacaacaaaccttgggtgtaattgctggtttaggttgcagcacttctctcgccaatgtgcatacttaacggagagatattgatattaaagggcaggagggaattaattttacttttatagtcatctattaagagcagaagatgatctgagtctcctttaaagggactcaaaaaagggggaagggaaagagaaagaaagggagggggaagggagaaatatgactgaaggggaacaaagatctttgcctgaagaaacaatgtaacactagacagaactataaagtctgggaatgtaagaacgcaggactctctcagcttcccccatttggaattctgtcccctgcacttcctgctgaaatcctgaccctgactacacagtggtattccaggaagaattcatgcaattattcggataattgtagagggagagagagaaagtatttctcttttattgtctgaccctctctgatgtctgtgcagaggaggaggggccaggggtgtatgggatgtagaggaaaaggagacagtagggtctcccaacatcaccctaagccctacaaaatggctattcctaaatcaaggaggccctaggcaggagcttatagattttggaacatactcaagaacgcacaagagatcgagtttgaatgcccctgatttagtttcattttccaggatatttgcttggctttactttgtcagcatagacctgcctcctctagtattgtaatcattacaagtaaggggataatagataattacaggggtatcaataatattattttatagccaaacaagatatgattagagttaatgtcagaggctcggctggagcctgggaggcagcaatagacaaggtggagaggcccttatagtctttctctatcctatttttacatatgctttaatctctataaatccctagttctctaaatctcctcctcagatgtcttaagggaaagctctaagattttaggggctgaaagccagagaagggtgaaccacaatttggtacttgaactctgctcccctccccatagtttcaggagctgtgggatctgctttccccatgcccccccagcctgaggctttgctctcagtccaaggccactagggtcacagagactttgcaggtggggccaatgtgaggaagacagggtcttatccaaaccaatttcattgtcatccccaagtgggcactggtcccaaagtgaagcctcttttgatcctaaattggccttccccctctcccccaggaacacctgggtggggcaaaagccaggctggggctgtgaaggccagttcagggtagggatgcaggaaggactgaaaatatttgtgttgttgttgtttccgggatttgagaccagaagggaccagaaggctgggaagagagagaaagagatcaaggaagtgcctgagaacaaggcaagagagaacccagggaagctatgaaaccagccggcaagggtaaaaagaatgagtgaaagaaagggggcaggaagaacagcaggagaaaaagaaggaaggaaggaaatgaaaaggaaaagacagaaaaaagaggaagaaaaagacaggagggaaatgaaaataagaaagacgagagagaaggatcgaaagataaaaagaggcgggagggaggcagaagcaagggtcggctgttgctctccctcgcccgggcgcctgcagcagtctgggtgggcgggggcgccatgacaaagtgaaggtcaagttagcatcgtaccttataaggaaggcgccggtcctccatttcagccttttctctgccaggacgcggccgtggcatttctggtcttgtaaacatcagactctttggggccttaaaaaaataaagacgcccctccttcctttaccgggggtgagccggccggggaaagcggcggacagggaaatcaactaatgaagactccgggaaacttttctctctttttctctctctggctccgctccccgccagctggggacccttccctccctccttcctccccctcccttcccccgcctctctttttctctatctcccagtcttctgtacctctcgccgccgtctgtaactctgggctccctctctccactccccactcccctactgcaggcttctaaatccgttccattccactgcgaagcggagcaggacctaagaattggagagaaaattaaacgtcataaagaaaagttcatttacagcttaaatgtctgaatgttacggtttccttcagaaaacaaggcggtacactcggtaaggagaagtgaggcagcaggggtggggagggctggtgcggtaggaggcttggttttatttctttctcagatccagaggcggaaagaaagggggagaagcaggaaagtgcgacagaagcgttttacccgggcagctagcaaagaaagatgctgcagtcggtggaactggaagcaaagcgcataagggcccagtgcgggggcagcgatccccgagcgctgagctggctgcgctgaggcctggcgtgcggagaaacaaatatattggatatttgctggtctaggggaggggtgaggcaagaatggagggagacagggagaccgggagcgtaaggcagcgccgcagccggcccggcgagaccgaaagagccccgtatccgccgcgacagcctttggcggtgggcagtgggcaggctcagctcgaaggctcagggaggaaggatcccgaactgagatccttgatccttttcctccagggtagcactggggatgaacagagagaaagaaggagaggaaaataattggtgtggggatatctgcggaggacttacctttttcctggacctcacagctcgttttcgcctcctctgggctcatggagacattttaaggcctaatcattgctttttaaattgaaattctaatggcaagggaagggaaggatgcacagaaaacaatgatggggaattctggttcaatctgatgctccaaaagcctctaattgttgtcacctccaccctcctcaactggaaaaatggcctctgggatctgcccccacctcccactttacctttctgattgagagcacctccgggatattagggacctgagggtctaagtcccgggtgggagccgccaggagcaggggtgttggtctgtggaactcccaggcctcagtgcctggtgctctcttaccctgtgttttcatcataaaaaacaaaggaagaggatttgattatttctggtgatgttaaatgatcctggctttcaaagcagctctgaccccaagatctaaggtgataagtgtctctgccatagacgtttaatctgggcaaagtgccacttatgttacaaaatgcctgggctcaacgggctggaggggtagccgggaagccccagggagggaacagcaggctctctttggcagtatctagagttcggtggatagtattttaaacagttgaaatggactggggaggccctttcttatgtcccctcagtctgggaaggggagctccagttagtgaggtggtttatgagctggacgcttccccctagtgtgggaaagatagagatagccagacctcaccctacaaaaatgtgcttcatgtctgtgacataaaattggcaggcactttggagatttagggacttgcagagagtggggcagggccagacaacctggtgaaagcagaggctgaggtgtgattcagggtgggtgggggtatctgagggagtaagcctgggaaggtatcacccaaaaccatttcctgagagaagccaaatacacacaatgcactccaatattgaaaaacaccagatgatctgcttggaagggatataaacaggccaggcggatgcaagttaataaaacctgaaaaagcccaggcaggaacacttaaaatgccccagaaacaaagcataccatgacaaattctcacccaacacacaagtacacgcaccggaatgttccccaacacagagaaaaagagacttccctaccttgggcctccactcgtgaacactcaggcgtacctgcccagctccaagagtgtacacaaatgtgtgcactctcataaaatgacccaaagaaacccctggggcctgcgggcaggcaccggctgcacaaacaccccacagagccagccccatgtctcctgagcctcgctaatgcacgatccatacccggagataaaagtctagacaatagatggctgtttatgacaacgaggctctccaagtttggggccaggcgataaatctctggcgaatcttcctgtaactcaacttctgactgtagtgaggagaaaaccactgagcccgccgaaaggaaagcagcaaaatgggggagacttgtaaatcctgagcagaaggcactttccttgctggggcaaggaggcataggccacaacactcaccccacggagcagtcctcactgtggaagctttcggatcaagctccagagcacaggcgagtcagagttccccactgcctgcctaggcttccaggttccggaaatcagggcagaatgtgcaggcagaaggcagggcctggaggctggaacagatcccaaacaaatgattcttgctgggggcaaaagatttttttttgtttttgtttttggtgactggaatctttttgctttgtgtcacctgaagtttttcaccccatgccttcccacccctctcttttctttttccttttggattgattagctgtttgttcccttttgcattttcgacccaggcatctgatcgctaataaagagttgctgaagttgatctcataaaaatgccgcgagctcactttgatcaggaggactaggtccgagccttaatgtaggagctaaagccagagaatcagggctccggccaacccgcctctgctctgtggtgaggcgggagatctgggtggcccaacagggcaatcccacccagaaaaggtattttctgtgccactacaactggcttaggaaactgaagcccaatagcagcggctccatttccagcctgcttttaagacatttccttcattttggagcatttggtgagggggccagtgaaaccggctcgtaaaatagggcttttatgggaagaaatagggtcgggttgctagcatcctgggacaatctctccacagaggaagctgggtggggcctgtgggggcaaaggagctgtccttctccctccccactacctcctccataggtcccaggaacctctgagcagcgtccaccagcttaggtggcctgacttggggactcaggcttggggcaatggccaagtctgagaagaggtggaagccaggaactagcagtcccacccgcttcttgttccctggctggggctggggtgtcccgggtgcaagataaaccactgacctgaaaatcccaaagcatactaaagggattattgcaggcagtgatattactgtaagggagagaaatataggcaagaaggtgaaagccaatttctaatgaagtctccttgctggcccagcctgtgaacaaacgagagcgtccatgtgtgggactctctccgcttatctttttattgactccacacaggctgaatttacaatccaagcccactggagcatatgtgggccccatttcttctttcagcattttcctccccagttcatggtctgtgggatgggctcctttccctaccacgatctgctctctagaacccagagcagtggaggaggtagacaagctaacaggaggccccaacgctgtgtgcgggagtttgctctgggagccgcccagggtagaatttaggagacactgtccccttcttaagctgcccctgttgtccgtgtgttggagggaagggtgctggagtctgccttaactttggtccagctacctggacagctgcccagaccgcagccgcctgctagcagccaggctggctgatggcgctgactgaggacaccaagagccagtggggagggccggatggccctgctgcagagaatttcaggtgaaggccaggactcaaagcagatggaggggtcacaggcacccaccagataagatacaaataagccacctggagcgggcttgacaaggaagggattgggggccagggatggctcctgtacagggaggtattgatgctgtggccagaatccacaggctgagagggtgcagcctagggcaaacatctcagctgaagcgtccaggtagcctggacccagggctgggcagggaggctactccagaccatgggcatttttgccagtaaatgtctagctgacctcagtggccagggccttctttccttgaccgtagcagcaactgacagttgctagaggttttttgatttgttgaaaaactaagccatatcaacactagagaacattttaaactttatgccttacttttaaggggaggaatattactttccagaagtctctgttgggagaccccagcgtttcctagacatcaactctttgacattctttcttgcatttcttttttgtttcaaggaaatagggccgccagcagctccttgttgccgcctggctcacttttatggtggcccaggaataaactttggtggtcaaattcaagtgctcagtccagcagctgtctcctcacaggatacagcccctacccccatctcagtcctggctttgctgaatctgccttgggggattgggccccacatcaccctggagggccaggagggggaaggaagcagagccttgggtggaagtggagaaagcgggatctgagactcgagccctcatccacacctctgcaaggataggggtacctctcgcttccctcttgctggttcctatcactgtttgggcagcattttgccttcaataaactcgagtttaatgaggtcagtgtgaaccccattaaaagccatagtccatagttccccaccactataattaaaaatgctggccccatctcactctataaaaagggctagaggaaaaaggaaacacagcagatttttcttttcatggccccttaccaacagaagtctcacacttcagcaaagccccaatctagttcttctttgcttcagtttaagatctgaccagaactaaaggagtagcgcccagcattgagtgcgtagaggggcacctgagacctatccctgagtattccagaaccaccctgagaatgggacccatggtggaggcagactccactcaggtgtcacttaaatgctgagcaagtttgaggaggcaggagcattgaggaggaatggattttaggggttacatatggagacaagctacaattttttgtgtcctccttatctggtttgggagccgcagcaccttatcatgtttcatcaagacaaatccattctaatttctttaagtggaaactaattttaactgagggttatggatgtaaagagagttcgggctattttttgttttcccctgagtgtgcattgggctgagcccttgggggcttcggttcttcccctccttcccaaacaaattgtgccctggcagctcctctttggatccaaggttgctttcagctcatgctggttgcttttggccccttggacccagtccagaacctttcaataaagtgattttcagatgcccacatgtgtcctgtggtgctcagagggatggaaggcaaggggttggggatgcagaatgactgagcctacttcttgggctacagctatccaggaggctgacagacttgtaggagggcaggacagggctgagaaataggaaggaggcactaagatctggtcacagccccagggacagaggctgggggctttgactagggagtggccgctgggcctcccctgatgccacagcatccaccgctcctttccactgtctggttagtctcttctggagacccatacctggccccaccacccaccttacagtcctcaaaatcatccaaggataagaaccccaaacctagtcccccccaccatattcttcctggacccctacactaggcttcttttcagcgcactagctgaggctgagccactaagccaaagggccctgacatagaagatacatggctctcattccaatccttttctttggggtttgggatttgaaaatccacagtggatgtagctttcttcacattgattgacaataaaggcaggcatgaaatattcacccagggccactctctcatactaaatatttaacacaacattagagaaggtttttcccagacttcgccaggcaccggctgggcggctggcgcactgctcaccactcgtttatgactaatctgactccctagccaggggcagcacagcaagccagacaaagttgggacactggcttgcagctgggctgcctcacctttgggaaacttcagatactcttccgggagtctctctaaggactccagaaaggtagtcttgacacccagctctggccaggaaaagagtggacttcttcaaactcttgtgaacaggcggtgtctctgcgggttggaagggtaagagtccctgagatttaagggaaaggattcacttctctggggaaatcaggcagtggggaaagaagtcctcactcccaccctcctggtgctgctcacagagaggaggcaagacccccatacatgagagccctcctccttcccccaatcctgggggaaaaaagagcagcagctagaaaaaaatacaattaccccttcccagccaccaccctcgcccatcccaccgcccaccccaccccaaccctctctctcctcctttgctcgtgctgtggtatggagagaaggggagtgacgagagaaaaacgaatacaaatctgcaattgattttcataatgtttctgcggtgtttgcaaaccaatcgcctgaacgtccccgatcttacctaagagagaacccctcctacgtctgcgaagtgctccgaactgatatatgacaatatctactttggatcacgtgctcagagagagagagactaagacggataacgcgtcatctcgccttcccaaattttcccccctcgctagaccgggtccaaaacctccatccggagccggcaggagaggagaacgatgtttaactcggtcaacctgggcaacttctgctctccgtcgcgcaaggagaggggcgcagatttcggcgagcgagggagctgcgcctccaacctctatctgcccagttgcacttactacatgcccgagttctccacggtctcctccttcctgccccaggccccctctcgtcagatctcctatccctactcggcccaagtgcccccggtccgggaggtctcctacggcctggagccatccggcaagtggcaccatcggaacagctactcctcctgctatgcggcggccgacgagcttatgcaccgggagtgcctgcctccttccaccgtcaccgagatcctcatgaaaaacgaaggctcctacggcggccaccaccaccccagcgccccgcacgcaacccccgccggcttctactcctcagtcaacaagaacagcgtcctgcctcaagccttcgaccgtttcttcgacaacgcctactgcggtggcggcgacccgcccgccgagcccccctgctccggcaagggcgaggccaagggggagcccgaggcacccccggcctcgggactggcgtcccgggctgaggcgggtgccgaggcggaggctgaggaggagaacacaaatcccagctcgtccggttcagcccactccgtggccaaggagccggccaaaggagccgcccccagtaggtagcagcggccggggaacgggcgggcagcgagggagggagcgagagagggagggcgagagaaggggggaggcaaggggagcggggacggcctcgtgttttgggtcagtccgattttatgtggagttttataagcattcaaaggattttattataacctacaaagccctctctcccaacgactcgactttttacgatggagaaggggtggggagggagggaaaagggctctttggaaaagccgggtgaacccccctcccccgttatctccctcggtctgtgaaatttttaaaagcgcaaccattgcgggcgatattaactttgatcgtgaacttagaggagcatttaaggaagtatggggagccgggctgccgaggagtggggaggaggggaggggtggagggggagaaaggggagggcgagggaaagacagggagagatccagagagggggagaggtgggggagaggagcaatggagcagaacctgagaccggagaggcaagccaggaccgctatgatccttcttaaaactagttttgaaaatgttcaaactatgtgttcgcgggtcctcgagcagaaacccaagcaactctggggtcagcggcgacaggggaatggggcgaggcggcgcaggactccactgcgttccaggcgggggtctgggcgtttctcccgggtccgcggccttagtgcttgcctagaactgcggtgtggaaggcgctgccccgcgggcttcccggggcgccagggccccggaagcggctctctggtgtctcggtgcctgctggccggcttcctccccgcctcccgactgctctcgccagatttcactgcttcgcgcctgttctcagctttccccccagatttctgggggaggggttgggctttccgaaccactaggagggcggcccaggaagggcccgagggcggagggggagcagacagggggcccgaggggacgcacgtgtacctggagggctttccttctgtcccagaccctgtcagccgcggctctcgcctgagaactggggacggggtggcgcagtggcgggggggtggggacccgctagacctggcagggggtcgaggcttgcccgggtgctgcggctgcaggagagccagccgcctggcgggagggctgcccgcggtgggctaggagaagggccgctgagcgctcagcgggctggggtcgcccgggtctcacgtgtctctctcccccctctcctcgcacttgccccctcccctccctccagacgccccccgcacccgcaagaagcgctgcccttattcgaaattccagatccgggaactggagcgagagtttttcttcaacgtgtatatcaacaaagagaagcggctgcagctgtcccggatgctgaacctgacggaccgacaagtgaaaatttggtttcagaacagaaggatgaaagaaaagaaactgagcagagaccggctgcagtatttctcgggaaatcctctgctgtaacctgcagaccgggcccttttgggggcggggggaggggaaaattattttattttatttttattttttattttctaactcgtcttctttccgccggtggaaaactggactgtggccagggctggcccccaccgctgtggccggcactccattccggaacctcctggaccctctatctgactctcgctgtgggacagggaccgggcctggaaagggggtgaagggaagtgtctgatgcacggcgagtgaacaccgttggcgccgaggccaagactttgatttaaaagaaaacacacctcggcgacaatgtcttgctgctcggattaggtgggggaggggcgacagtagtgagcgcctgagccgaacaatcctcgaactaaaagccttcccttgcccatgtgaaaagatccgctaagacagcatgtctgccagcggaaacttctcgagctcccccctctaccccgccccaccttgcagctaaatgtgatcctgccttgctgtgaaatttctgtaccttcaacctggtgttaggtgtgcaaagtccgtgtcctacctccgtcttcgccaaggccccgcccgagcctagttgttctccccctgaatgtgtagaaccttcctttgaaatttcttaatcggtgcattgaggtttccacatctttttccaagcagtgccccacttcatggatttatagctatagtctatgcagtcgttacctcttttttttttttttttaagaaaattgaagattggggtggtggaggcagtagggagatgggattgggcacctcccccgtgctggggcctggatttttgtaaataaatttcccaagcgtttctttccacctggagggaaagggggggacgcccccagtgagattcaaatcacgcatctctactcctctgcgtgagtgcgtgtgtacatgtgcactccccaccctgctcccttcccagagggattgctgtgaaatttttttggtggcaaataaagataaatttcattctgttcaatattatgattttatttgacccttttattaacccctct

SEQ ID NO: 259 - DNA, 9090 bp, Homo sapiens
  source 1..9090: mol_type = genomic DNA
ggaagctagccgaggtctccacaagccacccctcacccagggagagccagggaccagctcaactcgaggcagtgcaggcagacccagccagccatgctcgggctcccaggggtgcagagccgctagggcagaccaggaagagaacagaaacgcacccgggatcgcccgggtgcgagcggagaagaagctggagcagagccggaagaccagggctgggaataggtcgtcatttaccgggcagagtggacttccagaggtggggaggctgcgcctgctctttggggcagtacatttggccgttccagccgttgggcagcgcccagggctggtagctttccatgggaagacccaagggttcgtggcgcgactcgccggggcccccgaggcccggcaccactggcatatccaggtagccaggcatgggctgatggtggtggtaaggcccggctgcgtagccctggtggtagaaggcgaactccttagcgcgggagctgaactcctcggcagctgggccggcggtatccatgtacttgtccgcgaaggcggcggcggcggcggccgaggcgggctgcgcgcacgacttgatggcgttggggtgcgggcccatgcgggcgcacgggtagtagccgctgccgaagtagccatagggcagcgccgcgggccccgacgagctctgcgccgctgccgagcaggggctgcattgcttggcggcctctgcgcccgccgggcccgccgggccgggacctcccgaggacgacgcggcggcggcggcggcggctgcagcggcagccgcggcagcagcggcggcagccgacgggggcgcctccccgggggcgctgctgtaggcggacgcggctcctggcgccaagggcgccgggtgcgccatcaggttgcggcactggttggccgcggccgccgccgcagccgcggccgccgccgccaccgagaagttgccccctgccgccgcagccgccgggtgggggaagcccccgcccccggccccggcagccgccgccgctgcagccgctgctgcagccgccgccgccccttccatgttcttgttgagctcgtcggccaccaggccgccgccgttgtcgtagagaaacatgacggtgggctcgatccagcgggggtggaggagcacggaggctgtcatagcccgagccgcatggagaagaccccagtggcgctgttttaaaaagcccccaagaagtgaagagcgcgcggcgcggggccggggcccgagcgaggggggcggatcgcgccccgcggggtcgcgccaggcggccgcccattggcccggcccccccgctccgcccacggcgtatgcaaagcgggcggctccgactccagctctgcacggtgcacccgtcgtccccgccgcggcccgcgccgtccccagcgccagccgcgcggccgcgcaccattcacccgggggagaggcggaggaacgtgcgggtggggcagggaaggaaggcggccccatctccgccccccttcccttcctttatcccagtggggcccagacccgcgcaaccaggcggggaggggaggtgggcgcgcgattgggttgcgatctggagcagtggggacaggtcaggtaattctgccggcggtcagggatgggagagtggggaggacgggaccagcctagctcagaatgggtgtttcttggagcctctgggactgttttctttccaggaaccggcgcgtatttctgcagtgagaccacaggacggacatcggcgccttcggcttcgatggagttgcgattttgctctttccagggaaacagtggcagggtgtttgctgcttatcggttcctgcggatatgcctgggtcccaggacattccactggaggcttggactgcatttaggagcccctatcccttccctgtccacactgttagtgagcaatttcatatgtttgcatttagacccatagactcagaacgactcatcacacacacacacagtgtacactgacacactcacattcgcacacttaggtatacagcctgatccttgctctgacctggtaacaacgcttcctcctccagagactttgagatagagcgagcgatccctgtgcaccattcatccatgctcccacctcgccagtatggctggcttagttctggaaggggcttaagaggaacaagccccagctgtgcttctggctgggacttaaaccccccttctgggccctaaagccacgcttctttgtggaccggacctgactctccaggaatctgggaacccgctatttcactctattttgggacaagaaaaaggggctctttggggccacttcctgccttcccctcaagtaggatctccagcctgcagagggtgcctagtccttctttgcccaagaaccagtccaagaagcctttcctctgtgcctgggaaatgcaaccttttcttgggagcatggtagggtgttggtgctgaagaaccaagcagcgacccgtcttgtagctgccatgttttgtcgaggggttctgggggtcctgctgctttagagccacatacttccacttcctgattcactactgtgagctggtcagatgcctagaagaggaacaagcgttcaaagtgaaagtgggcacattaccggaatagtgctggggagagtgctggattcttttccaccccaggcggactggtgagaagccaggcttggacctgtcctctgctcctagcttgcacactcagccctaaactcagagcagcacgcataccacccctcacacacaccccaccatctgctgtctaaggcccctgggcttcctgcaggatccagaccaatgtggctgggcttgggcttttatctgtcctgatcctggatttgtcctgaccaatgtaagtgtcgcccaataaaaccttctatgacccccacaccagccacccccccaccaagtgtgccctttccttcttgactttttagcagttctgggtaaatattgatttgcccccagtttaccttctccctgactggccatttgcagactcaggaactagcctctgtagggacttgatttttctgttactttctggccgtttcaccaccccccttcctccctccaagtggcattgtaaaactcacagtgacaaagagacagagtagggttctaggcccctgttcctggggacttgaaggcggttttacatactggtcagacacggctggaggccaaggtcaagttgaaagttgcagtccagccagcatgagaactgccatgcgagcgtagagacacaggcagcagcaaaaggcccattgcccacatcccctcactcttaattttctctctctttttaaaattctcgcctctgactctgttcggctgcccagaattttttggtgccttcgtggggtttttggggcggtgtttaccgactcttctctgcctccgccctgctcagccagggctttgagcctcttcggttttccggccagacccggaaaaacgaaaacacagcttggggagcccccactagccggcgcctgtgccagctcacctctggccatggcgcagctgccggtgcacacggcggccaaggccagctccacattcttccctccccctcccacttcaccgtagccccgaaccctgcgcgcagagaaagggtctcagctccacagacgactgggtccctcctcaccaaaaatggtgagacaagatttcatctgtcggccgaggagccacaagcaggtttgtctgagagggatggtgctgggggaaggctttggattgcatctcaaattaagctttgctccttaaatgtggcgctctcgccaagaaaaagcttggggactgaattcttgagatttatggtgcaccttattgatcaaatttatctggactttttttagttccccgatgtgtccctatcattaaaaaaaaaaaaaaaaaaaaaaaacccctctcaagacatgcttatttagaggaaggcaccctgcttgttctcttcttgtcttggatctcaacatgtatcttatttttctaccagacatgtccatggcgtcctggcatgccccactgttttcaaatgtctgcatgtcctgtcagtattgagttgtagccaccaatcagtggaggtcgtttatagaaggagaacgagctctgaataatttgggtctgagtttcagaatttctactcacttttaagcaagaataatcttccttccctgtcttctgctaagggagataagatatttattaatgtttcccaatatgatttctttccctgccaggcagccaacaaactgacttgctgtggcaaaagaaagtttggaggacgattgagacgggtgtgctctgggaagcaagcacagaccctcctagcatttttcctcttttcccaacggcaaggtcaagatttgcttgcctgccaaggtagtgggtcctgatcttctgagctgtctgtccctctgattttttgttctccaggctcaggaattcctataggattgcagaggcaccttcaacctgataattttatattctcaggctcctcctgggttagactggggaagccagggcacccactaggatcggccggcagcggtggcaccttaggcatgacagccaagcagagggctgcatgagtagaggtgggagaggtgggagaggctgcagtcacttcccaggtactgtctggtgcactgatttccccggaggagccctgagagggcagtgcaggcaggaccggagggtagtttctgcagcacggcctttatttcaggaatcaccagagcctttctcagtgttccaaaatgccttggctgacaaggcttcttacttcctggggtaggccagggtgccctgcagggactggttgcccaaaaacctctcactgaagaaaaaaaccgcagctaggtttttctgggtggggaactggatgccagcctggtccacgcggctctgggctcccagcattggagaagaaaaggaaaaagggaaaccaggttttaatcgagcttgattttcattagcaaatgaaatttacctgctctcactttaactctgaggaggctgtcagcactgctccctggcactatttctttgcatccatccagcactaggataaacattccttggttgattctaaagacactttgtatttcaggatattcatgtgcttttaatgtatccaagcagctttacaagccacttttgcagaacatcttaaccctctctctcccaccctaggtgggctggggcacagagataatggcaaaggaagaaagatccagaggaaaaactggttgaggggctgaggagagagaaagagaaaagacgaaatcgtcaaacagtgtagcacctctgaagccaaacttgagcagatcatttgggaaaggagcaagtgggggactgctctgcttatggagggaattttgagtgtccccatcaggtagaagctgtaccctctttcttaaggggaaagggttggtaggtcctgagatctgggctgaagttggccagcggacagggaaatggtgcatcgagtcactcactcaaccttttgttccagatttttgtgcatttgaaacaataataaggcagtaaaaggcttgaggctgtgggatagttttgggctattgtcactgtggtgaccaaatgttaacatggtgaaagtggaagtgcaaggtccaggaagatctacagggacccccactttgcctttaagatcccttcatggggtggatctcaaggacagcaggtttttggaggagcagctctcctgctgcctgtagagttttttgttttgttttgttttttcaggtaccacaaagccactagtgcacagggactcagaaaagacggcaggagcccaaggaaaactccaatttgagtacagccctgccttgtttcccccagagagtccctgagcaaggagacctccaccccacacacaccatttcagaacaaccaggttccagactcccatgaggagcatctcccactgcagagccttggccagccgcgcccggactcctcagagctggcgcaaactccgtcctccaaaactcggctctgggaggcctaagtgactccgaagccggcggcagccgcggcagcggccgtggtggtggaagagctcttttccccgacagtgccactgatcgctcttcactggagctggaaacagccttcgcggaaaggaccggagcatgcgttagaagcagagggagcttggtgaagggctcggctggaaggaggaaacgccttctcgcagtgcgcggccagcccgcgggggacaccggcttgctggactgcaggggcccgtgccacccaggaagtgacctgcgggtcactcagccggggcgctgggcgagcgcgggacggcccggagaattccgtgcggctgcgacgggaaaaggacgaggggtctctgtacccgacgctgccactggcccaaaggaattttacccgcgagcgcccaccccaccctagcttgatgcttacgcccgcaacaaaacaggaaaccaggactgggcagtgcattctttaagtcaacaaatacactgaagacttcgagcgtttgaaggaaggagggggtttgcacgtaagcctggccccgccgggctcggctttctcgctgagaaagcggcgcaggcagccaggcggcctgggcccgcgggggtccatctcgccctagactcctaagaactcccacggccctgttcccagctgcgaattcttaatgcacaacgcgacggagggaaggaaattcaccagcgcagcgacgaggaaggggaactcaggaccccttcaagtacacactgaggtgtgatcagagttttatgggcactttatatgctgtaatcataacgatgtgtgtgccttgatatgcacgcatattcacgcatcaaacgtgcatacacacacagagtgaatgtgcgcatccaatgtcatgtgggtgaaatacaagcatcatacccagccctacgaaaaaaaaattcaccctgtcggaccaggctggtgacatacttcgctggcgcatctccttactcactcttacttttccgacccctcaccattccctctcctgtggcttggtaaatacacctgccctccgtggaaggtgagtcctggactggcgttgccaggttcgcatgtcctccccagaacctccgtctggctccagggactctcactgagcgggtctagagcacccagcacttttcaaggaacagccgcggttcctttgtcccgcggctccagccccgttcggcccagctctcagggaaacgaagcgctcagtaagaacttttgatattagtttgtatgggtatttacactctggtgaggggagctgagtacggaagttccattaatcatactccaaccttgggtttagatattcagtttatgggttgggagagggagtttgccggaaagaaagcatcaaggttggccgctgactccagagaaatgaaaagggagcaaggtcgttttctgtttctggaaatcaagaattaggaatgggcaactacaggtgctaaccaacagaccacttttttgttttttggtagccctttggcagggatagtttttccacctttgcccgatacaatttaaaaaaaaaaatccttttattatggaatttgtcaaacacacacacaagcataacaaacccctaggtacccatctccaagttttgacccctattataatttcatcttcagtgttttattatccacttcctctctctctatctttagtattttaaagtaaatcccagatagcatcacatcatttcacccccaccataggatttcaaagatctgttatatttcaagattgagtaaaagggcttgaaattgggttattgcaatgaaactctagaaaaagcttgagggttcacccaggagtaagctggacaaaaaaggggtttgaggggtggacccatcttgcctaaaaatcttgtctcatctttctaaaaattacatatgaaagaggaagatttatgttacttttttatatgagagaatcgtcctttaatagaaaatttctattgctgcatcagaattatggaggaacacaaaaaacatacctcagtccttagtgtgtcctaaattaacacatattcacttattagtgggtaaatgactatatttcatttcagcacaacttctcccctggtagaaacacaaaagaaatttctaatgattaaactaggaaagtttgcactgaattgatggcttatcagagcaaccgcagttttcaggaagaaattcaatgccatgcgttgaaaatatccccctagcaataagggattatttttaaaaaagaatgaataaagatgttctggtttcttttgttttaatctggtagtctcatttacaacgagcatgattctccctgtcgaactctgaaagtgacttaactgaaaggcttggcaacttcagaaagcaaaaaggtaaaaacagaaaatagcacacggttgaatttgacaacttttacactacccggctgcttaataaattctaaccccacttgtctgagtggatactgatcatcttttctatggcagtattttgtatttgggttgtttatggtttcttaattaatttttttgagtagtgattaaatatctgggatgcttttacactaagcatataaattctcatggtattagaaaagagctatttgatgaaactcataaggggtatgtaaattaaaaaagagaagaaagtgtgtgtacatattttacaataatctcgaacgactccaactatatgttgcagaagccatgagctctctgcccactgtctgtggggtatcagcaagattgactcctaccaagccttgggcacagtggtgggtttaagggtcccatgtctccagatcctaagatggagttcaccgcaggggtgagggctcgggtcagggtaagggtggggactgcagaagtcaaacaattcggaggaagagggagaggggaagagagaagccacagacaagccaggagacaaagaggaagggagagatgggagggagaagaataagaagcaatgaaactgtaattctccacaaaaatttaagctacagcagctcaaagaaggcctgtttttaaag
